(19) United States
(12) Patent Application Publication
(10) Pub. No.: US 2020/0155624 A1
(43) Pub. Date: May 21, 2020

(54) COMPOSITIONS AND METHODS OF TREATING HUNTINGTON'S DISEASE

(71) Applicant: VOYAGER THERAPEUTICS, INC., Cambridge, MA (US)

(72) Inventors: Dinah Wen-Yee Sah, Cambridge, MA (US); Fen Chen, Cambridge, MA (US); Pengcheng Zhou, Cambridge, MA (US); Xin Wang, Arlington, MA (US); Yanqun Shu, Cambridge, MA (US); Jinzhao Hou, Cambridge, MA (US)

(21) Appl. No.: 16/611,041

(22) PCT Filed: May 4, 2018
(86) PCT No.: PCT/US18/31117

§ 371 Date: Nov. 5, 2019

Related U.S. Application Data
(60) Provisional application No. 62/501,786, filed on May 5, 2017.
(60) Provisional application No. 62/507,921, filed on May 18, 2017.
(60) Provisional application No. 62/520,086, filed on Jun. 15, 2017.

(51) Int. Cl. A61K 35/76; C12N 7/00; A61P 25/14; C12N 15/113; C12N 15/86

(52) U.S. Cl. CPC A61K 35/76; C12N 7/00; A61P 25/14; C12N 15/113; C12N 15/86; A61K 48/00; C12N 2750/14123; C12N 2750/14132; C12N 2310/141; C12N 2320/32; C12N 2750/14143; C12N 2750/14121

(57) ABSTRACT

The present invention relates to adeno-associated viral (AAV) particles encoding siRNA molecules and methods for treating Huntington's Disease (HD).

### CROSS REFERENCE TO RELATED APPLICATIONS

[0001] This application claims the benefit of U.S. Provisional Patent Application No. 62/501,786, filed May 5, 2017, entitled Compositions and Methods of Treating Huntington's Disease, U.S. Provisional Patent Application No. 62/507,921, filed May 18, 2017, entitled Compositions and Methods of Treating Huntington's Disease, and U.S. Provisional Patent Application No. 62/520,086, filed Jun. 15, 2017, the contents of each of which is incorporated herein by reference in its entirety.

### REFERENCE TO THE SEQUENCE LISTING

[0002] The present application is being filed along with a Sequence Listing in electronic format. The Sequence Listing is provided as a file entitled 14482_0152_228_SEQ_LISTING.txt, created on May 1, 2018, which is 6,780,111 bytes in size. The information in the electronic format of the sequence listing is incorporated herein by reference in its entirety.

### FIELD OF THE INVENTION

[0003] The present invention relates to compositions, methods and processes for the design, preparation, manufacture, use and/or formulation of AAV particles comprising modulatory polynucleotides, e.g., polynucleotides encoding small interfering RNA (siRNA) molecules which target the Huntingtin (HTT) gene (e.g., the wild-type or the mutated CAG-expanded HTT gene). Targeting of the mutated HTT gene may interfere with the HTT gene expression and the resultant HTT protein production. The AAV particles comprising modulatory polynucleotides encoding the siRNA molecules may be inserted into recombinant adeno-associated virus (AAV) vectors. Methods for using the AAV particles to inhibit the HTT gene expression in a subject with a neurodegenerative disease (e.g., Huntington's Disease (HD)) are also disclosed.

### BACKGROUND OF THE INVENTION

[0004] Huntington's Disease (HD) is a monogenic fatal neurodegenerative disease characterized by progressive chorea, neuropsychiatric and cognitive dysfunction. Huntington's Disease is known to be caused by an autosomal dominant triplet (CAG) repeat expansion which encodes poly-glutamine in the N-terminus of the huntingtin (HTT) protein. This repeat expansion results in a toxic gain of function of HTT and ultimately leads to striatal neurodegeneration which progresses to widespread brain atrophy. Symptoms typically appear between the ages of 35-44 and life expectancy subsequent to onset is 10-25 years. Interestingly, the length of the HTT expansion correlates with both age of onset and rate of disease progression, with longer expansions linked to greater severity of disease. In a small percentage of the HD population (˜6%), disease onset occurs from 2-20 years of age with appearance of an akinetic-rigid syndrome. These cases tend to progress faster than those of the later onset variety and have been classified as juvenile or Westphal variant HD. It is estimated that approximately 35,000-70,000 patients are currently suffering from HD in the US and Europe. Currently, only symptomatic relief and supportive therapies are available for treatment of HD, with a cure yet to be identified. Ultimately, individuals with HD succumb to other diseases (e.g., pneumonia, heart failure), choking, suffocation or other complications such as physical injury from falls.

[0005] The mechanisms by which CAG-expanded HTT results in neurotoxicity are not well understood. Huntingtin protein is expressed in all cells, though its concentration is highest in the brain. The normal function of HTT is unknown, but in the brains of HD patients, HTT aggregates into abnormal nuclear inclusions. It is now believed that it is this process of misfolding and aggregating along with the associated protein intermediates (i.e. the soluble species and toxic N-terminal fragments) that result in neurotoxicity.

[0006] Studies in animal models of HD have suggested that phenotypic reversal is feasible, for example, subsequent to gene shut off in regulated-expression models. Further, animal models in which silencing of HTT was tested, demonstrated promising results with the therapy being both well tolerated and showing potential therapeutic benefit. These findings indicate that HTT silencing may serve as a potential therapeutic target for treatment of HD.

[0007] The adeno-associated virus (AAV) is a member of the parvovirus family and has emerged as an attractive vector for gene therapy in large part because this virus is apparently non-pathogenic; in fact, AAV has not been associated with any human disease. Further appeal is due to its ability to transduce dividing and non-diving cells (including efficient transduction of neurons), diminished proinflammatory and immune responses in humans, its inability to autonomously replicate without a helper virus (AAV is a helper-dependent DNA parvovirus which belongs to the genus Dependovirus), and its long-term gene expression. Although over 10 recombinant AAV serotypes (rAAV) have been engineered into vectors, rAAV2 is the most frequently employed serotype for gene therapy trials. Additional rAAV serotypes have been developed and tested in animal models that are more efficient at neuronal transduction.

[0008] The present invention develops an AAV particle comprising modulatory polynucleotides encoding novel double stranded RNA (dsRNA) constructs and siRNA constructs and methods of their design, to inhibit or prevent the expression of CAG-expanded HTT in HD patients for treatment of the disease.

### SUMMARY OF THE INVENTION

[0009] Described herein are methods, processes, compositions kits and devices for the administration of AAV particles comprising modulatory polynucleotides encoding siRNA molecules for the treatment, prophylaxis, palliation and/or amelioration of Huntington's Disease (HD) related symptoms and disorders.

[0010] The present invention provides viral genomes comprising modulatory polynucleotides encoding siRNA molecules to target HTT and reduce the expression of HTT in a cell and/or subject.

[0011] In some embodiments the viral genome comprises a 5′ inverted terminal repeat (ITR) sequence region such as, but not limited to, SEQ ID NO: 1380 and 1381, an enhancer sequence region such as, but not limited to, SEQ ID NO: 1408 and 1409, a promoter sequence region such as, but not limited to, SEQ ID NO: 1410-1411 and the sequence GTTG, at least one intron sequence region such as, but not limited to, SEQ ID NO: 1417-1419, a modulatory polynucleotide sequence region such as, but not limited to, SEQ ID NO: 1183-1279 and 1346-1347, a polyadenylation (polyA) signal sequence region such as, but not limited to, SEQ ID NO: 1420-1423, and a 3′ ITR sequence region such as, but not limited to, SEQ ID NO: 1382 and 1383.

[0012] In some embodiments, the viral genome may comprise at least one more sequence region.

[0013] In one embodiment, the viral genome comprises at least one multiple cloning site (MCS) sequence region such as, but not limited to, SEQ ID NO: 384-1390 and the sequence TCGAG. In one embodiment, the viral genome comprises one MCS sequence region. In one embodiment, the viral genome comprises two MCS sequence regions.

[0014] In one embodiment, the viral genome comprises at least one filler sequence region such as, but not limited to, SEQ ID NO: 1390-1407. In one embodiment, the AAV viral genome comprises one filler sequence region. In one embodiment, the AAV viral genome comprises two filler sequence regions.

[0015] In one embodiment, the viral genome comprises at least one exon sequence region such as, but not limited to, SEQ ID NO: 1415 and 1416.

[0016] In one embodiment, the viral genome comprises one intron sequence region.

[0017] In one embodiment, the viral genome comprises two intron sequence regions.

[0018] In one embodiment, the viral genome comprises a 5′ inverted terminal repeat (ITR) sequence region, an enhancer sequence region, a promoter sequence region, at least one intron sequence region, a modulatory polynucleotide sequence region, a polyadenylation (polyA) signal sequence region, and a 3′ ITR sequence region. As a non-limiting example, the AAV viral genome comprises a sequence such as SEQ ID NO: 1352-1379 or a fragment or variant thereof.

[0019] In one embodiment, the viral genome such as, but not limited to, any of SEQ ID NO: 1352-1379 or variants having at least 95% identity thereto.

[0020] In one embodiment, an AAV particle may comprise a viral genome such as, but not limited to, any of SEQ ID NO: 1352-1379 or variants having at least 95% identity thereto. The AAV particle may comprise a serotype such as, but not limited to, any of the serotypes listed in Table 1.

[0021] Provided herein are also pharmaceutical compositions of AAV particles. The AAV particle may comprise a viral genome such as, but not limited to, any of SEQ ID NO: 1352-1379 or variants having at least 95% identity thereto. The AAV particle may comprise a serotype such as, but not limited to, any of the serotypes listed in Table 1.

[0022] In some embodiments, the present invention provides methods for inhibiting/silencing HTT gene expression in a cell. The cell may be a neuron (e.g., medium spiny neurons of the putamen, caudate or striatum, and cortical neurons in the cerebral cortex), an astrocyte (e.g., astrocyte in the striatum, cortical astrocytes in the cerebral cortex) and/or oligodendrocytes. As a non-limiting example, the inhibition (or lowering) of the HTT gene expression in the putamen, caudate and cortex reduces the effect of Huntington's Disease in a subject. As another non-limiting example, the inhibition (or lowering) of the HTT gene expression in the medium spiny neurons in the striatum reduces the effect of Huntington's Disease in a subject. As yet another non-limiting example, the inhibition (or lowering) of the HTT gene expression in the astrocytes in the striatum reduces the effect of Huntington's Disease in a subject. In some aspects, the inhibition of the HTT gene expression refers to an inhibition or lowering by at least about 20%, preferably by at least about 30%, 40%, 50%, 60%, 70%, 80%, 85%, 90%, 95% and 100%. Accordingly, the protein product of the targeted gene may be inhibited by at least about 20%, preferably by at least about 30%, 40%, 50%, 60%, 70%, 80%, 85%, 90%, 95% and 100%.

[0023] In one embodiment, the present invention provides methods for inhibiting/silencing HTT gene expression by at least about 40% in a cell using the viral genomes comprising the modulatory polynucleotides encoding the siRNA molecules. The cell may be a neuron (e.g., medium spiny neurons of the putamen or striatum, and cortical neurons in the cerebral cortex), an astrocyte (e.g., astrocyte in the striatum, cortical astrocytes in the cerebral cortex) and/or oligodendrocytes. As a non-limiting example, the at least 40% inhibition (or lowering) of the HTT gene expression in the putamen and cortex reduces the effect of Huntington's Disease in a subject. As another non-limiting example, the at least 40% inhibition (or lowering) of the HTT gene expression in the medium spiny neurons in the striatum reduces the effect of Huntington's Disease in a subject. As yet another non-limiting example, the at least 40% inhibition (or lowering) of the HTT gene expression in the astrocytes in the striatum reduces the effect of Huntington's Disease in a subject.

[0024] In some embodiments, the present invention provides methods for treating, or ameliorating Huntington's Disease associated with the HTT gene (e.g., CAG-expanded HTT gene) and the resultant HTT protein (e.g., poly-Q protein) in a subject in need of treatment, the method comprising administering to the subject a pharmaceutically effective amount a pharmaceutical composition comprising the AAV particles described herein, and ameliorating symptoms of HD in the subject.

[0025] In some embodiments, an AAV particle comprising the nucleic acid sequence encoding at least one siRNA duplex targeting the HTT gene is administered to the subject in need for treating and/or ameliorating HD. The AAV vector serotype may be any of the serotypes listed in Table 1.

[0026] In some embodiments, the AAV particles may be introduced directly into the central nervous system of the subject, for example, by intracranial injection.

[0027] In some embodiments, the pharmaceutical composition of the present invention is used as a solo therapy. In other embodiments, the pharmaceutical composition of the present invention is used in combination therapy. The combination therapy may be in combination with one or more neuroprotective agents such as small molecule compounds, growth factors and hormones which have been tested for their neuroprotective effect on neuron degeneration.

[0028] In some embodiments, the present invention provides methods for treating, or ameliorating Huntington's Disease by administering to a subject in need thereof a therapeutically effective amount of a plasmid or AAV vector described herein.

[0029] In some embodiments, the present invention provides a method for inhibiting the expression of the HTT gene in a region of the central nervous system of a subject by administering to the subject a composition with at least one AAV particle which comprises a modulatory polynucleotide encoding an siRNA molecule that, when expressed, inhibits or suppresses the expression of HTT in the subject. The expression may be reduced in a region of the subject such as, but not limited to, the forebrain of a subject or a region of the forebrain such as, but not limited to, the putamen. The expression of HTT in the forebrain or region of the forebrain (e.g., putamen) may be reduced by 40-70%, 40-60%, 50-70%, 50-60%, or it may be reduced by 50%, 51%, 52%, 53%, 54%, 55%, 56%, 57%, 58%, 59%, or 60%.

[0030] In some embodiments, the present invention provides a method for treating Huntington's Disease (HD) in a subject in need of treatment. The method may inhibit the expression of the HTT gene in a region of the central nervous system of a subject comprising administering to the subject a composition comprising at least one AAV particle which comprises a modulators polynucleotide encoding an siRNA molecule that, when expressed, inhibits or suppresses the expression of HTT in the subject. The expression may be reduced in a region of the subject such as, but not limited to, the forebrain of a subject or a region of the forebrain such as, but not limited to, the putamen. The expression of HTT in the forebrain or region of the forebrain (e.g., putamen) may be reduced by 40-70%, 40-60%, 50-70%, 50-60%, or it may be reduced by 50%, 51%, 52%, 53%, 54%, 55%, 56%, 57%, 58%, 59%, or 60%.

### BRIEF DESCRIPTION OF THE DRAWINGS

[0031] The foregoing and other objects, features and advantages will be apparent from the following description of particular embodiments of the invention, as illustrated in the accompanying drawings. The drawings are not necessarily to scale, emphasis instead being placed upon illustrating the principles of various embodiments of the invention.

[0032] FIG. 1 is a schematic of a viral genome of the invention.

[0033] FIG. 2 is a schematic of a viral genome of the invention.

[0034] FIG. 3 is a schematic of a viral genome of the invention.

[0035] FIG. 4 is a schematic of a viral genome of the invention.

[0036] FIG. 5 is a schematic of a viral genome of the invention.

[0037] FIG. 6 is a schematic of a viral genome of the invention.

[0038] FIG. 7 is a schematic of a viral genome of the invention.

[0039] FIG. 8 is a schematic of a viral genome of the invention.

[0040] FIG. 9 is a schematic of a viral genome of the invention.

[0041] The details of one or more embodiments of the invention are set forth in the accompanying description below. Although any materials and methods similar or equivalent to those described herein can be used in the practice or testing of the present invention, the preferred materials and methods are now described. Other features, objects and advantages of the invention will be apparent from the description. In the description, the singular forms also include the plural unless the context clearly dictates otherwise. Unless defined otherwise, all technical and scientific terms used herein have the same meaning as commonly understood by one of ordinary skill in the art to which this invention belongs. In the case of conflict, the present description will control.

### DETAILED DESCRIPTION OF THE INVENTION

### I. Compositions of the Invention

[0042] According to the present invention, compositions for delivering modulatory polynucleotides and/or modulatory polynucleotide-based compositions by adeno-associated viruses (AAVs) are provided, AAV particles of the invention may be provided via any of several routes of administration, to a cell, tissue, organ, or organism, in vivo, ex vivo or in vitro.

[0043] As used herein, an “AAV particle” is a virus which comprises a viral genome with at least one payload region and at least one inverted terminal repeat (ITR) region.

[0044] As used herein, “viral genome” or “vector genome” or “viral vector” refers to the nucleic acid sequence(s) encapsulated in an AAV particle. Viral genomes comprise at least one payload region encoding polypeptides or fragments thereof.

[0045] As used herein, a “payload” or “payload region” is any nucleic acid molecule which encodes one or more polypeptides of the invention. At a minimum, a payload region comprises nucleic acid sequences that encode a sense and antisense sequence, an siRNA-based composition, or a fragment thereof, but may also optionally comprise one or more functional or regulatory elements to facilitate transcriptional expression and/or polypeptide translation.

[0046] The nucleic acid sequences and polypeptides disclosed herein may be engineered to contain modular elements and/or sequence motifs assembled to enable expression of the modulatory polynucleotides and/or modulatory polynucleotide-based compositions of the invention. In some embodiments, the nucleic acid sequence comprising the payload region may comprise one or more of a promoter region, an intron, a Kozak sequence, an enhancer or a polyadenylation sequence. Payload regions of the invention typically encode at least one sense and antisense sequence, an siRNA-based compositions, or fragments of the foregoing in combination with each other or in combination with other polypeptide moieties.

[0047] The payload regions of the invention may be delivered to one or more target cells, tissues, organs or organisms within the viral genome of an AAV particle.

### Adeno-Associated Viruses (AAVs) and AAV Particles

[0048] Viruses of the Parvoviridae family are small non-enveloped icosahedral capsid viruses characterized by a single stranded DNA genome. Parvoviridae family viruses consist of two subfamilies: Parvovirinae, which infect vertebrates, and Densovirinae, which infect invertebrates. Due to its relatively simple structure, easily manipulated using standard molecular biology techniques, this virus family is useful as a biological tool. The genome of the virus may be modified to contain a minimum of components for the assembly of a functional recombinant virus, or viral particle, which is loaded with or engineered to express or deliver a desired payload, which may be delivered to a target cell, tissue, organ, or organism.

[0049] The parvoviruses and other members of the Parvoviridae family are generally described in Kenneth I. Berns, “Parvoviridae: The Viruses and Their Replication,” Chapter 69 in FIELDS VIROLOGY (3d Ed. 1996), the contents of which are incorporated by reference in their entirety.

[0050] The Parvoviridae family comprises the Dependovirus genus which includes adeno-associated viruses (AAV) capable of replication in vertebrate hosts including, but not limited to, human, primate, bovine, canine, equine, and ovine species.

[0051] The AAV viral genome is a linear, single-stranded DNA (ssDNA) molecule approximately 5,000 nucleotides (nt) in length. The AAV viral genome can comprise a payload region and at least one inverted terminal repeat (ITR) or ITR region. ITRs traditionally flank the coding nucleotide sequences for the non-structural proteins (encoded by Rep genes) and the structural proteins (encoded by capsid genes or Cap genes). While not wishing to be bound by theory, an AAV viral genome typically comprises two ITR sequences. The AAV viral genome comprises a characteristic T-shaped hairpin structure defined by the self-complementary terminal 145 nt of the 5′ and 3′ ends of the ssDNA which form an energetically stable double stranded region. The double stranded hairpin structures comprise multiple functions including, but not limited to, acting as an origin for DNA replication by functioning as primers for the endogenous DNA polymerase complex of the host viral replication cell.

[0052] In addition to the encoded heterologous payload, AAV vectors may comprise the viral genome, in whole or in part, of any naturally occurring and/or recombinant AAV serotype nucleotide sequence or variant, AAV variants may have sequences of significant homology at the nucleic acid (genome or capsid) and amino acid levels (capsids), to produce constructs which are generally physical and functional equivalents, replicate by similar mechanisms, and assemble by similar mechanisms. Chiorini et al., J. Vir. 71: 6823-33(1997); Srivastava et al., J. Vir. 45:555-64 (1983); Chiorini et al., J. Vir. 73:1309-1319 (1999); Rutledge et al., J. Vir. 72:309-319 (1998); and Wu et al., J. Vir. 74: 8635-47 (2000), the contents of each of which are incorporated herein by reference in their entirety.

[0053] In one embodiment, AAV particles of the present invention are recombinant AAV vectors which are replication defective, lacking sequences encoding functional Rep and Cap proteins within their viral genome. These defective AAV vectors may lack most or all parental coding sequences and essentially carry only one or two AAV ITR sequences and the nucleic acid of interest for delivery to a cell, a tissue, an organ or an organism.

[0054] In one embodiment, the viral genome of the AAV particles of the present invention comprise at least one control element which provides for the replication, transcription and translation of a coding sequence encoded therein. Not all of the control elements need always be present as long as the coding sequence is capable of being replicated, transcribed and/or translated in an appropriate host cell. Non-limiting examples of expression control elements include sequences for transcription initiation and/or termination, promoter and/or enhancer sequences, efficient RNA processing signals such as splicing and polyadenylation signals, sequences that stabilize cytoplasmic mRNA, sequences that enhance translation efficacy (e.g., Kozak consensus sequence), sequences that enhance protein stability, and/or sequences that enhance protein processing and/or secretion.

[0055] According to the present invention, AAV particles for use in therapeutics and/or diagnostics comprise a virus that has been distilled or reduced to the minimum components necessary for transduction of a nucleic acid payload or cargo of interest. In this manner, AAV particles are engineered as vehicles for specific delivery while lacking the deleterious replication and/or integration features found in wild-type viruses.

[0056] AAV vectors of the present invention may be produced recombinantly and may be based on adeno-associated virus (AAV) parent or reference sequences. As used herein, a “vector” is any molecule or moiety which transports, transduces or otherwise acts as a carrier of a heterologous molecule such as the nucleic acids described herein.

[0057] In addition to single stranded AAV viral genomes (e.g., ssAAVs), the present invention also provides for self-complementary AAV (scAAVs) viral genomes. scAAV viral genomes contain DNA strands which anneal together to form double stranded DNA. By skipping second strand synthesis, scAAVs allow for rapid expression in the cell.

[0058] In one embodiment, the AAV particle of the present invention is an scAAV.

[0059] In one embodiment, the AAV particle of the present invention is an ssAAV.

[0060] Methods for producing and/or modifying AAV particles are disclosed in the art such as pseudotyped AAV vectors (PCT Patent Publication Nos. WO200028004; WO200123001; WO2004112727; WO 2005005610 and WO 2005072364, the content of each of which is incorporated herein by reference in its entirety).

[0061] AAV particles may be modified to enhance the efficiency of delivery. Such modified AAV particles can be packaged efficiently and be used to successfully infect the target cells at high frequency and with minimal toxicity. In some embodiments the capsids of the AAV particles are engineered according to the methods described in US Publication Number US 20130195801, the contents of which are incorporated herein by reference in their entirety.

[0062] In one embodiment, the AAV particles comprising a payload region encoding the polypeptides of the invention may be introduced into mammalian cells.

### AAV Serotypes

[0063] AAV particles of the present invention may comprise or be derived from any natural or recombinant AAV serotype. According to the present invention, the AAV particles may utilize or be based on a serotype selected from any of the following AAV1, AAV2, AAV2G9, AAV3, AAV3a, AAV3b, AAV3-3, AAV4, AAV4-4, AAV5, AAV6, AAV6.1, AAV6.2, AAV6.1.2, AAV7, AAV7.2, AAV8, AAV9, AAV9.11, AAV9.13, AAV9.16, AAV9.24, AAV9.45, AAV9.47, AAV9.61, AAV9.68, AAV9.84, AAV9.9, AAV10, AAV11, AAV12, AAV16.3, AAV24.1, AAV27.3, AAV42.12, AAV42-1b, AAV42-2, AAV42-3a, AAV42-3b, AAV42-4, AAV42-5a, AAV42-5b, AAV42-6b, AAV42-8, AAV42-10, AAV42-11, AAV42-12, AAV42-13, AAV42-15, AAV42-aa, AAV43-1, AAV43-12, AAV43-20, AAV43-21, AAV43-23, AAV43-25, AAV43-5, AAV44.1, AAV44.2, AAV44.5, AAV223.1, AAV223.2, AAV223.4, AAV223.5, AAV223.6, AAV223.7, AAV1-7/rh.48, AAV1-8/rh.49, AAV2-15/rh.62, AAV2-3/rh.61, AAV2-4/rh.50, AAV2-5/rh.51, AAV3.1/hu.6, AAV3.1/hu.9, AAV3-9/rh.52, AAV3-11/rh.53, AAV4-8/r11.64, AAV4-9/rh.54, AAV4-19/rh.55, AAV5-3/rh.57, AAV5-22/rh.58, AAV7.3/hu.7, AAV16.8/hu.10, AAV16.12/hu.11 AAV29.3/bb.1, AAV29.5/bb.2, AAV106.1/hu.37, AAV114.3/hu.40, AAV127.2/hu.41, AAV127.5/hu.42, AAV128.3/hu.44, AAV130.4/hu.48, AAV145.1/hu.53, AAV145.5/hu.54, AAV145.6/hu.55, AAV161.10/hu.60, AAV161.6/hu.61, AAV33.12/hu.17, AAV33.4/hu.15, AAV33.8/hu.16, AAV52/hu.19, AAV52.1/hu.20, AAV58.2/hu.25, AAVA3.3, AAVA3.4, AAVA3.5, AAVA3.7, AAVC1, AAVC2, AAVC5, AAV-DJ, AAV-DJ8, AAVF3, AAVF5, AAVH2, AAVrh.72, AAVhu.8, AAVrh.68, AAVrh.70, AAVpi.1, AAVpi.3, AAVpi.2, AAVrh.60, AAVrh.44, AAVrh.65, AAVrh.55, AAVrh.47, AAVrh.69, AAVrh.45, AAVrh.59, AAVhu.12, AAVH6, AAVLK03, AAVH-1/hu.1, AAVH-5/hu.3, AAVLG-10/rh.40, AAVLG-4/rh.38, AAVLG-9/hu.39, AAVN721-8/rh.43, AAVCh.5, AAVCh.5R1, AAVcy.2, AAVcy.3, AAVcy.4, AAVcy.5, AAVCy.5R1, AAVCy.5R2, AAVCy.5R3, AAVCy.5R4, AAVcy.6, AAVhu.1, AAVhu.2, AAVhu.3, AAVhu.4, AAVhu.5, AAVhu.6, AAVhu.7, AAVhu.9, AAVhu.10, AAVhu.11, AAVhu.13, AAVhu.15, AAVhu.16, AAVhu.17, AAVhu.18, AAVhu.20, AAVhu.21, AAVhu.22, AAVhu.23.2, AAVhu.24, AAVhu.25, AAVhu.27, AAVhu.28, AAVhu.29. AAVhu.29R, AAVhu.31, AAVhu.32, AAVhu.34, AAVhu.35, AAVhu.37, AAVhu.39, AAVhu.40, AAVhu.41, AAVhu.42, AAVhu.43, AAVhu.44, AAVhu.44R1, AAVhu.44R2, AAVhu.44R3, AAVhu.45, AAVhu.46, AAVhu.47, AAVhu.48, AAVhu.48R1, AAVhu.48R2, AAVhu.48R3, AAVhu.49, AAVhu.51, AAVhu.52, AAVhu.54, AAVhu.55, AAVhu.56, AAVhu.57, AAVhu.58, AAVhu.60, AAVhu.61, AAVhu.63, AAVhu.64, AAVhu.66, AAVhu.67, AAVhu.14/9, AAVhu.t 19, AAVrh.2, AAVrh.2R, AAVrh.8, AAVrh.8R, AAVrh.10, AAVrh.12, AAVrh.13, AAVrh.13R, AAVrh.14, AAVrh.17, AAVrh.18, AAVrh.19, AAVrh.20, AAVrh.21, AAVrh.22, AAVrh.23, AAVrh.24, AAVrh.25, AAVrh.31, AAVrh.32, AAVrh.33, AAVrh.34, AAVrh.35, AAVrh.36, AAVrh.37, AAVrh.37R2, AAVrh.38, AAVrh.39, AAVrh.40, AAVrh.46, AAVrh.48, AAVrh.48.1, AAVrh.48.1.2, AAVrh.48.2, AAVrh.49, AAVrh.51, AAVrh.52, AAVrh.53, AAVrh.54, AAVrh.56, AAVrh.57, AAVrh.58, AAVrh.61, AAVrh.64, AAVrh.64R1, AAVrh.64R2, AAVrh.67, AAVrh.73, AAVrh.74, AAVrh8R, AAVrh8R A586R mutant, AAVrh8R R533A mutant, AAAV, BAAV, caprine AAV, bovine AAV, ovine AAV, AAVhE1.1, AAVhEr1.5, AAVhER1.14, AAVhEr1.8, AAVhEr1.16, AAVhEr1.18, AAVhEr1.35, AAVhEr1.7, AAVhEr1.36, AAVhEr2.29, AAVhEr2.4, AAVhEr2.16, AAVhEr2.30, AAVhEr2.31, AAVhEr2.36, AAVhER1.23, AAVhEr3.1, AAV2.5T, AAV-PAEC, AAV-LK01, AAV-LK02, AAV-LK03, AAV-LK04, AAV-LK05, AAV-LK06, AAV-LK07, AAV-LK08, AAV-LK09, AAV-LK10, AAV-LK11, AAV-LK12, AAV-LK13, AAV-LK14, AAV-LK15, AAV-LK16, AAV-LK17, AAV-LK18, AAV-LK19, AAV-PAEC2, AAV-PAEC4, AAV-PAEC6, AAV-PAEC7, AAV-PAEC8, AAV-PAEC11, AAV-PAEC12, AAV-2-pre-miRNA-101, AAV-8h, AAV-8b, AAV-h, AAV-b, AAV SM 10-2, AAV Shuffle 100-1, AAV Shuffle 100-3, AAV Shuffle 100-7, AAV Shuffle 10-2, AAV Shuffle 10-6, AAV Shuffle 10-8, AAV Shuffle 100-2, AAV SM 10-1, AAV SM 10-8, AAV SM 100-3, AAV SM 100-10, BNP61 AAV, BNP62 AAV, BNP63 AAV, AAVrh.50, AAVrh.43, AAVrh.62, AAVrh.48, AAVhu.19, AAVhu.11, AAVhu.53, AAV4-8/rh.64, AAVLG-9/hu.39, AAV54.5/hu.23, AAV54.2/hu.22, AAV54.7/hu.24, AAV54.1/hu.21, AAV54.4R/hu.27, AAV46.2/hu.28, AAV46.6/hu.29, AAV128.1/hu.43, true type AAV (ttAAV), UPENN AAV10, Japanese AAV 10 serotypes, AAV CBr-7.1, AAV CBr-7.10, AAV CBr-7.2, AAV CBr-7.3, AAV CBr-7.4, AAV CBr-7.5, AAV CBr-7.7, AAV CBr-7.8, AAV CBr-B7.3, AAV CBr-B7.4, AAV CBr-E1, AAV CBr-E2, AAV CBr-E3, AAV CBr-E4, AAV CBr-E5, AAV CBr-e5, AAV CBr-E6, AAV CBr-E7, AAV CBr-E8, AAV CHt-1, AAV CHt-2, AAV CHt-3, AAV CHt-6.1, AAV CHt-6.10, AAV CHt-6.5, AAV CHt-6.6, AAV CHt-6.7, AAV CHt-6.8, AAV CHt-P1, AAV CHt-P2, AAV CHt-P5, AAV CHt-P6, AAV CHt-P8, AAV CHt-P9, AAV CKd-1, AAV CKd-10, AAV CKd-2, AAV CKd-3, AAV CKd-4, AAV CKd-6, AAV CKd-7, AAV CKd-8, AAV CKd-B1, AAV CKd-B2, AAV CKd-B3, AAV CKd-B4, AAV CKd-B5, AAV CKd-B6, AAV CKd-B7, AAV CKd-B8, AAV CKd-H1, AAV CKd-H2, AAV CKd-H3, AAV CKd-H4, AAV CKd-H5, AAV CKd-H6, AAV CKd-N3, AAV CKd-N4, AAV CKd-N9, AAV CLg-F1, AAV CLg-F2, AAV CLg-F3, AAV CLg-F4, AAV CLg-F5, AAV CLg-F6, AAV CLg-F7, AAV CLg-F8, AAV CLv-1, AAV CLv1-1, AAV Clv1-10, AAV CLv1-2, AAV CLv-12, AAV CLv1-3, AAV CLv-13, AAV CLv1-4, AAV Clv1-7, AAV Clv1-8, AAV Clv1-9, AAV CLv-2, AAV CLv-3, AAV CLv-4, AAV CLv-6, AAV CLv-8, AAV CLv-D1, AAV CLv-D2, AAV CLv-D3, AAV CLv-D4, AAV CLv-D5, AAV CLv-D6, AAV CLv-D7, AAV CLv-D8, AAV CLv-E1, AAV CLv-K1, AAV CLv-K3, AAV CLv-K6, AAV CLv-L4, AAV CLv-L5, AAV CLv-L6, AAV CLv-M1, AAV CLv-M11, AAV CLv-M2, AAV CLv-M5, AAV CLv-M6, AAV CLv-M7, AAV CLv-M8, AAV CLv-M9, AAV CLv-R1, AAV CLv-R2, AAV CLv-R3, AAV CLv-R4, AAV CLv-R5, AAV CLv-R6, AAV CLv-R7, AAV CLv-R8, AAV CLv-R9, AAV CSp-1, AAV CSp-10, AAV CSp-11, AAV CSp-2, AAV CSp-3, AAV CSp-4, AAV CSp-6, AAV CSp-7, AAV CSp-8, AAV CSp-8.10, AAV CSp-8.2, AAV CSp-8.4, AAV CSp-8.5, AAV CSp-8.6, AAV CSp-8.7, AAV CSp-8.8, AAV CSp-8.9, AAV CSp-9, AAV.hu.48R3, AAV.VR-355, AAV3B, AAV4, AAV5, AAVF1/HSC1, AAVF11/HSC11, AAVF12/HSC12, AAVF13/HSC13, AAVF14/HSC14, AAVF15/HSC15, AAVF16/HSC16, AAVF17/HSC17, AAVF2/HSC2, AAVF3/HSC3, AAVF4/HSC4, AAVF5/HSC5, AAVF6/HSC6, AAVF7/HSC7, AAVF8/HSC8, AAVF9/HSC9, AAV-PHP.B (PHP.B), AAV-PHP.A (PHP.A), G2B-26, G2B-13, THI1.1-32, TH1.1-35, AAVPHP.B2, AAVPHP.B3, AAVPHP.N/PHP.B-DGT, AAVPHP.B-EST, AAVPHP.B-GGT, AAVPHP.B-ATP, AAVPHP.B-ATT-T, AAVPHP.B-DGT-T, AAVPHP.B-GGT-T, AAVPHP.B-SGS, AAVPHP.B-AQP, AAVPHP.B-QQP, AAVPHP.B-SNP(3), AAVPHP.B-SNP, AAVPHP.B-QGT, AAVPHP.B-NQT, AAVPHP.B-EGS, AAVPHP.B-SGN, AAVPHP.B-EGT, AAVPHP.B-DST, AAVPHP.B-DST, AAVPHP.B-STP, AAVPHP.B-PQP, AAVPHP.B-SQP, AAVPHP.B-QLP, AAVPHP.B-TMP, AAVPHP.B-TIP, AAVPHP.S/G2A12, AAVG2A15/G2A3, AAVG2B4, and/or AAVG2B5 and variants thereof.

[0064] In some embodiments, the AAV serotype may be, or have, a modification as described in United States Publication No. US 20160361439, the contents of which are herein incorporated by reference in their entirety, such as but not limited to, Y252F, Y272F, Y444F, Y500F, Y700F, Y704F, Y730F, Y275F, Y281F, Y508F, Y576F, Y612G, Y673F, and Y720F of the wild-type AAV1, AAV2, AAV3, AAV4, AAV5, AAV6, AAV7, AAV8, AAV9, AAV10, AAV11, AAV12, and hybrids thereof.

[0065] In some embodiments, the AAV serotype may be, or have, a mutation as described in U.S. Pat. No. 9,546,112, the contents of which are herein incorporated by reference in their entirety, such as, but not limited to, at least two, but not all the F129L, D418E, K531E, L584F, V598A and H642N mutations in the sequence of AAV6 (SEQ ID NO:4 of U.S. Pat. No. 9,546,112), AAV1 (SEQ ID NO:6 of U.S. Pat. No. 9,546,112), AAV2, AAV3, AAV4, AAV5, AAV7, AAV9, AAV10 or AAV1 or derivatives thereof. In yet another embodiment, the AAV serotype may be, or have, an AAV6 sequence comprising the K531E mutation (SEQ ID NO:5 of U.S. Pat. No. 9,546,112).

[0066] In some embodiments, the AAV serotype may be, or have, a mutation in the AAV1 sequence, as described in in United States Publication No. US 20130224836, the contents of which are herein incorporated by reference in their entirety, such as, but not limited to, at least one of the surface-exposed tyrosine residues, preferably, at positions 252, 273, 445, 701, 705 and 731 of AAV1 (SEQ ID NO: 2 of US 20130224836) substituted with another amino acid, preferably with a phenylalanine residue. In one embodiment, the AAV serotype may be, or have, a mutation in the AAV9 sequence, such as, but not limited to, at least one of the surface-exposed tyrosine residues, preferably, at positions 252, 272, 444, 500, 700, 704 and 730 of AAV2 (SEQ ID NO: 4 of US 20130224836) substituted with another amino acid, preferably with a phenylalanine residue. In one embodiment, the tyrosine residue at position 446 of AAV9 (SEQ ID NO: 6 US 20130224836) is substituted with a phenylalanine residue.

[0067] In some embodiments, the serotype may be AAV2 or a variant thereof, as described in International Publication No. WO2016130589, herein incorporated by reference in its entirety. The amino acid sequence of AAV2 may comprise N587A, E548A, or N708A mutations. In one embodiment, the amino acid sequence of any AAV may comprise a V708K mutation.

[0068] In some embodiments, the AAV serotype may be, or have, a sequence as described in United States Publication No. US20030138772, the contents of which are herein incorporated by reference in their entirety, such as, but not limited to, AAV1 (SEQ ID NO: 6 and 64 of US20030138772), AAV2 (SEQ ID NO: 7 and 70 of US20030138772), AAV3 (SEQ ID NO: 8 and 71 of US20030138772), AAV4 (SEQ ID NO: 63 of US20030138772), AAV5 (SEQ ID NO: 114 of US20030138772), AAV6 (SEQ ID NO: 65 of US20030138772), AAV7 (SEQ ID NO: 1-3 of US20030138772), AAV8 (SEQ ID NO: 4 and 95 of US20030138772), AAV9 (SEQ ID NO: 5 and 100 of US20030138772), AAV10 (SEQ ID NO: 117 of US20030138772), AAV11 (SEQ ID NO: 118 of US20030138772), AAV12 (SEQ ID NO: 119 of US20030138772), AAVrh10 (amino acids 1 to 738 of SEQ ID NO: 81 of US20030138772), AAV16.3 (US20030138772 SEQ ID NO: 10), AAV29.3/bb.1 (US20030138772 SEQ ID NO: 11), AAV29.4 (US20030138772 SEQ ID NO: 12), AAV29.5/bb.2 (US20030138772 SEQ ID NO: 13), AAV1.3 (US20030138772 SEQ ID NO: 14), AAV13.3 (US20030138772 SEQ ID NO: 15), AAV24.1 (US20030138772 SEQ ID NO: 16), AAV27.3 (US20030138772 SEQ ID NO: 17), AAV7.2 (US20030138772 SEQ ID NO: 18), AAVC1 (US20030138772 SEQ ID NO: 19), AAVC3 (US20030138772 SEQ ID NO: 20), AAVC5 (US20030138772 SEQ ID NO: 21), AAVF1 (US20030138772 SEQ ID NO: 22), AAVF3 (US20030138772 SEQ ID NO: 23), AAVF5 (US20030138772 SEQ ID NO: 24), AAVH6 (US20030138772 SEQ ID NO: 25), AAVH2 (US20030138772 SEQ ID NO: 26), AAV42-8 (US20030138772 SEQ ID NO: 27), AAV42-15 (US20030138772 SEQ ID NO: 28), AAV42-5b (US20030138772 SEQ ID NO: 29), AAV42-1b (US20030138772 SEQ ID NO: 30), AAV42-13 (US20030138772 SEQ ID NO: 31), AAV42-3a (US20030138772 SEQ ID NO: 32), AAV42-4 (US20030138772 SEQ ID NO: 33), AAV42-5a (US20030138772 SEQ ID NO: 34), AAV42-10 (US20030138772 SEQ ID NO: 35), AAV42-3b (US20030138772 SEQ ID NO: 36), AAV42-11 (US20030138772 SEQ ID NO: 37), AAV42-6b (US20030138772 SEQ ID NO: 38), AAV43-1 (US20030138772 SEQ ID NO: 39), AAV43-5 (US20030138772 SEQ ID NO: 40), AAV43-12 (US20030138772 SEQ ID NO: 41), AAV43-20 (US20030138772 SEQ ID NO: 42), AAV43-21 (US20030138772 SEQ ID NO: 43), AAV43-23 (US20030138772 SEQ ID NO: 44), AAV43-25 (US20030138772 SEQ ID NO: 45), AAV44.1 (US20030138772 SEQ ID NO: 46), AAV44.5 (US20030138772 SEQ ID NO: 47), AAV223.1 (US20030138772 SEQ ID NO: 48), AAV223.2 (US20030138772 SEQ ID NO: 49), AAV223.4 (US20030138772 SEQ ID NO: 50), AAV223.5 (US20030138772 SEQ ID NO: 51), AAV223.6 (US20030138772 SEQ ID NO: 52), AAV223.7 (US20030138772 SEQ ID NO: 53), AAVA3.4 (US20030138772 SEQ ID NO: 54), AAVA3.5 (US20030138772 SEQ ID NO: 55), AAVA3.7 (US20030138772 SEQ ID NO: 56), AAVA3.3 (US20030138772 SEQ ID NO: 57), AAV42.12 (US20030138772 SEQ ID NO: 58), AAV44.2 (US20030138772 SEQ ID NO: 59), AAV42-2 (US20030138772 SEQ ID NO: 9), or variants thereof.

[0069] In some embodiments, the AAV serotype may be, or have, a sequence as described in United States Publication No. US20150159173, the contents of which are herein incorporated by reference in their entirety, such as, but not limited to, AAV2 (SEQ ID NO: 7 and 23 of US20150159173), rh20 (SEQ ID NO: 1 of US20150159173), rh32/33 (SEQ ID NO: 2 of US20150159173), rh39 (SEQ ID NO: 3, 20 and 36 of US20150159173), rh46 (SEQ ID NO: 4 and 22 of US20150159173), rh73 (SEQ ID NO: 5 of US20150159173), rh74 (SEQ ID NO: 6 of US20150159173), AAV6.1 (SEQ ID NO: 29 of US20150159173), rh.8 (SEQ ID NO: 41 of US20150159173), rh.48.1 (SEQ ID NO: 44 of US20150159173), hu.44 (SEQ ID NO: 45 of US20150159173), hu.29 (SEQ ID NO: 42 of US20150159173), hu.48 (SEQ ID NO: 38 of US20150159173), rh54 (SEQ ID NO: 49 of US20150159173), AAV2 (SEQ ID NO: 7 of US20150159173), cy.5 (SEQ ID NO: 8 and 24 of US20150159173), rh.10 (SEQ ID NO: 9 and 25 of US20150159173), rh.13 (SEQ ID NO: 10 and 26 of US20150159173), AAV1 (SEQ ID NO: 11 and 27 of US20150159173), AAV3 (SEQ ID NO: 12 and 28 of US20150159173), AAV6 (SEQ ID NO: 13 and 29 of US20150159173), AAV7 (SEQ ID NO: 14 and 30 of US20150159173), AAV8 (SEQ ID NO: 15 and 31 of US20150159173), hu.13 (SEQ ID NO: 16 and 32 of US20150159173), hu.26 (SEQ ID NO: 17 and 33 of US20150159173), hu.37 (SEQ ID NO: 18 and 34 of US20150159173), hu.53 (SEQ ID NO: 19 and 35 of US20150159173), rh.43 (SEQ ID NO: 21 and 37 of US20150159173), rh2 (SEQ ID NO: 39 of US20150159173), rh.37 (SEQ ID NO: 40 of US20150159173), rh.64 (SEQ ID NO: 43 of US20150159173), rh.48 (SEQ ID NO: 44 of US20150159173), ch.5 (SEQ ID NO 46 of US20150159173), rh.67 (SEQ ID NO: 47 of US20150159173), rh.58 (SEQ ID NO: 48 of US20150159173), or variants thereof including, but not limited to Cy5R. Cy5R2, Cy5R3, Cy5R4, rh.13R, rh.37R2, rh.2R rh.8R, rh.48.1, rh.48.2, rh.48.1.2, hu.44R1, hu.44R2, hu.44R3, hu.29R, ch.5R1, rh64R1, rh64R2, AAV6.2, AAV6.1, AAV6.12, hu.48R1, hu.48R2, and hu.48R3.

[0070] In some embodiments, the AAV serotype may be, or have, a sequence as described in U.S. Pat. No. 7,198,951, the contents of which are herein incorporated by reference in their entirety, such as, but not limited to, AAV9 (SEQ ID NO: 1-3 of U.S. Pat. No. 7,198,951), AAV2 (SEQ ID NO: 4 of U.S. Pat. No. 7,198,951), AAV1 (SEQ ID NO: 5 of U.S. Pat. No. 7,198,951), AAV3 (SEQ ID NO: 6 of U.S. Pat. No. 7,198,951), and AAV8 (SEQ ID NO: 7 of U.S. Pat. No. 7,198,951).

[0071] In some embodiments, the AAV serotype may be, or have, a mutation in the AAV9 sequence as described by N Pulicherla et al. (Molecular Therapy 19(6):1070-1078 (2011), herein incorporated by reference in its entirety), such as but not limited to, AAV9.9, AAV9.11, AAV9.13, AAV9.16, AAV9.24, AAV9.45, AAV9.47, AAV9.61, AAV9.68, AAV9.84.

[0072] In some embodiments, the AAV serotype may be, or have, a sequence as described in U.S. Pat. No. 6,156,303, the contents of which are herein incorporated by reference in their entirety, such as, but not limited to, AAV3B (SEQ ID NO: I and 10 of U.S. Pat. No. 6,156,303), AAV6 (SEQ ID NO: 2, 7 and 11 of U.S. Pat. No. 6,156,303), AAV2 (SEQ ID NO: 3 and 8 of U.S. Pat. No. 6,156,303), AAV3A (SEQ ID NO: 4 and 9, of U.S. Pat. No. 6,156,303), or derivatives thereof.

[0073] In some embodiments, the AAV serotype may be, or have, a sequence as described in United States Publication No. US20140359799, the contents of which are herein incorporated by reference in their entirety, such as, but not limited to, AAV8 (SEQ ID NO: 1 of US20140359799), AAVDJ (SEQ ID NO: 2 and 3 of US20140359799), or variants thereof.

[0074] In some embodiments, the serotype may be AAVDJ (or AAV-DJ) or a variant thereof, such as AAVDJ8 (or AAV-DJ8), as described by Grimm et al. (Journal of Virology 82(12): 5887-5911 (2008), herein incorporated by reference in its entirety). The amino acid sequence of AAVDJ8 may comprise two or more mutations in order to remove the heparin binding domain (HBD). As a non-limiting example, the AAV-DJ sequence described as SEQ ID NO: 1 in U.S. Pat. No. 7,588,772, the contents of which are herein incorporated by reference in their entirety, may comprise two mutations: (1) R587Q where arginine (R; Arg) at amino acid 587 is changed to glutamine (Q; Gin) and (2) R590T where arginine (R; Arg) at amino acid 590 is changed to threonine (T; Thr). As another non-limiting example, may comprise three mutations: (1) K406R where lysine (K; Lys) at amino acid 406 is changed to arginine (R. Arg), (2) R587Q where arginine (R; Arg) at amino acid 587 is changed to glutamine (Q; Gin) and (3) R590T where arginine (R; Arg) at amino acid 590 is changed to threonine (T; Thr).

[0075] In some embodiments, the AAV serotype may be, or have, a sequence of AAV4 as described in International Publication No. WO 1998011244, the contents of which are herein incorporated by reference in their entirety, such as, but not limited to AAV4 (SEQ ID NO: 1-20 of WO1998011244).

[0076] In some embodiments, the AAV serotype may be, or have, a mutation in the AAV2 sequence to generate AAV2G9 as described in International Publication No. WO2014144229 and herein incorporated by reference in its entirety.

[0077] In some embodiments, the AAV serotype may be, or have, a sequence as described in International Publication No. WO2005033321, the contents of which are herein incorporated by reference in their entirety, such as, but not limited to AAV3-3 (SEQ ID NO: 217 of WO2005033321), AAV1 (SEQ ID NO: 219 and 202 of WO2005033321), AAV106.1/hu.37 (SEQ ID No: 10 of WO2005033321), AAV14.3/hu.40 (SEQ ID No: 11 of WO2005033321), AAV127.2/hu.41 (SEQ ID NO:6 and 8 of WO2005033321), AAV128.3/hu.44 (SEQ ID No: 81 of WO2005033321), AAV130.4/hu.48 (SEQ ID NO: 78 of WO2005033321), AAV145.1/hu.53 (SEQ ID No: 176 and 177 of WO2005033321), AAV145.6/hu.56 (SEQ ID NO: 168 and 192 of WO2005033321), AAV16.12/hu.11 (SEQ ID NO: 153 and 57 of WO2005033321), AAV16.8/hu.10 (SEQ ID NO: 156 and 56 of WO2005033321), AAV161.10/hu.60 (SEQ ID No: 170 of WO2005033321), AAV161.6/hu.61 (SEQ ID No: 174 of WO2005033321), AAV1-7/rh.48 (SEQ ID NO: 32 of WO2005033321), AAV1-8/rh.49 (SEQ ID NOs: 103 and 25 of WO2005033321), AAV2 (SEQ ID NO: 211 and 221 of WO2005033321), AAV2-15/rh.62 (SEQ ID No: 33 and 114 of WO2005033321), AAV2-3/rh.61 (SEQ ID NO: 21 of WO2005033321), AAV2-4/rh.50 (SEQ ID No: 23 and 108 of WO2005033321), AAV2-5/rh.51 (SEQ ID NO: 104 and 22 of WO2005033321), AAV3.1/hu.6 (SEQ ID NO: 5 and 84 of WO2005033321), AAV3.1/hu.9 (SEQ ID NO: 155 and 58 of WO2005033321), AAV3-1 l/rh.53 (SEQ ID NO: 186 and 176 of WO2005033321), AAV3-3 (SEQ ID NO: 200 of WO2005033321), AAV33.12/hu.17 (SEQ ID NO:4 of WO2005033321), AAV33.4/hu.15 (SEQ ID No: 50 of WO2005033321), AAV33.8/hu.16 (SEQ ID No: 51 of WO2005033321), AAV3-9/rh.52 (SEQ ID NO: 96 and 18 of WO02005033321), AAV4-19/rh.55 (SEQ ID NO: 117 of WO2005033321), AAV4-4 (SEQ ID NO: 201 and 218 of WO2005033321), AAV4-9/rh.54 (SEQ ID NO: 116 of WO2005033321), AAV5 (SEQ ID NO: 199 and 216 of WO2005033321), AAV52.1/hu.20 (SEQ ID NO: 63 of WO2005033321), AAV52/hu.19 (SEQ ID NO: 133 of WO2005033321), AAV5-22/rh.58 (SEQ ID No: 27 of WO2005033321), AAV5-3/rh.57 (SEQ ID NO: 105 of WO02005033321), AAV5-3/rh.57 (SEQ ID No: 26 of WO2005033321), AAV58.2/hu.25 (SEQ ID No: 49 of WO2005033321), AAV6 (SEQ ID NO: 203 and 220 of WO2005033321), AAV7 (SEQ ID NO: 222 and 213 of WO2005033321), AAV7.3/hu.7 (SEQ ID No: 55 of WO2005033321), AAV8 (SEQ ID NO: 223 and 214 of WO2005033321), AAVH-1/hu.1 (SEQ ID No: 46 of WO2005033321), AAVH-5/hu.3 (SEQ ID No: 44 of WO2005033321), AAVhu.1 (SEQ ID NO: 144 of WO2005033321), AAVhu.10 (SEQ ID NO: 156 of WO2005033321), AAVhu.11 (SEQ ID NO: 153 of WO2005033321), AAVhu.12 (WO2005033321 SEQ ID NO: 59), AAVhu.13 (SEQ ID NO: 129 of WO2005033321), AAVhu.14/AAV9 (SEQ ID NO: 123 and 3 of WO2005033321), AAVhu.15 (SEQ ID NO: 147 of WO2005033321), AAVhu.16 (SEQ ID NO: 148 of WO2005033321), AAVhu.17 (SEQ ID NO: 83 of WO2005033321), AAVhu.18 (SEQ ID NO: 149 of WO2005033321), AAVhu.19 (SEQ ID NO: 133 of WO2005033321), AAVhu.2 (SEQ ID NO: 143 of WO2005033321), AAVhu.20 (SEQ ID NO: 134 of WO2005033321), AAVhu.21 (SEQ ID NO: 135 of WO2005033321), AAVhu.22 (SEQ ID NO: 138 of WO2005033321), AAVhu.23.2 (SEQ ID NO: 137 of WO2005033321), AAVhu.24 (SEQ ID NO: 136 of WO2005033321), AAVhu.25 (SEQ ID NO: 146 of WO2005033321), AAVhu.27 (SEQ ID NO: 140 of WO2005033321), AAVhu.29 (SEQ ID NO: 132 of WO2005033321), AAVhu.3 (SEQ ID NO: 145 of WO2005033321), AAVhu.31 (SEQ ID NO: 121 of WO2005033321), AAVhu.32 (SEQ ID NO: 122 of WO2005033321), AAVhu.34 (SEQ ID NO: 125 of WO2005033321), AAVhu.35 (SEQ ID NO: 164 of WO2005033321), AAVhu.37 (SEQ ID NO: 88 of WO2005033321), AAVhu.39 (SEQ ID NO: 102 of WO2005033321), AAVhu.4 (SEQ ID NO: 141 of WO2005033321), AAVhu.40 (SEQ ID NO: 87 of WO2005033321), AAVhu.41 (SEQ ID NO: 91 of WO2005033321), AAVhu.42 (SEQ ID NO: 85 of WO2005033321), AAVhu.43 (SEQ ID NO: 160 of WO2005033321), AAVhu.44 (SEQ ID NO: 144 of WO2005033321), AAVhu.45 (SEQ ID NO: 127 of WO2005033321), AAVhu.46 (SEQ ID NO: 159 of WO2005033321), AAVhu.47 (SEQ ID NO: 128 of WO2005033321), AAVhu.48 (SEQ ID NO: 157 of WO2005033321), AAVhu.49 (SEQ ID NO: 189 of WO2005033321), AAVhu.51 (SEQ ID NO: 190 of WO2005033321), AAVhu.52 (SEQ ID NO: 191 of WO2005033321), AAVhu.53 (SEQ ID NO: 186 of WO2005033321), AAVhu.54 (SEQ ID NO: 188 of WO2005033321), AAVhu.55 (SEQ ID NO: 187 of WO2005033321), AAVhu.56 (SEQ ID NO: 192 of WO2005033321), AAVhu.57 (SEQ ID NO: 193 of WO2005033321), AAVhu.58 (SEQ ID NO: 194 of WO2005033321), AAVhu.6 (SEQ ID NO: 84 of WO2005033321), AAVhu.60 (SEQ ID NO: 184 of WO2005033321), AAVhu.61 (SEQ ID NO: 185 of WO2005033321), AAVhu.63 (SEQ ID NO: 195 of WO2005033321), AAVhu.64 (SEQ ID NO: 196 of WO2005033321), AAVhu.66 (SEQ ID NO: 197 of WO2005033321), AAVhu.67 (SEQ ID NO: 198 of WO2005033321), AAVhu.7 (SEQ ID NO: 150 of WO2005033321), AAVhu.8 (WO2005033321 SEQ ID NO: 12), AAVhu.9 (SEQ ID NO: 155 of WO2005033321), AAVLG-10/rh.40 (SEQ ID No: 14 of WO2005033321), AAVLG-4/rh.38 (SEQ ID NO: 86 of WO2005033321), AAVLG-4/rh.38 (SEQ ID No: 7 of WO2005033321), AAVN721-8/rh.43 (SEQ ID NO: 163 of WO2005033321), AAVN721-8/rh.43 (SEQ ID No: 43 of WO2005033321), AAVpi.1 (WO2005033321 SEQ ID NO: 28), AAVpi.2 (WO2005033321 SEQ ID NO: 30), AAVpi.3 (WO2005033321 SEQ ID NO: 29), AAVrh.38 (SEQ ID NO: 86 of WO2005033321), AAVrh.40 (SEQ ID NO: 92 of WO2005033321), AAVrh.43 (SEQ ID NO: 163 of WO2005033321), AAVrh.44 (WO2005033321 SEQ ID NO: 34), AAVrh.45 (WO2005033321 SEQ ID NO: 41), AAVrh.47 (WO2005033321 SEQ ID NO: 38), AAVrh.48 (SEQ ID NO: 115 of WO2005033321), AAVrh.49 (SEQ ID NO: 103 of WO2005033321), AAVrh.50 (SEQ ID NO: 108 of WO2005033321), AAVrh.51 (SEQ ID NO: 104 of WO2005033321), AAVrh.52 (SEQ ID NO: 96 of WO2005033321), AAVrh.53 (SEQ ID NO: 97 of WO02005033321), AAVrh.55 (WO2005033321 SEQ ID NO: 37), AAVrh.56 (SEQ ID NO: 152 of WO2005033321), AAVrh.57 (SEQ ID NO: 105 of WO2005033321), AAVrh.58 (SEQ ID NO: 106 of WO2005033321), AAVrh.59 (WO2005033321 SEQ ID NO: 42), AAVrh.60 (WO2005033321 SEQ ID NO: 31), AAVrh.61 (SEQ ID NO: 107 of WO02005033321), AAVrh.62 (SEQ ID NO: 114 of WO2005033321), AAVrh.64 (SEQ ID NO: 99 of WO2005033321), AAVrh.65 (WO2005033321 SEQ ID NO: 35), AAVrh.68 (WO2005033321 SEQ ID NO: 16), AAVrh.69 (WO2005033321 SEQ ID NO: 39), AAVrh.70 (WO2005033321 SEQ ID NO: 20), AAVrh.72 (WO2005033321 SEQ ID NO: 9), or variants thereof including, but not limited to, AAVcy.2, AAVcy.3, AAVcy.4, AAVcy.5, AAVcy.6, AAVrh.12, AAVrh.17, AAVrh.18, AAVrh.19, AAVrh.21, AAVrh.22, AAVrh.23, AAVrh.24, AAVrh.25, AAVrh.25/42 15, AAVrh.31, AAVrh.32, AAVrh.33, AAVrh.34, AAVrh.35, AAVrh.36, AAVrh.37, AAVrh14. Non limiting examples of variants include SEQ ID NO: 13, 15, 17, 19, 24, 36, 40, 45, 47, 48, 51-54, 60-62, 64-77, 79, 80, 82, 89, 90, 93-95, 98, 100, 101, 109-113, 118-120, 124, 126, 131, 139, 142, 151, 154, 158, 161, 162, 165-183, 202, 204-212, 215, 219, 224-236, of WO02005033321, the contents of which are herein incorporated by reference in their entirety.

[0078] In some embodiments, the AAV serotype may be, or have, a sequence as described in International Publication No. WO2015168666, the contents of which are herein incorporated by reference in their entirety, such as, but not limited to, AAVrh8R (SEQ ID NO: 9 of WO2015168666), AAVrh8R A586R mutant (SEQ ID NO: 10 of WO2015168666), AAVrh8R R533A mutant (SEQ ID NO: 11 of WO2015168666), or variants thereof.

[0079] In some embodiments, the AAV serotype may be, or have, a sequence as described in U.S. Pat. No. 9,233,131, the contents of which are herein incorporated by reference in their entirety, such as, but not limited to, AAVhE1.1 (SEQ ID NO:44 of U.S. Pat. No. 9,233,131), AAVhEr1.5 (SEQ ID NO:45 of U.S. Pat. No. 9,233,131), AAVhER1.14 (SEQ ID NO:46 of U.S. Pat. No. 9,233,131), AAVhEr1.8 (SEQ ID NO:47 of U.S. Pat. No. 9,233,131), AAVhEr1.16 (SEQ ID NO:48 of U.S. Pat. No. 9,233,131), AAVhEr1.18 (SEQ ID NO:49 of U.S. Pat. No. 9,233,131), AAVhEr1.35 (SEQ ID NO:50 of U.S. Pat. No. 9,233,131), AAVhEr1.7 (SEQ ID NO:51 of U.S. Pat. No. 9,233,131), AAVhEr1.36 (SEQ ID NO:52 of U.S. Pat. No. 9,233,131), AAVhEr2.29 (SEQ ID NO:53 of U.S. Pat. No. 9,233,131), AAVhEr2.4 (SEQ ID NO:54 of U.S. Pat. No. 9,233,131), AAVhEr2.16 (SEQ ID NO:55 of U.S. Pat. No. 9,233,131), AAVhEr2.30 (SEQ ID NO:56 of U.S. Pat. No. 9,233,131), AAVhEr2.31 (SEQ ID NO:58 of U.S. Pat. No. 9,233,131), AAVhEr2.36 (SEQ ID NO:57 of U.S. Pat. No. 9,233,131), AAVhER1.23 (SEQ ID NO:53 of U.S. Pat. No. 9,233,131), AAVhEr3.1 (SEQ ID NO:59 of U.S. Pat. No. 9,233,131), AAV2.5T (SEQ ID NO:42 of U.S. Pat. No. 9,233,131), or variants thereof.

[0080] In some embodiments, the AAV serotype may be, or have, a sequence as described in United States Patent Publication No. US20150376607, the contents of which are herein incorporated by reference in their entirety, such as, but not limited to, AAV-PAEC (SEQ ID NO:1 of US20150376607), AAV-LK01 (SEQ ID NO:2 of US20150376607), AAV-LK02 (SEQ ID NO:3 of US20150376607), AAV-LK03 (SEQ ID NO:4 of US20150376607), AAV-LK04 (SEQ ID NO:5 of US20150376607), AAV-LK05 (SEQ ID NO:6 of US20150376607), AAV-LK06 (SEQ ID NO:7 of US20150376607), AAV-LK07 (SEQ ID NO:8 of US20150376607), AAV-LK08 (SEQ ID NO:9 of US20150376607), AAV-LK09 (SEQ ID NO: 10 of US20150376607), AAV-LK10 (SEQ ID NO: 11 of US20150376607), AAV-LK11 (SEQ ID NO:12 of US20150376607), AAV-LK12 (SEQ ID NO: 13 of US20150376607), AAV-LK13 (SEQ ID NO: 14 of US20150376607), AAV-LK14 (SEQ ID NO: 15 of US20150376607), AAV-LK15 (SEQ ID NO:16 of US20150376607), AAV-LK16 (SEQ ID NO: 17 of US20150376607), AAV-LK17 (SEQ ID NO: 18 of US20150376607), AAV-LK18 (SEQ ID NO: 19 of US20150376607), AAV-LK19 (SEQ ID NO:20 of US20150376607), AAV-PAEC2 (SEQ ID NO:21 of US20150376607), AAV-PAEC4 (SEQ ID NO:22 of US20150376607), AAV-PAEC6 (SEQ ID NO:23 of US20150376607), AAV-PAEC7 (SEQ ID NO:24 of US20150376607), AAV-PAEC8 (SEQ ID NO:25 of US20150376607), AAV-PAEC1 (SEQ ID NO:26 of US20150376607), AAV-PAEC12 (SEQ ID NO:27, of US20150376607), or variants thereof.

[0081] In some embodiments, the AAV serotype may be, or have, a sequence as described in U.S. Pat. No. 9,163,261, the contents of which are herein incorporated by reference in their entirety, such as, but not limited to, AAV-2-pre-miRNA-101 (SEQ ID NO: 1 U.S. Pat. No. 9,163,261), or variants thereof.

[0082] In some embodiments, the AAV serotype may be, or have, a sequence as described in United States Patent Publication No. US20150376240, the contents of which are herein incorporated by reference in their entirety, such as, but not limited to, AAV-8h (SEQ ID NO: 6 of US20150376240), AAV-8b (SEQ ID NO: 5 of US20150376240), AAV-h (SEQ ID NO: 2 of US20150376240), AAV-b (SEQ ID NO: 1 of US20150376240), or variants thereof.

[0083] In some embodiments, the AAV serotype may be, or have, a sequence as described in United States Patent Publication No. US20160017295, the contents of which are herein incorporated by reference in their entirety, such as, but not limited to, AAV SM 10-2 (SEQ ID NO: 22 of US20160017295), AAV Shuffle 100-1 (SEQ ID NO: 23 of US20160017295), AAV Shuffle 100-3 (SEQ ID NO: 24 of US20160017295), AAV Shuffle 100-7 (SEQ ID NO: 25 of US20160017295), AAV Shuffle 10-2 (SEQ ID NO: 34 of US20160017295), AAV Shuffle 10-6 (SEQ ID NO: 35 of US20160017295), AAV Shuffle 10-8 (SEQ ID NO: 36 of US20160017295), AAV Shuffle 100-2 (SEQ ID NO: 37 of US20160017295), AAV SM 10-1 (SEQ ID NO: 38 of US20160017295), AAV SM 10-8 (SEQ ID NO: 39 of US20160017295), AAV SM 100-3 (SEQ ID NO: 40 of US20160017295), AAV SM 100-10 (SEQ ID NO: 41 of US20160017295), or variants thereof.

[0084] In some embodiments, the AAV serotype may be, or have, a sequence as described in United States Patent Publication No. US20150238550, the contents of which are herein incorporated by reference in their entirety, such as, but not limited to, BNP61 AAV (SEQ ID NO: 1 of US20150238550), BNP62 AAV (SEQ ID NO: 3 of US20150238550), BNP63 AAV (SEQ ID NO: 4 of US20150238550), or variants thereof.

[0085] In some embodiments, the AAV serotype may be or may have a sequence as described in United States Patent Publication No. US20150315612, the contents of which are herein incorporated by reference in their entirety, such as, but not limited to, AAVrh.50 (SEQ ID NO: 108 of US20150315612), AAVrh.43 (SEQ ID NO: 163 of US20150315612), AAVrh.62 (SEQ ID NO: 114 of US20150315612), AAVrh.48 (SEQ ID NO: 115 of US20150315612), AAVhu.19 (SEQ ID NO: 133 of US20150315612), AAVhu.11 (SEQ ID NO: 153 of US20150315612), AAVhu.53 (SEQ ID NO: 186 of US20150315612), AAV4-8/rh.64 (SEQ ID No: 15 of US20150315612), AAVLG-9/hu.39 (SEQ ID No: 24 of US20150315612), AAV54.5/hu.23 (SEQ ID No: 60 of US20150315612), AAV54.2/hu.22 (SEQ ID No: 67 of US20150315612), AAV54.7/hu.24 (SEQ ID No: 66 of US20150315612), AAV54.1/hu.21 (SEQ ID No: 65 of US20150315612), AAV54.4R/hu.27 (SEQ ID No: 64 of US20150315612), AAV46.2/hu.28 (SEQ ID No: 68 of US20150315612), AAV46.6/hu.29 (SEQ ID No: 69 of US20150315612), AAV128.1/hu.43 (SEQ ID No: 80 of US20150315612), or variants thereof.

[0086] In some embodiments, the AAV serotype may be, or have, a sequence as described in International Publication No. WO2015121501, the contents of which are herein incorporated by reference in their entirety, such as, but not limited to, true type AAV (ttAAV) (SEQ ID NO: 2 of WO2015121501), “UPenn AAV10” (SEQ ID NO: 8 of WO2015121501), “Japanese AAV10” (SEQ ID NO: 9 of WO2015121501), or variants thereof.

[0087] According to the present invention, AAV capsid serotype selection or use may be from a variety of species. In one embodiment, the AAV may be an avian AAV (AAAV). The AAAV serotype may be, or have, a sequence as described in U.S. Pat. No. 9,238,800, the contents of which are herein incorporated by reference in their entirety, such as, but not limited to, AAAV (SEQ ID NO: 1, 2, 4, 6, 8, 10, 12, and 14 of U.S. Pat. No. 9,238,800), or variants thereof.

[0088] In one embodiment, the AAV may be a bovine AAV (BAAV). The BAAV serotype may be, or have, a sequence as described in U.S. Pat. No. 9,193,769, the contents of which are herein incorporated by reference in their entirety, such as, but not limited to, BAAV (SEQ ID NO: 1 and 6 of U.S. Pat. No. 9,193,769), or variants thereof. The BAAV serotype may be or have a sequence as described in U.S. Pat. No. 7,427,396, the contents of which are herein incorporated by reference in their entirety, such as, but not limited to, BAAV (SEQ ID NO: 5 and 6 of U.S. Pat. No. 7,427,396), or variants thereof.

[0089] In one embodiment, the AAV may be a caprine AAV. The caprine AAV serotype may be, or have, a sequence as described in U.S. Pat. No. 7,427,396, the contents of which are herein incorporated by reference in their entirety, such as, but not limited to, caprine AAV (SEQ ID NO: 3 of U.S. Pat. No. 7,427,396), or variants thereof.

[0090] In other embodiments the AAV may be engineered as a hybrid AAV from two or more parental serotypes. In one embodiment, the AAV may be AAV2G9 which comprises sequences from AAV2 and AAV9. The AAV2G9 AAV serotype may be, or have, a sequence as described in United States Patent Publication No. US20160017005, the contents of which are herein incorporated by reference in its entirety.

[0091] In one embodiment, the AAV may be a serotype generated by the AAV9 capsid library with mutations in amino acids 390-627 (VP1 numbering) as described by Pulicherla et al. (Molecular Therapy 19(6): 1070-1078 (2011), the contents of which are herein incorporated by reference in their entirety. The serotype and corresponding nucleotide and amino acid substitutions may be, but is not limited to, AAV9.1 (G1594C; D532H), AAV6.2 (T1418A and T1436X; V473D and 1479K), AAV9.3 (T1238A; F413Y), AAV9.4 (T1250C and A1617T; F417S), AAV9.5 (A1235G, A1314T, A1642G, C1760T; Q412R, T548A, A587V), AAV9.6 (T1231A; F411I), AAV9.9 (G1203A, G1785T; W595C), AAV9.10 (A1500G, T1676C; M559T), AAV9.11 (A1425T, A1702C, A1769T; T568P, Q590L), AAV9.13 (A1369C, A1720T; N457H, T574S), AAV9.14 (T1340A, T1362C, T1560C, G1713A; L447H), AAV9.16 (A1775T; Q592L), AAV9.24 (T1507C, T1521G; W503R), AAV9.26 (A1337G, A1769C; Y446C, Q590P), AAV9.33 (A1667C; D556A), AAV9.34 (A1534G, C1794T; N512D), AAV9.35 (A1289T, T1450A, C1494T, A1515T, C1794A, G1816A; Q430L, Y484N, N98K, V606I), AAV9.40 (A1694T, E565V), AAV9.41 (A1348T, T1362C; T450S), AAV9.44 (A1684C, A1701T, A1737G; N562H, K567N), AAV9.45 (A1492T, C1804T; N498Y, L602F), AAV9.46 (G1441C, T1525C, T1549G; G481R, W509R, L517V), 9.47 (G1241A, G1358A, A1669G, C1745T; S414N, G453D, K557E, T582I), AAV9.48 (C1445T, A1736T; P482L, Q579L), AAV9.50 (A1638T, C1683T, T1805A; Q546H, L602H), AAV9.53 (G1301A, A1405C, C1664T, G1811 T; R134Q, S469R, A555V, G604V), AAV9.54 (C1531A, T1609A; L511I, L537M), AAV9.55 (T1605A; F535L), AAV9.58 (C1475T, C1579A; T492I, H527N), AAV.59 (T1336C; Y446H), AAV9.61 (A1493T; N498I), AAV9.64 (C1531A, A1617T; L511I), AAV9.65 (C1335T, T1530C, C1568A; A523D), AAV9.68 (C1510A; P504T), AAV9.80 (G1441A; G481R), AAV9.83 (C1402A, A1500T; P468T, E500D), AAV9.87 (T1464C, T1468C; S490P), AAV9.90 (A1196T; Y399F), AAV9.91 (T1316G, A1583T, C1782G, T1806C; L439R K528I), AAV9.93 (A1273G, A1421G, A1638C, C1712T, G1732A, A1744T, A1832T; S425G, Q474R, Q546H, P571L, G578R, T582S, D61 IV), AAV9.94 (A1675T; M559L) and AAV9.95 (T1605A; F535L).

[0092] In some embodiments, the AAV serotype may be, or have, a sequence as described in International Publication No. WO2016049230, the contents of which are herein incorporated by reference in their entirety, such as, but not limited to AAVF1/HSC1 (SEQ ID NO: 2 and 20 of WO2016049230), AAVF2/HSC2 (SEQ ID NO: 3 and 21 of WO2016049230), AAVF3/HSC3 (SEQ ID NO: 5 and 22 of WO2016049230), AAVF4/HSC4 (SEQ ID NO: 6 and 23 of WO2016049230), AAVF5/HSC5 (SEQ ID NO: 11 and 25 of WO2016049230), AAVF6/HSC6 (SEQ ID NO: 7 and 24 of WO2016049230), AAVF7/HSC7 (SEQ ID NO: 8 and 27 of WO2016049230), AAVF8/HSC8 (SEQ ID NO: 9 and 28 of WO02016049230), AAVF9/HSC9 (SEQ ID NO: 10 and 29 of WO2016049230), AAVF11/HSC11 (SEQ ID NO: 4 and 26 of WO2016049230), AAVF12/HSC12 (SEQ ID NO: 12 and 30 of WO2016049230), AAVF13/HSC13 (SEQ ID NO: 14 and 31 of WO2016049230), AAVF14/HSC14 (SEQ ID NO: 15 and 32 of WO2016049230), AAVF15/HSC15 (SEQ ID NO: 16 and 33 of WO2016049230), AAVF16/HSC16 (SEQ ID NO: 17 and 34 of WO2016049230), AAVF17/HSC17 (SEQ ID NO: 13 and 35 of WO2016049230), or variants or derivatives thereof.

[0093] In some embodiments, the AAV serotype may be, or have, a sequence as described in U.S. Pat. No. 8,734,809, the contents of which are herein incorporated by reference in their entirety, such as, but not limited to, AAV CBr-E1 (SEQ ID NO: 13 and 87 of U.S. Pat. No. 8,734,809), AAV CBr-E2 (SEQ ID NO: 14 and 88 of U.S. Pat. No. 8,734,809), AAV CBr-E3 (SEQ ID NO: 15 and 89 of U.S. Pat. No. 8,734,809), AAV CBr-E4 (SEQ ID NO: 16 and 90 of U.S. Pat. No. 8,734,809), AAV CBr-E5 (SEQ ID NO: 17 and 91 of U.S. Pat. No. 8,734,809), AAV CBr-e5 (SEQ ID NO: 18 and 92 of U.S. Pat. No. 8,734,809), AAV CBr-E6 (SEQ ID NO: 19 and 93 of U.S. Pat. No. 8,734,809), AAV CBr-E7 (SEQ ID NO: 20 and 94 of U.S. Pat. No. 8,734,809), AAV CBr-E8 (SEQ ID NO: 21 and 95 of U.S. Pat. No. 8,734,809), AAV CLv-D1 (SEQ ID NO: 22 and 96 of U.S. Pat. No. 8,734,809), AAV CLv-D2 (SEQ ID NO: 23 and 97 of U.S. Pat. No. 8,734,809), AAV CLv-D3 (SEQ ID NO: 24 and 98 of U.S. Pat. No. 8,734,809), AAV CLv-D4 (SEQ ID NO: 25 and 99 of U.S. Pat. No. 8,734,809), AAV CLv-D5 (SEQ ID NO: 26 and 100 of U.S. Pat. No. 8,734,809), AAV CLv-D6 (SEQ ID NO: 27 and 101 of U.S. Pat. No. 8,734,809), AAV CLv-D7 (SEQ ID NO: 28 and 102 of U.S. Pat. No. 8,734,809), AAV CLv-D8 (SEQ ID NO: 29 and 103 of U.S. Pat. No. 8,734,809), AAV CLv-E1 (SEQ ID NO: 13 and 87 of U.S. Pat. No. 8,734,809), AAV CLv-R1 (SEQ ID NO: 30 and 104 of U.S. Pat. No. 8,734,809), AAV CLv-R2 (SEQ ID NO: 31 and 105 of U.S. Pat. No. 8,734,809), AAV CLv-R3 (SEQ ID NO: 32 and 106 of U.S. Pat. No. 8,734,809), AAV CLv-R4 (SEQ ID NO: 33 and 107 of U.S. Pat. No. 8,734,809), AAV CLv-R5 (SEQ ID NO: 34 and 108 of U.S. Pat. No. 8,734,809), AAV CLv-R6 (SEQ ID NO: 35 and 109 of U.S. Pat. No. 8,734,809), AAV CLv-R7 (SEQ ID NO: 36 and 110 of U.S. Pat. No. 8,734,809), AAV CLv-R8 (SEQ ID NO: 37 and 111 of U.S. Pat. No. 8,734,809), AAV CLv-R9 (SEQ ID NO: 38 and 112 of US8734809), AAV CLg-F1 (SEQ ID NO: 39 and 113 of U.S. Pat. No. 8,734,809), AAV CLg-F2 (SEQ ID NO: 40 and 114 of U.S. Pat. No. 8,734,809), AAV CLg-F3 (SEQ ID NO: 41 and 115 of U.S. Pat. No. 8,734,809), AAV CLg-F4 (SEQ ID NO: 42 and 116 of U.S. Pat. No. 8,734,809), AAV CLg-F5 (SEQ ID NO: 43 and 117 of U.S. Pat. No. 8,734,809), AAV CLg-F6 (SEQ ID NO: 43 and 117 of U.S. Pat. No. 8,734,809), AAV CLg-F7 (SEQ ID NO: 44 and 118 of U.S. Pat. No. 8,734,809), AAV CLg-F8 (SEQ ID NO: 43 and 117 of U.S. Pat. No. 8,734,809), AAV CSp-1 (SEQ ID NO: 45 and 119 of U.S. Pat. No. 8,734,809), AAV CSp-10 (SEQ ID NO: 46 and 120 of U.S. Pat. No. 8,734,809), AAV CSp-11 (SEQ ID NO: 47 and 121 of U.S. Pat. No. 8,734,809), AAV CSp-2 (SEQ ID NO: 48 and 122 of U.S. Pat. No. 8,734,809), AAV CSp-3 (SEQ ID NO: 49 and 123 of U.S. Pat. No. 8,734,809), AAV CSp-4 (SEQ ID NO: 50 and 124 of U.S. Pat. No. 8,734,809), AAV CSp-6 (SEQ ID NO: 51 and 125 of U.S. Pat. No. 8,734,809), AAV CSp-7 (SEQ ID NO: 52 and 126 of U.S. Pat. No. 8,734,809), AAV CSp-8 (SEQ ID NO: 53 and 127 of U.S. Pat. No. 8,734,809), AAV CSp-9 (SEQ ID NO: 54 and 128 of U.S. Pat. No. 8,734,809), AAV CHt-2 (SEQ ID NO: 55 and 129 of U.S. Pat. No. 8,734,809), AAV CHt-3 (SEQ ID NO: 56 and 130 of U.S. Pat. No. 8,734,809), AAV CKd-1 (SEQ ID NO: 57 and 131 of U.S. Pat. No. 8,734,809), AAV CKd-10 (SEQ ID NO: 58 and 132 of U.S. Pat. No. 8,734,809), AAV CKd-2 (SEQ ID NO: 59 and 133 of U.S. Pat. No. 8,734,809), AAV CKd-3 (SEQ ID NO: 60 and 134 of U.S. Pat. No. 8,734,809), AAV CKd-4 (SEQ ID NO: 61 and 135 of U.S. Pat. No. 8,734,809), AAV CKd-6 (SEQ ID NO: 62 and 136 of U.S. Pat. No. 8,734,809), AAV CKd-7 (SEQ ID NO: 63 and 137 of U.S. Pat. No. 8,734,809), AAV CKd-8 (SEQ ID NO: 64 and 138 of U.S. Pat. No. 8,734,809), AAV CLv-1 (SEQ ID NO: 35 and 139 of U.S. Pat. No. 8,734,809), AAV CLv-12 (SEQ ID NO: 66 and 140 of U.S. Pat. No. 8,734,809), AAV CLv-13 (SEQ ID NO: 67 and 141 of U.S. Pat. No. 8,734,809), AAV CLv-2 (SEQ ID NO: 68 and 142 of U.S. Pat. No. 8,734,809), AAV CLv-3 (SEQ ID NO: 69 and 143 of U.S. Pat. No. 8,734,809), AAV CLv-4 (SEQ ID NO: 70 and 144 of U.S. Pat. No. 8,734,809), AAV CLv-6 (SEQ ID NO: 71 and 145 of U.S. Pat. No. 8,734,809), AAV CLv-8 (SEQ ID NO: 72 and 146 of U.S. Pat. No. 8,734,809), AAV CKd-B1 (SEQ ID NO: 73 and 147 of U.S. Pat. No. 8,734,809), AAV CKd-B2 (SEQ ID NO: 74 and 148 of U.S. Pat. No. 8,734,809), AAV CKd-B3 (SEQ ID NO: 75 and 149 of U.S. Pat. No. 8,734,809), AAV CKd-B4 (SEQ ID NO: 76 and 150 of U.S. Pat. No. 8,734,809), AAV CKd-B5 (SEQ ID NO: 77 and 151 of U.S. Pat. No. 8,734,809), AAV CKd-B6 (SEQ ID NO: 78 and 152 of U.S. Pat. No. 8,734,809), AAV CKd-B7 (SEQ ID NO: 79 and 153 of U.S. Pat. No. 8,734,809), AAV CKd-B8 (SEQ ID NO: 80 and 154 of U.S. Pat. No. 8,734,809), AAV CKd-H1 (SEQ ID NO: 81 and 155 of U.S. Pat. No. 8,734,809), AAV CKd-H2 (SEQ ID NO: 82 and 156 of U.S. Pat. No. 8,734,809), AAV CKd-H3 (SEQ ID NO: 83 and 157 of U.S. Pat. No. 8,734,809), AAV CKd-H4 (SEQ ID NO: 84 and 158 of U.S. Pat. No. 8,734,809), AAV CKd-H5 (SEQ ID NO: 85 and 159 of U.S. Pat. No. 8,734,809), AAV CKd-H6 (SEQ ID NO: 77 and 151 of U.S. Pat. No. 8,734,809), AAV CHt-1 (SEQ ID NO: 86 and 160 of U.S. Pat. No. 8,734,809), AAV CLv1-1 (SEQ ID NO: 171 of U.S. Pat. No. 8,734,809), AAV CLv1-2 (SEQ ID NO: 172 of U.S. Pat. No. 8,734,809), AAV CLv1-3 (SEQ ID NO: 173 of U.S. Pat. No. 8,734,809), AAV CLv1-4 (SEQ ID NO: 174 of U.S. Pat. No. 8,734,809), AAV Clv1-7 (SEQ ID NO: 175 of U.S. Pat. No. 8,734,809), AAV Clv1-8 (SEQ ID NO: 176 of U.S. Pat. No. 8,734,809), AAV Clv1-9 (SEQ ID NO: 177 of U.S. Pat. No. 8,734,809), AAV Clv1-10 (SEQ ID NO: 178 of U.S. Pat. No. 8,734,809), AAV.VR-355 (SEQ ID NO: 181 of U.S. Pat. No. 8,734,809), AAV.hu.48R3 (SEQ ID NO: 183 of U.S. Pat. No. 8,734,809), or variants or derivatives thereof.

[0094] In some embodiments, the AAV serotype may be, or have, a sequence as described in International Publication No. WO2016065001, the contents of which are herein incorporated by reference in their entirety, such as, but not limited to AAV CHt-P2 (SEQ ID NO: 1 and 51 of WO2016065001), AAV CHt-P5 (SEQ ID NO: 2 and 52 of WO2016065001), AAV CHt-P9 (SEQ ID NO: 3 and 53 of WO2016065001), AAV CBr-7.1 (SEQ ID NO: 4 and 54 of WO2016065001), AAV CBr-7.2 (SEQ ID NO: 5 and 55 of WO2016065001), AAV CBr-7.3 (SEQ ID NO: 6 and 56 of WO2016065001), AAV CBr-7.4 (SEQ ID NO: 7 and 57 of WO2016065001), AAV CBr-7.5 (SEQ ID NO: 8 and 58 of WO2016065001), AAV CBr-7.7 (SEQ ID NO: 9 and 59 of WO2016065001), AAV CBr-7.8 (SEQ ID NO: 10 and 60 of WO2016065001), AAV CBr-7.10 (SEQ ID NO: 11 and 61 of WO2016065001), AAV CKd-N3 (SEQ ID NO: 12 and 62 of WO2016065001), AAV CKd-N4 (SEQ ID NO: 13 and 63 of WO2016065001), AAV CKd-N9 (SEQ ID NO: 14 and 64 of WO2016065001), AAV CLv-L4 (SEQ ID NO: 15 and 65 of WO2016065001), AAV CLv-L5 (SEQ ID NO: 16 and 66 of WO2016065001), AAV CLv-L6 (SEQ ID NO: 17 and 67 of WO2016065001), AAV CLv-K1 (SEQ ID NO: 18 and 68 of WO2016065001), AAV CLv-K3 (SEQ ID NO: 19 and 69 of WO2016065001), AAV CLv-K6 (SEQ ID NO: 20 and 70 of WO2016065001), AAV CLv-M1 (SEQ ID NO: 21 and 71 of WO02016065001), AAV CLv-M11 (SEQ ID NO: 22 and 72 of WO2016065001), AAV CLv-M2 (SEQ ID NO: 23 and 73 of WO2016065001), AAV CLv-M5 (SEQ ID NO: 24 and 74 of WO2016065001), AAV CLv-M6 (SEQ ID NO: 25 and 75 of WO2016065001), AAV CLv-M7 (SEQ ID NO: 26 and 76 of WO2016065001), AAV CLv-M8 (SEQ ID NO: 27 and 77 of WO2016065001), AAV CLv-M9 (SEQ ID NO: 28 and 78 of WO2016065001), AAV CHt-P1 (SEQ ID NO: 29 and 79 of WO2016065001), AAV CHt-P6 (SEQ ID NO: 30 and 80 of WO2016065001), AAV CHt-P8 (SEQ ID NO: 31 and 81 of WO2016065001), AAV CHt-6.1 (SEQ ID NO: 32 and 82 of WO2016065001), AAV CHt-6.10 (SEQ ID NO: 33 and 83 of WO2016065001), AAV CHt-6.5 (SEQ ID NO: 34 and 84 of WO2016065001), AAV CHt-6.6 (SEQ ID NO: 35 and 85 of WO2016065001), AAV CHt-6.7 (SEQ ID NO: 36 and 86 of WO2016065001), AAV CHt-6.8 (SEQ ID NO: 37 and 87 of WO2016065001), AAV CSp-8.10 (SEQ ID NO: 38 and 88 of WO2016065001), AAV CSp-8.2 (SEQ ID NO: 39 and 89 of WO02016065001), AAV CSp-8.4 (SEQ ID NO: 40 and 90 of WO2016065001), AAV CSp-8.5 (SEQ ID NO: 41 and 91 of WO2016065001), AAV CSp-8.6 (SEQ ID NO: 42 and 92 of WO2016065001), AAV CSp-8.7 (SEQ ID NO: 43 and 93 of WO2016065001), AAV CSp-8.8 (SEQ ID NO: 44 and 94 of WO2016065001), AAV CSp-8.9 (SEQ ID NO: 45 and 95 of WO2016065001), AAV CBr-B7.3 (SEQ ID NO: 46 and 96 of WO2016065001), AAV CBr-B7.4 (SEQ ID NO: 47 and 97 of WO2016065001), AAV3B (SEQ ID NO: 48 and 98 of WO2016065001), AAV4 (SEQ ID NO: 49 and 99 of WO2016065001), AAV5 (SEQ ID NO: 50 and 100 of WO2016065001), or variants or derivatives thereof.

[0095] In one embodiment, the AAV may be a serotype selected from any of those found in Table 1.

[0096] In one embodiment, the AAV may comprise a sequence, fragment or variant thereof, of the sequences in Table 1.

[0097] In one embodiment, the AAV may be encoded by a sequence, fragment or variant as described in Table 1.

TABLE 1
AAV Serotypes

| | SEQ | |
|---|---|---|
| | ID | |
| Serotype | NO | Reference Information |
| AAV1 | 1 | US20150159173 SEQ ID NO: 11, |
| | | US20150315612 SEQ ID NO: 202 |
| AAV1 | 2 | US20160017295 SEQ ID NO: 1 |
| | | US20030138772 SEQ ID NO: 64, |
| | | US20150159173 SEQ ID NO: 27, |
| | | US20150315612 SEQ ID NO: 219, |
| | | U.S. Pat. No. 7,198,951 SEQ ID NO: 5 |
| AAV1 | 3 | US20030138772 SEQ ID NO: 6 |
| AAV1.3 | 4 | US20030138772 SEQ ID NO: 14 |
| AAV10 | 5 | US20030138772 SEQ ID NO: 117 |
| AAV10 | 6 | WO2015121501 SEQ ID NO: 9 |
| AAV10 | 7 | WO2015121501 SEQ ID NO: 8 |
| AAV11 | 8 | US20030138772 SEQ ID NO: 118 |
| AAV12 | 9 | US20030138772 SEQ ID NO: 119 |
| AAV2 | 10 | US20150159173 SEQ ID NO: 7, |
| | | US20150315612 SEQ ID NO: 211 |
| AAV2 | 11 | US20030138772 SEQ ID NO: 70, |
| | | US20150159173 SEQ ID NO: 23, |
| | | US20150315612 SEQ ID NO: 221, |
| | | US20160017295 SEQ ID NO: 2, |
| | | U.S. Pat. No. 6,156,303 SEQ ID NO: 4, |
| | | U.S. Pat. No. 7,198,951 SEQ ID NO: 4, |
| | | WO2015121501 SEQ ID NO: 1 |
| AAV2 | 12 | U.S. Pat. No. 6,156,303 SEQ ID NO: 8 |
| AAV2 | 13 | US20030138772 SEQ ID NO: 7 |
| AAV2 | 14 | U.S. Pat. No. 6,156,303 SEQ ID NO: 3 |
| AAV2.5T | 15 | U.S. Pat. No. 9,233,131 SEQ ID NO: 42 |
| AAV223.10 | 16 | US20030138772 SEQ ID NO: 75 |
| AAV223.2 | 17 | US20030138772 SEQ ID NO: 49 |
| AAV223.2 | 18 | US20030138772 SEQ ID NO: 76 |
| AAV223.4 | 19 | US20030138772 SEQ ID NO: 50 |
| AAV223.4 | 20 | US20030138772 SEQ ID NO: 73 |
| AAV223.5 | 21 | US20030138772 SEQ ID NO: 51 |
| AAV223.5 | 22 | US20030138772 SEQ ID NO: 74 |
| AAV223.6 | 23 | US20030138772 SEQ ID NO: 52 |
| AAV223.6 | 24 | US20030138772 SEQ ID NO: 78 |
| AAV223.7 | 25 | US20030138772 SEQ ID NO: 53 |
| AAV223.7 | 26 | US20030138772 SEQ ID NO: 77 |
| AAV29.3 | 27 | US20030138772 SEQ ID NO: 82 |
| AAV29.4 | 28 | US20030138772 SEQ ID NO: 12 |
| AAV29.5 | 29 | US20030138772 SEQ ID NO: 83 |
| AAV29.5 | 30 | US20030138772 SEQ ID NO: 13 |
| (AAVbb.2) | | |
| AAV3 | 31 | US20150159173 SEQ ID NO: 12 |
| AAV3 | 32 | US20030138772 SEQ ID NO: 71, |
| | | US20150159173 SEQ ID NO: 28, |
| | | US20160017295 SEQ ID NO: 3, |
| | | U.S. Pat. No. 7,198,951 SEQ ID NO: 6 |
| AAV3 | 33 | US20030138772 SEQ ID NO: 8 |
| AAV3.3b | 34 | US20030138772 SEQ ID NO: 72 |
| AAV3-3 | 35 | US20150315612 SEQ ID NO: 200 |
| AAV3-3 | 36 | US20150315612 SEQ ID NO: 217 |
| AAV3a | 37 | U.S. Pat. No. 6,156,303 SEQ ID NO: 5 |
| AAV3a | 38 | U.S. Pat. No. 6,156,303 SEQ ID NO: 9 |
| AAV3b | 39 | U.S. Pat. No. 6,156,303 SEQ ID NO: 6 |
| AAV3b | 40 | U.S. Pat. No. 6,156,303 SEQ ID NO: 10 |
| AAV3b | 41 | U.S. Pat. No. 6,156,303 SEQ ID NO: 1 |
| AAV4 | 42 | US20140348794 SEQ ID NO: 17 |
| AAV4 | 43 | US20140348794 SEQ ID NO: 5 |
| AAV4 | 44 | US20140348794 SEQ ID NO: 3 |
| AAV4 | 45 | US20140348794 SEQ ID NO: 14 |
| AAV4 | 46 | US20140348794 SEQ ID NO: 15 |
| AAV4 | 47 | US20140348794 SEQ ID NO: 19 |
| AAV4 | 48 | US20140348794 SEQ ID NO: 12 |
| AAV4 | 49 | US20140348794 SEQ ID NO: 13 |
| AAV4 | 50 | US20140348794 SEQ ID NO: 7 |
| AAV4 | 51 | US20140348794 SEQ ID NO: 8 |
| AAV4 | 52 | US20140348794 SEQ ID NO: 9 |
| AAV4 | 53 | US20140348794 SEQ ID NO: 2 |
| AAV4 | 54 | US20140348794 SEQ ID NO: 10 |
| AAV4 | 55 | US20140348794 SEQ ID NO: 11 |
| AAV4 | 56 | US20140348794 SEQ ID NO: 18 |
| AAV4 | 57 | US20030138772 SEQ ID NO: 63, |
| | | US20160017295 SEQ ID NO: 4, |
| | | US20140348794 SEQ ID NO: 4 |
| AAV4 | 58 | US20140348794 SEQ ID NO: 16 |
| AAV4 | 59 | US20140348794 SEQ ID NO: 20 |
| AAV4 | 60 | US20140348794 SEQ ID NO: 6 |
| AAV4 | 61 | US20140348794 SEQ ID NO: 1 |
| AAV42.2 | 62 | US20030138772 SEQ ID NO: 9 |
| AAV42.2 | 63 | US20030138772 SEQ ID NO: 102 |
| AAV42.3b | 64 | US20030138772 SEQ ID NO: 36 |
| AAV42.3B | 65 | US20030138772 SEQ ID NO: 107 |
| AAV42.4 | 66 | US20030138772 SEQ ID NO: 33 |
| AAV42.4 | 67 | US20030138772 SEQ ID NO: 88 |
| AAV42.8 | 68 | US20030138772 SEQ ID NO: 27 |
| AAV42.8 | 69 | US20030138772 SEQ ID NO: 85 |
| AAV43.1 | 70 | US20030138772 SEQ ID NO: 39 |
| AAV43.1 | 71 | US20030138772 SEQ ID NO: 92 |
| AAV43.12 | 72 | US20030138772 SEQ ID NO: 41 |
| AAV43.12 | 73 | US20030138772 SEQ ID NO: 93 |
| AAV43.20 | 74 | US20030138772 SEQ ID NO: 42 |
| AAV43.20 | 75 | US20030138772 SEQ ID NO: 99 |
| AAV43.21 | 76 | US20030138772 SEQ ID NO: 43 |
| AAV43.21 | 77 | US20030138772 SEQ ID NO: 96 |
| AAV43.23 | 78 | US20030138772 SEQ ID NO: 44 |
| AAV43.23 | 79 | US20030138772 SEQ ID NO: 98 |
| AAV43.25 | 80 | US20030138772 SEQ ID NO: 45 |
| AAV43.25 | 81 | US20030138772 SEQ ID NO: 97 |
| AAV43.5 | 82 | US20030138772 SEQ ID NO: 40 |
| AAV43.5 | 83 | US20030138772 SEQ ID NO: 94 |
| AAV4-4 | 84 | US20150315612 SEQ ID NO: 201 |
| AAV4-4 | 85 | US20150315612 SEQ ID NO: 218 |
| AAV44.1 | 86 | US20030138772 SEQ ID NO: 46 |
| AAV44.1 | 87 | US20030138772 SEQ ID NO: 79 |
| AAV44.5 | 88 | US20030138772 SEQ ID NO: 47 |
| AAV44.5 | 89 | US20030138772 SEQ ID NO: 80 |
| AAV4407 | 90 | US20150315612 SEQ ID NO: 90 |
| AAV5 | 91 | U.S. Pat. No. 7,427,396 SEQ ID NO: 1 |
| AAV5 | 92 | US20030138772 SEQ ID NO: 114 |
| AAV5 | 93 | US20160017295 SEQ ID NO: 5, |
| | | U.S. Pat. No. 7,427,396 SEQ ID NO: 2, |
| | | US20150315612 SEQ ID NO: 216 |
| AAV5 | 94 | US20150315612 SEQ ID NO: 199 |
| AAV6 | 95 | US20150159173 SEQ ID NO: 13 |
| AAV6 | 96 | US20030138772 SEQ ID NO: 65, |
| | | US20150159173 SEQ ID NO: 29, |
| | | US20160017295 SEQ ID NO: 6, |
| | | U.S. Pat. No. 6,156,303 SEQ ID NO: 7 |
| AAV6 | 97 | U.S. Pat. No. 6,156,303 SEQ ID NO: 11 |
| AAV6 | 98 | U.S. Pat. No. 6,156,303 SEQ ID NO: 2 |
| AAV6 | 99 | US20150315612 SEQ ID NO: 203 |
| AAV6 | 100 | US20150315612 SEQ ID NO: 220 |
| AAV6.1 | 101 | US20150159173 |
| AAV6.12 | 102 | US20150159173 |
| AAV6.2 | 103 | US20150159173 |
| AAV7 | 104 | US20150159173 SEQ ID NO: 14 |
| AAV7 | 105 | US20150315612 SEQ ID NO: 183 |
| AAV7 | 106 | US20030138772 SEQ ID NO: 2, |
| | | US20150159173 SEQ ID NO: 30, |
| | | US20150315612 SEQ ID NO: 181, |
| | | US20160017295 SEQ ID NO: 7 |
| AAV7 | 107 | US20030138772 SEQ ID NO: 3 |
| AAV7 | 108 | US20030138772 SEQ ID NO: 1, |
| | | US20150315612 SEQ ID NO: 180 |
| AAV7 | 109 | US20150315612 SEQ ID NO: 213 |
| AAV7 | 110 | US20150315612 SEQ ID NO: 222 |
| AAV8 | 111 | US20150159173 SEQ ID NO: 15 |
| AAV8 | 112 | US20150376240 SEQ ID NO: 7 |
| AAV8 | 113 | US20030138772 SEQ ID NO: 4, |
| | | US20150315612 SEQ ID NO: 182 |
| AAV8 | 114 | US20030138772 SEQ ID NO: 95, |
| | | US20140359799 SEQ ID NO: 1, |
| | | US20150159173 SEQ ID NO: 31, |
| | | US20160017295 SEQ ID NO: 8, |
| | | U.S. Pat. No. 7,198,951 SEQ ID NO: 7, |
| | | US20150315612 SEQ ID NO: 223 |
| AAV8 | 115 | US20150376240 SEQ ID NO: 8 |
| AAV8 | 116 | US20150315612 SEQ ID NO: 214 |
| AAV-8b | 117 | US20150376240 SEQ ID NO: 5 |
| AAV-8b | 118 | US20150376240 SEQ ID NO: 3 |
| AAV-8h | 119 | US20150376240 SEQ ID NO: 6 |
| AAV-8h | 120 | US20150376240 SEQ ID NO: 4 |
| AAV9 | 121 | US20030138772 SEQ ID NO: 5 |
| AAV9 | 122 | U.S. Pat. No. 7,198,951 SEQ ID NO: 1 |
| AAV9 | 123 | US20160017295 SEQ ID NO: 9 |
| AAV9 | 124 | US20030138772 SEQ ID NO: 100, |
| | | U.S. Pat. No. 7,198,951 SEQ ID NO: 2 |
| AAV9 | 125 | U.S. Pat. No. 7,198,951 SEQ ID NO: 3 |
| AAV9 | 126 | U.S. Pat. No. 7,906,111 SEQ ID NO: 3; |
| (AAVhu.14) | | WO2015038958 SEQ ID NO: 11 |
| AAV9 | 127 | U.S. Pat. No. 7,906,111 SEQ ID NO: 123; |
| (AAVhu.14) | | WO2015038958 SEQ ID NO: 2 |
| AAVA3.1 | 128 | US20030138772 SEQ ID NO: 120 |
| AAVA3.3 | 129 | US20030138772 SEQ ID NO: 57 |
| AAVA3.3 | 130 | US20030138772 SEQ ID NO: 66 |
| AAVA3.4 | 131 | US20030138772 SEQ ID NO: 54 |
| AAVA3.4 | 132 | US20030138772 SEQ ID NO: 68 |
| AAVA3.5 | 133 | US20030138772 SEQ ID NO: 55 |
| AAVA3.5 | 134 | US20030138772 SEQ ID NO: 69 |
| AAVA3.7 | 135 | US20030138772 SEQ ID NO: 56 |
| AAVA3.7 | 136 | US20030138772 SEQ ID NO: 67 |
| AAV29.3 | 137 | US20030138772 SEQ ID NO: 11 |
| (AAVbb.1) | | |
| AAVC2 | 138 | US20030138772 SEQ ID NO: 61 |
| AAV Ch.5 | 139 | US20150159173 SEQ ID NO: 46, |
| | | US20150315612 SEQ ID NO: 234 |
| AAVcy.2 | 140 | US20030138772 SEQ ID NO: 15 |
| (AAV13.3) | | |
| AAV24.1 | 141 | US20030138772 SEQ ID NO: 101 |
| AAVcy.3 | 142 | US20030138772 SEQ ID NO: 16 |
| (AAV24.1) | | |
| AAV27.3 | 143 | US20030138772 SEQ ID NO: 104 |
| AAVcy.4 | 144 | US20030138772 SEQ ID NO: 17 |
| (AAV27.3) | | |
| AAVcy.5 | 145 | US20150315612 SEQ ID NO: 227 |
| AAV7.2 | 146 | US20030138772 SEQ ID NO: 103 |
| AAVcy.5 | 147 | US20030138772 SEQ ID NO: 18 |
| (AAV7.2) | | |
| AAV16.3 | 148 | US20030138772 SEQ ID NO: 105 |
| AAVcy.6 | 149 | US20030138772 SEQ ID NO: 10 |
| (AAV16.3) | | |
| AAVcy.5 | 150 | US20150159173 SEQ ID NO: 8 |
| AAVcy.5 | 151 | US20150159173 SEQ ID NO: 24 |
| AAVCy.5R1 | 152 | US20150159173 |
| AAVCy.5R2 | 153 | US20150159173 |
| AAVCy.5R3 | 154 | US20150159173 |
| AAVCy.5R4 | 155 | US20150159173 |
| AAVDJ | 156 | US20140359799 SEQ ID NO: 3, |
| | | U.S. Pat. No. 7,588,772 SEQ ID NO: 2 |
| AAVDJ | 157 | US20140359799 SEQ ID NO: 2, |
| | | U.S. Pat. No. 7,588,772 SEQ ID NO: 1 |
| AAVDJ-8 | 158 | U.S. Pat. No. 7,588,772; Grimm et al |
| | | 2008 |
| AAVDJ-8 | 159 | U.S. Pat. No. 7,588,772; Grimm et al |
| | | 2008 |
| AAVF5 | 160 | US20030138772 SEQ ID NO: 110 |
| AAVH2 | 161 | US20030138772 SEQ ID NO: 26 |
| AAVH6 | 162 | US20030138772 SEQ ID NO: 25 |
| AAVhE1.1 | 163 | U.S. Pat. No. 9,233,131 SEQ ID NO: 44 |
| AAVhEr1.14 | 164 | U.S. Pat. No. 9,233,131 SEQ ID NO: 46 |
| AAVhEr1.16 | 165 | U.S. Pat. No. 9,233,131 SEQ ID NO: 48 |
| AAVhEr1.18 | 166 | U.S. Pat. No. 9,233,131 SEQ ID NO: 49 |
| AAVhEr1.23 | 167 | U.S. Pat. No. 9,233,131 SEQ ID NO: 53 |
| (AAVhEr2.29) | | |
| AAVhEr1.35 | 168 | U.S. Pat. No. 9,233,131 SEQ ID NO: 50 |
| AAVhEr1.36 | 169 | U.S. Pat. No. 9,233,131 SEQ ID NO: 52 |
| AAVhEr1.5 | 170 | U.S. Pat. No. 9,233,131 SEQ ID NO: 45 |
| AAVhEr1.7 | 171 | U.S. Pat. No. 9,233,131 SEQ ID NO: 51 |
| AAVhEr1.8 | 172 | U.S. Pat. No. 9,233,131 SEQ ID NO: 47 |
| AAVhEr2.16 | 173 | U.S. Pat. No. 9,233,131 SEQ ID NO: 55 |
| AAVhEr2.30 | 174 | U.S. Pat. No. 9,233,131 SEQ ID NO: 56 |
| AAVhEr2.31 | 175 | U.S. Pat. No. 9,233,131 SEQ ID NO: 58 |
| AAVhEr2.36 | 176 | U.S. Pat. No. 9,233,131 SEQ ID NO: 57 |
| AAVhEr2.4 | 177 | U.S. Pat. No. 9,233,131 SEQ ID NO: 54 |
| AAVhEr3.1 | 178 | U.S. Pat. No. 9,233,131 SEQ ID NO: 59 |
| AAVhu.1 | 179 | US20150315612 SEQ ID NO: 46 |
| AAVhu.1 | 180 | US20150315612 SEQ ID NO: 144 |
| AAVhu.10 | 181 | US20150315612 SEQ ID NO: 56 |
| (AAV16.8) | | |
| AAVhu.10 | 182 | US20150315612 SEQ ID NO: 156 |
| (AAV16.8) | | |
| AAVhu.11 | 183 | US20150315612 SEQ ID NO: 57 |
| (AAV16.12) | | |
| AAVhu.11 | 184 | US20150315612 SEQ ID NO: 153 |
| (AAV16.12) | | |
| AAVhu.12 | 185 | US20150315612 SEQ ID NO: 59 |
| AAVhu.12 | 186 | US20150315612 SEQ ID NO: 154 |
| AAVhu.13 | 187 | US20150159173 SEQ ID NO: 16, |
| | | US20150315612 SEQ ID NO: 71 |
| AAVhu.13 | 188 | US20150159173 SEQ ID NO: 32, |
| | | US20150315612 SEQ ID NO: 129 |
| AAVhu.136.1 | 189 | US20150315612 SEQ ID NO: 165 |
| AAVhu.140.1 | 190 | US20150315612 SEQ ID NO: 166 |
| AAVhu.140.2 | 191 | US20150315612 SEQ ID NO: 167 |
| AAVhu.145.6 | 192 | US20150315612 SEQ ID No: 178 |
| AAVhu.15 | 193 | US20150315612 SEQ ID NO: 147 |
| AAVhu.15 | 194 | US20150315612 SEQ ID NO: 50 |
| (AAV33.4) | | |
| AAVhu.156.1 | 195 | US20150315612 SEQ ID No: 179 |
| AAVhu.16 | 196 | US20150315612 SEQ ID NO: 148 |
| AAVhu.16 | 197 | US20150315612 SEQ ID NO: 51 |
| (AAV33.8) | | |
| AAVhu.17 | 198 | US20150315612 SEQ ID NO: 83 |
| AAVhu.17 | 199 | US20150315612 SEQ ID NO: 4 |
| (AAV33.12) | | |
| AAVhu.172.1 | 200 | US20150315612 SEQ ID NO: 171 |
| AAVhu.172.2 | 201 | US20150315612 SEQ ID NO: 172 |
| AAVhu.173.4 | 202 | US20150315612 SEQ ID NO: 173 |
| AAVhu.173.8 | 203 | US20150315612 SEQ ID NO: 175 |
| AAVhu.18 | 204 | US20150315612 SEQ ID NO: 52 |
| AAVhu.18 | 205 | US20150315612 SEQ ID NO: 149 |
| AAVhu.19 | 206 | US20150315612 SEQ ID NO: 62 |
| AAVhu.19 | 207 | US20150315612 SEQ ID NO: 133 |
| AAVhu.2 | 208 | US20150315612 SEQ ID NO: 48 |
| AAVhu.2 | 209 | US20150315612 SEQ ID NO: 143 |
| AAVhu.20 | 210 | US20150315612 SEQ ID NO: 63 |
| AAVhu.20 | 211 | US20150315612 SEQ ID NO: 134 |
| AAVhu.21 | 212 | US20150315612 SEQ ID NO: 65 |
| AAVhu.21 | 213 | US20150315612 SEQ ID NO: 135 |
| AAVhu.22 | 214 | US20150315612 SEQ ID NO: 67 |
| AAVhu.22 | 215 | US20150315612 SEQ ID NO: 138 |
| AAVhu.23 | 216 | US20150315612 SEQ ID NO: 60 |
| AAVhu.23.2 | 217 | US20150315612 SEQ ID NO: 137 |
| AAVhu.24 | 218 | US20150315612 SEQ ID NO: 66 |
| AAVhu.24 | 219 | US20150315612 SEQ ID NO: 136 |
| AAVhu.25 | 220 | US20150315612 SEQ ID NO: 49 |
| AAVhu.25 | 221 | US20150315612 SEQ ID NO: 146 |
| AAVhu.26 | 222 | US20150159173 SEQ ID NO: 17, |
| | | US20150315612 SEQ ID NO: 61 |
| AAVhu.26 | 223 | US20150159173 SEQ ID NO: 33, |
| | | US20150315612 SEQ ID NO: 139 |
| AAVhu.27 | 224 | US20150315612 SEQ ID NO: 64 |
| AAVhu.27 | 225 | US20150315612 SEQ ID NO: 140 |
| AAVhu.28 | 226 | US20150315612 SEQ ID NO: 68 |
| AAVhu.28 | 227 | US20150315612 SEQ ID NO: 130 |
| AAVhu.29 | 228 | US20150315612 SEQ ID NO: 69 |
| AAVhu.29 | 229 | US20150159173 SEQ ID NO: 42, |
| | | US20150315612 SEQ ID NO: 132 |
| AAVhu.29 | 230 | US20150315612 SEQ ID NO: 225 |
| AAVhu.29R | 231 | US20150159173 |
| AAVhu.3 | 232 | US20150315612 SEQ ID NO: 44 |
| AAVhu.3 | 233 | US20150315612 SEQ ID NO: 145 |
| AAVhu.30 | 234 | US20150315612 SEQ ID NO: 70 |
| AAVhu.30 | 235 | US20150315612 SEQ ID NO: 131 |
| AAVhu.31 | 236 | US20150315612 SEQ ID NO: 1 |
| AAVhu.31 | 237 | US20150315612 SEQ ID NO: 121 |
| AAVhu.32 | 238 | US20150315612 SEQ ID NO: 2 |
| AAVhu.32 | 239 | US20150315612 SEQ ID NO: 122 |
| AAVhu.33 | 240 | US20150315612 SEQ ID NO: 75 |
| AAVhu.33 | 241 | US20150315612 SEQ ID NO: 124 |
| AAVhu.34 | 242 | US20150315612 SEQ ID NO: 72 |
| AAVhu.34 | 243 | US20150315612 SEQ ID NO: 125 |
| AAVhu.35 | 244 | US20150315612 SEQ ID NO: 73 |
| AAVhu.35 | 245 | US20150315612 SEQ ID NO: 164 |
| AAVhu.36 | 246 | US20150315612 SEQ ID NO: 74 |
| AAVhu.36 | 247 | US20150315612 SEQ ID NO: 126 |
| AAVhu.37 | 248 | US20150159173 SEQ ID NO: 34, |
| | | US20150315612 SEQ ID NO: 88 |
| AAVhu.37 | 249 | US20150315612 SEQ ID NO: 10, |
| (AAV106.1) | | US20150159173 SEQ ID NO: 18 |
| AAVhu.38 | 250 | US20150315612 SEQ ID NO: 161 |
| AAVhu.39 | 251 | US20150315612 SEQ ID NO: 102 |
| AAVhu.39 | 252 | US20150315612 SEQ ID NO: 24 |
| (AAVLG-9) | | |
| AAVhu.4 | 253 | US20150315612 SEQ ID NO: 47 |
| AAVhu.4 | 254 | US20150315612 SEQ ID NO: 141 |
| AAVhu.40 | 255 | US20150315612 SEQ ID NO: 87 |
| AAVhu.40 | 256 | US20150315612 SEQ ID No: 11 |
| (AAV114.3) | | |
| AAVhu.41 | 257 | US20150315612 SEQ ID NO: 91 |
| AAVhu.41 | 258 | US20150315612 SEQ ID NO: 6 |
| (AAV127.2) | | |
| AAVhu.42 | 259 | US20150315612 SEQ ID NO: 85 |
| AAVhu.42 | 260 | US20150315612 SEQ ID NO: 8 |
| (AAV127.5) | | |
| AAVhu.43 | 261 | US20150315612 SEQ ID NO: 160 |
| AAVhu.43 | 262 | US20150315612 SEQ ID NO: 236 |
| AAVhu.43 | 263 | US20150315612 SEQ ID NO: 80 |
| (AAV128.1) | | |
| AAVhu.44 | 264 | US20150159173 SEQ ID NO: 45, |
| | | US20150315612 SEQ ID NO: 158 |
| AAVhu.44 | 265 | US20150315612 SEQ ID NO: 81 |
| AAV1283 | | |
| AAVhu.44R1 | 266 | US20150159173 |
| AAVhu.44R2 | 267 | US20150159173 |
| AAVhu.44R3 | 268 | US20150159173 |
| AAVhu.45 | 269 | US20150315612 SEQ ID NO: 76 |
| AAVhu.45 | 270 | US20150315612 SEQ ID NO: 127 |
| AAVhu.46 | 271 | US20150315612 SEQ ID NO: 82 |
| AAVhu.46 | 272 | US20150315612 SEQ ID NO: 159 |
| AAVhu.46 | 273 | US20150315612 SEQ ID NO: 224 |
| AAVhu.47 | 274 | US20150315612 SEQ ID NO: 77 |
| AAVhu.47 | 275 | US20150315612 SEQ ID NO: 128 |
| AAVhu.48 | 276 | US20150159173 SEQ ID NO: 38 |
| AAVhu.48 | 277 | US20150315612 SEQ ID NO: 157 |
| AAVhu.48 | 278 | US20150315612 SEQ ID NO: 78 |
| (AAV130.4) | | |
| AAVhu.48R1 | 279 | US20150159173 |
| AAVhu.48R2 | 280 | US20150159173 |
| AAVhu.48R3 | 281 | US20150159173 |
| AAVhu.49 | 282 | US20150315612 SEQ ID NO: 209 |
| AAVhu.49 | 283 | US20150315612 SEQ ID NO: 189 |
| AAVhu.5 | 284 | US20150315612 SEQ ID NO: 45 |
| AAVhu.5 | 285 | US20150315612 SEQ ID NO: 142 |
| AAVhu.51 | 286 | US20150315612 SEQ ID NO: 208 |
| AAVhu.51 | 287 | US20150315612 SEQ ID NO: 190 |
| AAVhu.52 | 288 | US20150315612 SEQ ID NO: 210 |
| AAVhu.52 | 289 | US20150315612 SEQ ID NO: 191 |
| AAVhu.53 | 290 | US20150159173 SEQ ID NO: 19 |
| AAVhu.53 | 291 | US20150159173 SEQ ID NO: 35 |
| AAVhu.53 | 292 | US20150315612 SEQ ID NO: 176 |
| (AAV145.1) | | |
| AAVhu.54 | 293 | US20150315612 SEQ ID NO: 188 |
| AAVhu.54 | 294 | US20150315612 SEQ ID No: 177 |
| (AAV145.5) | | |
| AAVhu.55 | 295 | US20150315612 SEQ ID NO: 187 |
| AAVhu.56 | 296 | US20150315612 SEQ ID NO: 205 |
| AAVhu.56 | 297 | US20150315612 SEQ ID NO: 168 |
| (AAV145.6) | | |
| AAVhu.56 | 298 | US20150315612 SEQ ID NO: 192 |
| (AAV145.6) | | |
| AAVhu.57 | 299 | US20150315612 SEQ ID NO: 206 |
| AAVhu.57 | 300 | US20150315612 SEQ ID NO: 169 |
| AAVhu.57 | 301 | US20150315612 SEQ ID NO: 193 |
| AAVhu.58 | 302 | US20150315612 SEQ ID NO: 207 |
| AAVhu.58 | 303 | US20150315612 SEQ ID NO: 194 |
| AAVhu.6 | 304 | US20150315612 SEQ ID NO: 5 |
| (AAV3.1) | | |
| AAVhu.6 | 305 | US20150315612 SEQ ID NO: 84 |
| (AAV3.1) | | |
| AAVhu.60 | 306 | US20150315612 SEQ ID NO: 184 |
| AAVhu.60 | 307 | US20150315612 SEQ ID NO: 170 |
| (AAV161.10) | | |
| AAVhu.61 | 308 | US20150315612 SEQ ID NO: 185 |
| AAVhu.61 | 309 | US20150315612 SEQ ID NO: 174 |
| (AAV161.6) | | |
| AAVhu.63 | 310 | US20150315612 SEQ ID NO: 204 |
| AAVhu.63 | 311 | US20150315612 SEQ ID NO: 195 |
| AAVhu.64 | 312 | US20150315612 SEQ ID NO: 212 |
| AAVhu.64 | 313 | US20150315612 SEQ ID NO: 196 |
| AAVhu.66 | 314 | US20150315612 SEQ ID NO: 197 |
| AAVhu.67 | 315 | US20150315612 SEQ ID NO: 215 |
| AAVhu.67 | 316 | US20150315612 SEQ ID NO: 198 |
| AAVhu.7 | 317 | US20150315612 SEQ ID NO: 226 |
| AAVhu.7 | 318 | US20150315612 SEQ ID NO: 150 |
| AAVhu.7 | 319 | US20150315612 SEQ ID NO: 55 |
| (AAV7.3) | | |
| AAVhu.71 | 320 | US20150315612 SEQ ID NO: 79 |
| AAVhu.8 | 321 | US20150315612 SEQ ID NO: 53 |
| AAVhu.8 | 322 | US20150315612 SEQ ID NO: 12 |
| AAVhu.8 | 323 | US20150315612 SEQ ID NO: 151 |
| AAVhu.9 | 324 | US20150315612 SEQ ID NO: 58 |
| (AAV3.1) | | |
| AAVhu.9 | 325 | US20150315612 SEQ ID NO: 155 |
| (AAV3.1) | | |
| AAV-LK01 | 326 | US20150376607 SEQ ID NO: 2 |
| AAV-LK01 | 327 | US20150376607 SEQ ID NO: 29 |
| AAV-LK02 | 328 | US20150376607 SEQ ID NO: 3 |
| AAV-LK02 | 329 | US20150376607 SEQ ID NO: 30 |
| AAV-LK03 | 330 | US20150376607 SEQ ID NO: 4 |
| AAV-LK03 | 331 | WO2015121501 SEQ ID NO: 12, |
| | | US20150376607 SEQ ID NO: 31 |
| AAV-LK04 | 332 | US20150376607 SEQ ID NO: 5 |
| AAV-LK04 | 333 | US20150376607 SEQ ID NO: 32 |
| AAV-LK05 | 334 | US20150376607 SEQ ID NO: 6 |
| AAV-LK05 | 335 | US20150376607 SEQ ID NO: 33 |
| AAV-LK06 | 336 | US20150376607 SEQ ID NO: 7 |
| AAV-LK06 | 337 | US20150376607 SEQ ID NO: 34 |
| AAV-LK07 | 338 | US20150376607 SEQ ID NO: 8 |
| AAV-LK07 | 339 | US20150376607 SEQ ID NO: 35 |
| AAV-LK08 | 340 | US20150376607 SEQ ID NO: 9 |
| AAV-LK08 | 341 | US20150376607 SEQ ID NO: 36 |
| AAV-LK09 | 342 | US20150376607 SEQ ID NO: 10 |
| AAV-LK09 | 343 | US20150376607 SEQ ID NO: 37 |
| AAV-LK10 | 344 | US20150376607 SEQ ID NO: 11 |
| AAV-LK10 | 345 | US20150376607 SEQ ID NO: 38 |
| AAV-LK11 | 346 | US20150376607 SEQ ID NO: 12 |
| AAV-LK11 | 347 | US20150376607 SEQ ID NO: 39 |
| AAV-LK12 | 348 | US20150376607 SEQ ID NO: 13 |
| AAV-LK12 | 349 | US20150376607 SEQ ID NO: 40 |
| AAV-LK13 | 350 | US20150376607 SEQ ID NO: 14 |
| AAV-LK13 | 351 | US20150376607 SEQ ID NO: 41 |
| AAV-LK14 | 352 | US20150376607 SEQ ID NO: 15 |
| AAV-LK14 | 353 | US20150376607 SEQ ID NO: 42 |
| AAV-LK15 | 354 | US20150376607 SEQ ID NO: 16 |
| AAV-LK15 | 355 | US20150376607 SEQ ID NO: 43 |
| AAV-LK16 | 356 | US20150376607 SEQ ID NO: 17 |
| AAV-LK16 | 357 | US20150376607 SEQ ID NO: 44 |
| AAV-LK17 | 358 | US20150376607 SEQ ID NO: 18 |
| AAV-LK17 | 359 | US20150376607 SEQ ID NO: 45 |
| AAV-LK18 | 360 | US20150376607 SEQ ID NO: 19 |
| AAV-LK18 | 361 | US20150376607 SEQ ID NO: 46 |
| AAV-LK19 | 362 | US20150376607 SEQ ID NO: 20 |
| AAV-LK19 | 363 | US20150376607 SEQ ID NO: 47 |
| AAV-PAEC | 364 | US20150376607 SEQ ID NO: 1 |
| AAV-PAEC | 365 | US20150376607 SEQ ID NO: 48 |
| AAV- | 366 | US20150376607 SEQ ID NO: 26 |
| PAEC11 | | |
| AAV- | 367 | US20150376607 SEQ ID NO: 54 |
| PAEC11 | | |
| AAV- | 368 | US20150376607 SEQ ID NO: 27 |
| PAEC12 | | |
| AAV- | 369 | US20150376607 SEQ ID NO: 51 |
| PAEC12 | | |
| AAV- | 370 | US20150376607 SEQ ID NO: 28 |
| PAEC13 | | |
| AAV- | 371 | US20150376607 SEQ ID NO: 49 |
| PAEC13 | | |
| AAV-PAEC2 | 372 | US20150376607 SEQ ID NO: 21 |
| AAV-PAEC2 | 373 | US20150376607 SEQ ID NO: 56 |
| AAV-PAEC4 | 374 | US20150376607 SEQ ID NO: 22 |
| AAV-PAEC4 | 375 | US20150376607 SEQ ID NO: 55 |
| AAV-PAEC6 | 376 | US20150376607 SEQ ID NO: 23 |
| AAV-PAEC6 | 377 | US20150376607 SEQ ID NO: 52 |
| AAV-PAEC7 | 378 | US20150376607 SEQ ID NO: 24 |
| AAV-PAEC7 | 379 | US20150376607 SEQ ID NO: 53 |
| AAV-PAEC8 | 380 | US20150376607 SEQ ID NO: 25 |
| AAV-PAEC8 | 381 | US20150376607 SEQ ID NO: 50 |
| AAVpi.1 | 382 | US20150315612 SEQ ID NO: 28 |
| AAVpi.1 | 383 | US20150315612 SEQ ID NO: 93 |
| AAVpi.2 | 384 | US20150315612 SEQ ID NO: 30 |
| AAVpi.2 | 385 | US20150315612 SEQ ID NO: 95 |
| AAVpi.3 | 386 | US20150315612 SEQ ID NO: 29 |
| AAVpi.3 | 387 | US20150315612 SEQ ID NO: 94 |
| AAVrh.10 | 388 | US20150159173 SEQ ID NO: 9 |
| AAVrh.10 | 389 | US20150159173 SEQ ID NO: 25 |
| AAV44.2 | 390 | US20030138772 SEQ ID NO: 59 |
| AAVrh.10 | 391 | US20030138772 SEQ ID NO: 81 |
| (AAV44.2) | | |
| AAV42.1B | 392 | US20030138772 SEQ ID NO: 90 |
| AAVrh.12 | 393 | US20030138772 SEQ ID NO: 30 |
| (AAV42.1b) | | |
| AAVrh.13 | 394 | US20150159173 SEQ ID NO: 10 |
| AAVrh.13 | 395 | US20150159173 SEQ ID NO: 26 |
| AAVrh.13 | 396 | US20150315612 SEQ ID NO: 228 |
| AAVrh3.13R | 397 | US20150159173 |
| AAV42.3A | 398 | US20030138772 SEQ ID NO: 87 |
| AAVrh.14 | 399 | US20030138772 SEQ ID NO: 32 |
| (AAV42.3a) | | |
| AAV42.5A | 400 | US20030138772 SEQ ID NO: 89 |
| AAVrh.17 | 401 | US20030138772 SEQ ID NO: 34 |
| (AAV42.5a) | | |
| AAV42.5B | 402 | US20030138772 SEQ ID NO: 91 |
| AAVrh.18 | 403 | US20030138772 SEQ ID NO: 29 |
| (AAV42.5b) | | |
| AAV42.6B | 404 | US20030138772 SEQ ID NO: 112 |
| AAVrh.19 | 405 | US20030138772 SEQ ID NO: 38 |
| (AAV42.6b) | | |
| AAVrh.2 | 406 | US20150159173 SEQ ID NO: 39 |
| AAVrh.2 | 407 | US20150315612 SEQ ID NO: 231 |
| AAVrh.20 | 408 | US20150159173 SEQ ID NO: 1 |
| AAV42.10 | 409 | US20030138772 SEQ ID NO: 106 |
| AAVrh.21 | 410 | US20030138772 SEQ ID NO: 35 |
| (AAV42.10) | | |
| AAV42.11 | 411 | US20030138772 SEQ ID NO: 108 |
| AAVrh.22 | 412 | US20030138772 SEQ ID NO: 37 |
| (AAV42.11) | | |
| AAV42.12 | 413 | US20030138772 SEQ ID NO: 113 |
| AAVrh.23 | 414 | US20030138772 SEQ ID NO: 58 |
| (AAV42.12) | | |
| AAV42.13 | 415 | US20030138772 SEQ ID NO: 86 |
| AAVrh.24 | 416 | US20030138772 SEQ ID NO: 31 |
| (AAV42.13) | | |
| AAV42.15 | 417 | US20030138772 SEQ ID NO: 84 |
| AAVrh.25 | 418 | US20030138772 SEQ ID NO: 28 |
| (AAV42.15) | | |
| AAVrh.2R | 419 | US20150159173 |
| AAVrh.31 | 420 | US20030138772 SEQ ID NO: 48 |
| (AAV223.1) | | |
| AAVC1 | 421 | US20030138772 SEQ ID NO: 60 |
| AAVrh.32 | 422 | US20030138772 SEQ ID NO: 19 |
| (AAVC1) | | |
| AAVrh.32/33 | 423 | US20150159173 SEQ ID NO: 2 |
| AAVrh.33 | 424 | US20030138772 SEQ ID NO: 20 |
| (AAVC3) | | |
| AAVC5 | 425 | US20030138772 SEQ ID NO: 62 |
| AAVrh.34 | 426 | US20030138772 SEQ ID NO: 21 |
| (AAVC5) | | |
| AAVF1 | 427 | US20030138772 SEQ ID NO: 109 |
| AAVrh.35 | 428 | US20030138772 SEQ ID NO: 22 |
| (AAVF1) | | |
| AAVF3 | 429 | US20030138772 SEQ ID NO: 111 |
| AAVrh.36 | 430 | US20030138772 SEQ ID NO: 23 |
| (AAVF3) | | |
| AAVrh.37 | 431 | US20030138772 SEQ ID NO: 24 |
| AAVrh.37 | 432 | US20150159173 SEQ ID NO: 40 |
| AAVrh.37 | 433 | US20150315612 SEQ ID NO: 229 |
| AAVrh.37R2 | 434 | US20150159173 |
| AAVrh.38 | 435 | US20150315612 SEQ ID NO: 7 |
| (AAVLG-4) | | |
| AAVrh.38 | 436 | US20450315612 SEQ ID NO: 86 |
| (AAVLG-4) | | |
| AAVrh.39 | 437 | US20150159173 SEQ ID NO: 20, |
| | | US20150315612 SEQ ID NO: 13 |
| AAVrh.39 | 438 | US20150159173 SEQ ID NO: 3, |
| | | US20150159173 SEQ ID NO: 36, |
| | | US20150315612 SEQ ID NO: 89 |
| AAVrh.40 | 439 | US20150315612 SEQ ID NO: 92 |
| AAVrh.40 | 440 | US20150315612 SEQ ID No: 14 |
| (AAVLG-10) | | |
| AAVrh.43 | 441 | US20150315612 SEQ ID NO: 43, |
| (AAVN721-8) | | US20150159173 SEQ ID NO: 21 |
| AAVrh.43 | 442 | US20450315612 SEQ ID NO: 163, |
| (AAVN721-8) | | US20150159173 SEQ ID NO: 37 |
| AAVrh.44 | 443 | US20150315612 SEQ ID NO: 34 |
| AAVrh.44 | 444 | US20150315612 SEQ ID NO: 111 |
| AAVrh.45 | 445 | US20150315612 SEQ ID NO: 41 |
| AAVrh.45 | 446 | US20150315612 SEQ ID NO: 109 |
| AAVrh.46 | 447 | US20150159173 SEQ ID NO: 22, |
| | | US20150315612 SEQ ID NO: 19 |
| AAVrh.46 | 448 | US20150159173 SEQ ID NO: 4, |
| | | US20150315612 SEQ ID NO: 101 |
| AAVrh.47 | 449 | US20150315612 SEQ ID NO: 38 |
| AAVrh.47 | 450 | US20150315612 SEQ ID NO: 118 |
| AAVrh.48 | 451 | US20150159173 SEQ ID NO: 44, |
| | | US20150315612 SEQ ID NO: 115 |
| AAVrh.48.1 | 452 | US20150159173 |
| AAVrh.48.1.2 | 453 | US20150159173 |
| AAVrh.48.2 | 454 | US20150159173 |
| AAVrh.48 | 455 | US20150315612 SEQ ID NO: 32 |
| (AAV1-7) | | |
| AAVrh.49 | 456 | US20150315612 SEQ ID NO: 25 |
| (AAV1-8) | | |
| AAVrh.49 | 457 | US20150315612 SEQ ID NO: 103 |
| (AAV1-8) | | |
| AAVrh.50 | 458 | US20150315612 SEQ ID NO: 23 |
| (AAV2-4) | | |
| AAVrh.50 | 459 | US20150315612 SEQ ID NO: 108 |
| (AAV2-4) | | |
| AAVrh.51 | 460 | US20150315612 SEQ ID No: 22 |
| (AAV2-5) | | |
| AAVrh.51 | 461 | US20150315612 SEQ ID NO: 104 |
| (AAV2-5) | | |
| AAVrh.52 | 462 | US20150315612 SEQ ID NO: 18 |
| (AAV3-9) | | |
| AAVrh.52 | 463 | US20150315612 SEQ ID NO: 96 |
| (AAV3-9) | | |
| AAVrh.53 | 464 | US20150315612 SEQ ID NO: 97 |
| AAVrh.53 | 465 | US20150315612 SEQ ID NO: 17 |
| (AAV3-11) | | |
| AAVrh.53 | 466 | US20150315612 SEQ ID NO: 186 |
| (AAV3-11) | | |
| AAVrh.54 | 467 | US20150315612 SEQ ID NO: 40 |
| AAVrh.54 | 468 | US20150159173 SEQ ID NO: 49, |
| | | US20150315612 SEQ ID NO: 116 |
| AAVrh.55 | 469 | US20150315612 SEQ ID NO: 37 |
| AAVrh.55 | 470 | US20150315612 SEQ ID NO: 117 |
| (AAV4-19) | | |
| AAVrh.56 | 471 | US20150315612 SEQ ID NO: 54 |
| AAVrh.56 | 472 | US20150315612 SEQ ID NO: 152 |
| AAVrh.57 | 473 | US20150315612 SEQ ID NO: 26 |
| AAVrh.57 | 474 | US20150315612 SEQ ID NO: 105 |
| AAVrh.58 | 475 | US20150315612 SEQ ID NO: 27 |
| AAVrh.58 | 476 | US20150159173 SEQ ID NO: 48, |
| | | US20150315612 SEQ ID NO: 106 |
| AAVrh.58 | 477 | US20150315612 SEQ ID NO: 232 |
| AAVrh.59 | 478 | US20150315612 SEQ ID NO: 42 |
| AAVrh.59 | 479 | US20150315612 SEQ ID NO: 110 |
| AAVrh.60 | 480 | US20150315612 SEQ ID NO: 31 |
| AAVrh.60 | 481 | US20150315612 SEQ ID NO: 120 |
| AAVrh.61 | 482 | US20150315612 SEQ ID NO: 107 |
| AAVrh.61 | 483 | US20150315612 SEQ ID NO: 21 |
| (AAV2-3) | | |
| AAVrh.62 | 484 | US20150315612 SEQ ID No: 33 |
| (AAV2-15) | | |
| AAVrh.62 | 485 | US20150315612 SEQ ID NO: 114 |
| (AAV2-15) | | |
| AAVrh.64 | 486 | US20150315612 SEQ ID No: 15 |
| AAVrh.64 | 487 | US20150159173 SEQ ID NO: 43, |
| | | US20150315612 SEQ ID NO: 99 |
| AAVrh.64 | 488 | US20150315612 SEQ ID NO: 233 |
| AAVRh.64R1 | 489 | US20150159173 |
| AAVRh.64R2 | 490 | US20150159173 |
| AAVrh.65 | 491 | US20150315612 SEQ ID NO: 35 |
| AAVrh.65 | 492 | US20150315612 SEQ ID NO: 112 |
| AAVrh.67 | 493 | US20150315612 SEQ ID NO: 36 |
| AAVrh.67 | 494 | US20150315612 SEQ ID NO: 230 |
| AAVrh.67 | 495 | US20150159173 SEQ ID NO: 47, |
| | | US20150315612 SEQ ID NO: 113 |
| AAVrh.68 | 496 | US20150315612 SEQ ID NO: 16 |
| AAVrh.68 | 497 | US20150315612 SEQ ID NO: 100 |
| AAVrh.69 | 498 | US20150315612 SEQ ID NO: 39 |
| AAVrh.69 | 499 | US20150315612 SEQ ID NO: 119 |
| AAVrh.70 | 500 | US20150315612 SEQ ID NO: 20 |
| AAVrh.70 | 501 | US20150315612 SEQ ID NO: 98 |
| AAVrh.71 | 502 | US20150315612 SEQ ID NO: 162 |
| AAVrh.72 | 503 | US20150315612 SEQ ID NO: 9 |
| AAVrh.73 | 504 | US20150159173 SEQ ID NO: 5 |
| AAVrh.74 | 505 | US20150159173 SEQ ID NO: 6 |
| AAVrh.8 | 506 | US20150159173 SEQ ID NO: 41 |
| AAVrh.8 | 507 | US20150315612 SEQ ID NO: 235 |
| AAVrh.8R | 508 | US20150159173, WO2015168666 |
| | | SEQ ID NO: 9 |
| AAVrh.8R | 509 | WO2015168666 SEQ ID NO: 10 |
| A586R | | |
| mutant | | |
| AAVrh.8R | 510 | WO2015168666 SEQ ID NO: 11 |
| R533A | | |
| mutant | | |
| BAAV | 511 | U.S. Pat. No. 9,193,769 SEQ ID NO: 8 |
| (bovine | | |
| AAV) | | |
| BAAV | 512 | U.S. Pat. No. 9,193,769 SEQ ID NO: 10 |
| (bovine | | |
| AAV) | | |
| BAAV | 513 | U.S. Pat. No. 9,193,769 SEQ ID NO: 4 |
| (bovine | | |
| AAV) | | |
| BAAV | 514 | U.S. Pat. No. 9,193,769 SEQ ID NO: 2 |
| (bovine | | |
| AAV) | | |
| BAAV | 515 | U.S. Pat. No. 9,193,769 SEQ ID NO: 6 |
| (bovine | | |
| AAV) | | |
| BAAV | 516 | U.S. Pat. No. 9,193,769 SEQ ID NO: 1 |
| (bovine | | |
| AAV) | | |
| BAAV | 517 | U.S. Pat. No. 9,193,769 SEQ ID NO: 5 |
| (bovine | | |
| AAV) | | |
| BAAV | 518 | U.S. Pat. No. 9,193,769 SEQ ID NO: 3 |
| (bovine | | |
| AAV) | | |
| BAAV | 519 | U.S. Pat. No. 9,193,769 SEQ ID NO: 11 |
| (bovine | | |
| AAV) | | |
| BAAV | 520 | U.S. Pat. No. 7,427,396 SEQ ID NO: 5 |
| (bovine | | |
| AAV) | | |
| BAAV | 521 | U.S. Pat. No. 7,427,396 SEQ ID NO: 6 |
| (bovine | | |
| AAV) | | |
| BAAV | 522 | U.S. Pat. No. 9,193,769 SEQ ID NO: 7 |
| (bovine | | |
| AAV) | | |
| BAAV | 523 | U.S. Pat. No. 9,193,769 SEQ ID NO: 9 |
| (bovine | | |
| AAV) | | |
| BNP61 AAV | 524 | US20150238550 SEQ ID NO: 1 |
| BNP61 AAV | 525 | US20150238550 SEQ ID NO: 2 |
| BNP62 AAV | 526 | US20150238550 SEQ ID NO: 3 |
| BNP63 AAV | 527 | US20150238550 SEQ ID NO: 4 |
| caprine AAV | 528 | U.S. Pat. No. 7,427,396 SEQ ID NO: 3 |
| caprine AAV | 529 | U.S. Pat. No. 7,427,396 SEQ ID NO: 4 |
| true type | 530 | WO2015121501 SEQ ID NO: 2 |
| AAV | | |
| (ttAAV) | | |
| AAAV | 531 | U.S. Pat. No. 9,238,800 SEQ ID NO: 12 |
| (Avian AAV) | | |
| AAAV | 532 | U.S. Pat. No. 9,238,800 SEQ ID NO: 2 |
| (Avian AAV) | | |
| AAAV | 533 | U.S. Pat. No. 9,238,800 SEQ ID NO: 6 |
| (Avian AAV) | | |
| AAAV | 534 | U.S. Pat. No. 9,238,800 SEQ ID NO: 4 |
| (Avian AAV) | | |
| AAAV | 535 | U.S. Pat. No. 9,238,800 SEQ ID NO: 8 |
| (Avian AAV) | | |
| AAAV | 536 | U.S. Pat. No. 9,238,800 SEQ ID NO: 14 |
| (Avian AAV) | | |
| AAAV | 537 | U.S. Pat. No. 9,238,800 SEQ ID NO: 10 |
| (Avian AAV) | | |
| AAAV | 538 | U.S. Pat. No. 9,238,800 SEQ ID NO: 15 |
| (Avian AAV) | | |
| AAAV | 539 | U.S. Pat. No. 9,238,800 SEQ ID NO: 5 |
| (Avian AAV) | | |
| AAAV | 540 | U.S. Pat. No. 9,238,800 SEQ ID NO: 9 |
| (Avian AAV) | | |
| AAAV | 541 | U.S. Pat. No. 9,238,800 SEQ ID NO: 3 |
| (Avian AAV) | | |
| AAAV | 542 | U.S. Pat. No. 9,238,800 SEQ ID NO: 7 |
| (Avian AAV) | | |
| AAAV | 543 | U.S. Pat. No. 9,238,800 SEQ ID NO: 11 |
| (Avian AAV) | | |
| AAAV | 544 | U.S. Pat. No. 9,238,800 SEQ ID NO: 13 |
| (Avian AAV) | | |
| AAAV | 545 | U.S. Pat. No. 9,238,800 SEQ ID NO: 1 |
| (Avian AAV) | | |
| AAV Shuffle | 546 | US20160017295 SEQ ID NO: 23 |
| 100-1 | | |
| AAV Shuffle | 547 | US20160017295 SEQ ID NO: 11 |
| 100-1 | | |
| AAV Shuffle | 548 | US20160017295 SEQ ID NO: 37 |
| 100-2 | | |
| AAV Shuffle | 549 | US20160017295 SEQ ID NO: 29 |
| 100-2 | | |
| AAV Shuffle | 550 | US20160017295 SEQ ID NO: 24 |
| 100-3 | | |
| AAV Shuffle | 551 | US20160017295 SEQ ID NO: 12 |
| 100-3 | | |
| AAV Shuffle | 552 | US20160017295 SEQ ID NO: 25 |
| 100-7 | | |
| AAV Shuffle | 553 | US20160017295 SEQ ID NO: 13 |
| 100-7 | | |
| AAV Shuffle | 554 | US20160017295 SEQ ID NO: 34 |
| 10-2 | | |
| AAV Shuffle | 555 | US20160017295 SEQ ID NO: 26 |
| 10-2 | | |
| AAV Shuffle | 556 | US20160017295 SEQ ID NO: 35 |
| 10-6 | | |
| AAV Shuffle | 557 | US20160017295 SEQ ID NO: 27 |
| 10-6 | | |
| AAV Shuffle | 558 | US20160017295 SEQ ID NO: 36 |
| 10-8 | | |
| AAV Shuffle | 559 | US20160017295 SEQ ID NO: 28 |
| 10-8 | | |
| AAV SM | 560 | US20160017295 SEQ ID NO: 41 |
| 100-10 | | |
| AAV SM | 561 | US20160017295 SEQ ID NO: 33 |
| 100-10 | | |
| AAV SM | 562 | US20160017295 SEQ ID NO: 40 |
| 100-3 | | |
| AAV SM | 563 | US20160017295 SEQ ID NO: 32 |
| 100-3 | | |
| AAV SM | 564 | US20160017295 SEQ ID NO: 38 |
| 10-1 | | |
| AAV SM | 565 | US20160017295 SEQ ID NO: 30 |
| 10-1 | | |
| AAV SM | 566 | US20160017295 SEQ ID NO: 10 |
| 10-2 | | |
| AAV SM | 567 | US20160017295 SEQ ID NO: 22 |
| 10-2 | | |
| AAV SM | 568 | US20160017295 SEQ ID NO: 39 |
| 10-8 | | |
| AAV SM | 569 | US20160017295 SEQ ID NO: 31 |
| 10-8 | | |
| AAV SM | 560 | US20160017295 SEQ ID NO: 41 |
| 100-10 | | |
| AAV SM | 561 | US20160017295 SEQ ID NO: 33 |
| 100-10 | | |
| AAV SM | 562 | US20160017295 SEQ ID NO: 40 |
| 100-3 | | |
| AAV SM | 563 | US20160017295 SEQ ID NO: 32 |
| 100-3 | | |
| AAV SM 10-1 | 564 | US20160017295 SEQ ID NO: 38 |
| AAV SM 10-1 | 565 | US20160017295 SEQ ID NO: 30 |
| AAV SM 10-2 | 566 | US20160017295 SEQ ID NO: 10 |
| AAV SM 10-2 | 567 | US20160017295 SEQ ID NO: 22 |
| AAV SM 10-8 | 568 | US20160017295 SEQ ID NO: 39 |
| AAV SM 10-8 | 569 | US20160017295 SEQ ID NO: 31 |
| AAVF1/HSC1 | 570 | WO2016049230 SEQ ID NO: 20 |
| AAVF2/HSC2 | 571 | WO2016049230 SEQ ID NO: 21 |
| AAVF3/HSC3 | 572 | WO2016049230 SEQ ID NO: 22 |
| AAVF4/HSC4 | 573 | WO2016049230 SEQ ID NO: 23 |
| AAVF5/HSC5 | 574 | WO2016049230 SEQ ID NO: 25 |
| AAVF6/HSC6 | 575 | WO2016049230 SEQ ID NO: 24 |
| AAVF7/HSC7 | 576 | WO2016049230 SEQ ID NO: 27 |
| AAVF8/HSC8 | 577 | WO2016049230 SEQ ID NO: 28 |
| AAVF9/HSC9 | 578 | WO2016049230 SEQ ID NO: 29 |
| AAVF11/ | 579 | WO2016049230 SEQ ID NO: 26 |
| HSC11 | | |
| AAVF12/ | 580 | WO2016049230 SEQ ID NO: 30 |
| HSC12 | | |
| AAVF13/ | 581 | WO2016049230 SEQ ID NO: 31 |
| HSC13 | | |
| AAVF14/ | 582 | WO2016049230 SEQ ID NO: 32 |
| HSC14 | | |
| AAVF15/ | 583 | WO2016049230 SEQ ID NO: 33 |
| HSC15 | | |
| AAVF16/ | 584 | WO2016049230 SEQ ID NO: 34 |
| HSC16 | | |
| AAVF17/ | 585 | WO2016049230 SEQ ID NO: 35 |
| HSC17 | | |
| AAVF1/ | 586 | WO2016049230 SEQ ID NO: 2 |
| HSC1 | | |
| AAVF2/ | 587 | WO2016049230 SEQ ID NO: 3 |
| HSC2 | | |
| AAVF3/ | 588 | WO2016049230 SEQ ID NO: 5 |
| HSC3 | | |
| AAVF4/ | 589 | WO2016049230 SEQ ID NO: 6 |
| HSC4 | | |
| AAVF5/ | 590 | WO2016049230 SEQ ID NO: 11 |
| HSC5 | | |
| AAVF6/ | 591 | WO2016049230 SEQ ID NO: 7 |
| HSC6 | | |
| AAVF7/ | 592 | WO2016049230 SEQ ID NO: 8 |
| HSC7 | | |
| AAVF8/ | 593 | WO2016049230 SEQ ID NO: 9 |
| HSC8 | | |
| AAVF9/ | 594 | WO2016049230 SEQ ID NO: 10 |
| HSC9 | | |
| AAVF11/ | 595 | WO2016049230 SEQ ID NO: 4 |
| HSC11 | | |
| AAVF12/ | 596 | WO2016049230 SEQ ID NO: 12 |
| HSC12 | | |
| AAVF13/ | 597 | WO2016049230 SEQ ID NO: 14 |
| HSC13 | | |
| AAVF14/ | 598 | WO2016049230 SEQ ID NO: 15 |
| HSC14 | | |
| AAVF15/ | 599 | WO2016049230 SEQ ID NO: 16 |
| HSC15 | | |
| AAVF16/ | 600 | WO2016049230 SEQ ID NO: 17 |
| HSC16 | | |
| AAVF17/ | 601 | WO2016149230 SEQ ID NO: 13 |
| HSC17 | | |
| AAV CBr-E1 | 602 | U.S. Pat. No. 8,734,809 SEQ ID NO: 13 |
| AAV CBr-E2 | 603 | U.S. Pat. No. 8,734,809 SEQ ID NO: 14 |
| AAV CBr-E3 | 604 | U.S. Pat. No. 8,734,809 SEQ ID NO: 15 |
| AAV CBr-E4 | 605 | U.S. Pat. No. 8,734,809 SEQ ID NO: 16 |
| AAV CBr-E5 | 606 | U.S. Pat. No. 8,734,809 SEQ ID NO: 17 |
| AAV CBr-e5 | 607 | U.S. Pat. No. 8,734,809 SEQ ID NO: 18 |
| AAV CBr-E6 | 608 | U.S. Pat. No. 8,734,809 SEQ ID NO: 19 |
| AAV CBr-E7 | 609 | U.S. Pat. No. 8,734,809 SEQ ID NO: 20 |
| AAV CBr-E8 | 610 | U.S. Pat. No. 8,734,809 SEQ ID NO: 21 |
| AAV CLv- | 611 | U.S. Pat. No. 8,734,809 SEQ ID NO: 22 |
| D1 | | |
| AAV CLv- | 612 | U.S. Pat. No. 8,734,809 SEQ ID NO: 23 |
| D2 | | |
| AAV CLv- | 613 | U.S. Pat. No. 8,734,809 SEQ ID NO: 24 |
| D3 | | |
| AAV CLv- | 614 | U.S. Pat. No. 8,734,809 SEQ ID NO: 25 |
| D4 | | |
| AAV CLv- | 615 | U.S. Pat. No. 8,734,809 SEQ ID NO: 26 |
| D5 | | |
| AAV CLv- | 616 | U.S. Pat. No. 8,734,809 SEQ ID NO: 27 |
| D6 | | |
| AAV CLv- | 617 | U.S. Pat. No. 8,734,809 SEQ ID NO: 28 |
| D7 | | |
| AAV CLv- | 618 | U.S. Pat. No. 8,734,809 SEQ ID NO: 29 |
| D8 | | |
| AAV CLv- | 619 | U.S. Pat. No. 8,734,809 SEQ ID NO: 13 |
| E1 | | |
| AAV CLv- | 620 | U.S. Pat. No. 8,734,809 SEQ ID NO: 30 |
| R1 | | |
| AAV CLv- | 621 | U.S. Pat. No. 8,734,809 SEQ ID NO: 31 |
| R2 | | |
| AAV CLv- | 622 | U.S. Pat. No. 8,734,809 SEQ ID NO: 32 |
| R3 | | |
| AAV CLv- | 623 | U.S. Pat. No. 8,734,809 SEQ ID NO: 33 |
| R4 | | |
| AAV CLv- | 624 | U.S. Pat. No. 8,734,809 SEQ ID NO: 34 |
| R5 | | |
| AAV CLv- | 625 | U.S. Pat. No. 8,734,809 SEQ ID NO: 35 |
| R6 | | |
| AAV CLv- | 626 | U.S. Pat. No. 8,734,809 SEQ ID NO: 36 |
| R7 | | |
| AAV CLv- | 627 | U.S. Pat. No. 8,734,809 SEQ ID NO: 37 |
| R8 | | |
| AAV CLv- | 628 | U.S. Pat. No. 8,734,809 SEQ ID NO: 38 |
| R9 | | |
| AAV CLg-F1 | 629 | U.S. Pat. No. 8,734,809 SEQ ID NO: 39 |
| AAV CLg-F2 | 630 | U.S. Pat. No. 8,734,809 SEQ ID NO: 40 |
| AAV CLg-F3 | 631 | U.S. Pat. No. 8,734,809 SEQ ID NO: 41 |
| AAV CLg-F4 | 632 | U.S. Pat. No. 8,734,809 SEQ ID NO: 42 |
| AAV CLg-F5 | 633 | U.S. Pat. No. 8,734,809 SEQ ID NO: 43 |
| AAV CLg-F6 | 634 | U.S. Pat. No. 8,734,809 SEQ ID NO: 43 |
| AAV CLg-F7 | 635 | U.S. Pat. No. 8,734,809 SEQ ID NO: 44 |
| AAV CLg-F8 | 636 | U.S. Pat. No. 8,734,809 SEQ ID NO: 43 |
| AAV CSp-1 | 637 | U.S. Pat. No. 8,734,809 SEQ ID NO: 45 |
| AAV CSp-10 | 638 | U.S. Pat. No. 8,734,809 SEQ ID NO: 46 |
| AAV CSp-11 | 639 | U.S. Pat. No. 8,734,809 SEQ ID NO: 47 |
| AAV CSp-2 | 640 | U.S. Pat. No. 8,734,809 SEQ ID NO: 48 |
| AAV CSp-3 | 641 | U.S. Pat. No. 8,734,809 SEQ ID NO: 49 |
| AAV CSp-4 | 642 | U.S. Pat. No. 8,734,809 SEQ ID NO: 50 |
| AAV CSp-6 | 643 | U.S. Pat. No. 8,734,809 SEQ ID NO: 51 |
| AAV CSp-7 | 644 | U.S. Pat. No. 8,734,809 SEQ ID NO: 52 |
| AAV CSp-8 | 645 | U.S. Pat. No. 8,734,809 SEQ ID NO: 53 |
| AAV CSp-9 | 646 | U.S. Pat. No. 8,734,809 SEQ ID NO: 54 |
| AAV CHt-2 | 647 | U.S. Pat. No. 8,734,809 SEQ ID NO: 55 |
| AAV CHt-3 | 648 | U.S. Pat. No. 8,734,809 SEQ ID NO: 56 |
| AAV CKd-1 | 649 | U.S. Pat. No. 8,734,809 SEQ ID NO: 57 |
| AAV CKd-10 | 650 | U.S. Pat. No. 8,734,809 SEQ ID NO: 58 |
| AAV CKd-2 | 651 | U.S. Pat. No. 8,734,809 SEQ ID NO: 59 |
| AAV CKd-3 | 652 | U.S. Pat. No. 8,734,809 SEQ ID NO: 60 |
| AAV CKd-4 | 653 | U.S. Pat. No. 8,734,809 SEQ ID NO: 61 |
| AAV CKd-6 | 654 | U.S. Pat. No. 8,734,809 SEQ ID NO: 62 |
| AAV CKd-7 | 655 | U.S. Pat. No. 8,734,809 SEQ ID NO: 63 |
| AAV CKd-8 | 656 | U.S. Pat. No. 8,734,809 SEQ ID NO: 64 |
| AAV CLv-1 | 657 | U.S. Pat. No. 8,734,809 SEQ ID NO: 65 |
| AAV CLv-12 | 658 | U.S. Pat. No. 8,734,809 SEQ ID NO: 66 |
| AAV CLv-13 | 659 | U.S. Pat. No. 8,734,809 SEQ ID NO: 67 |
| AAV CLv-2 | 660 | U.S. Pat. No. 8,734,809 SEQ ID NO: 68 |
| AAV CLv-3 | 661 | U.S. Pat. No. 8,734,809 SEQ ID NO: 69 |
| AAV CLv-4 | 662 | U.S. Pat. No. 8,734,809 SEQ ID NO: 70 |
| AAV CLv-6 | 663 | U.S. Pat. No. 8,734,809 SEQ ID NO: 71 |
| AAV CLv-8 | 664 | U.S. Pat. No. 8,734,809 SEQ ID NO: 72 |
| AAV CKd- | 665 | U.S. Pat. No. 8,734,809 SEQ ID NO: 73 |
| B1 | | |
| AAV CKd- | 666 | U.S. Pat. No. 8,734,809 SEQ ID NO: 74 |
| B2 | | |
| AAV CKd- | 667 | U.S. Pat. No. 8,734,809 SEQ ID NO: 75 |
| B3 | | |
| AAV CKd- | 668 | U.S. Pat. No. 8,734,809 SEQ ID NO: 76 |
| B4 | | |
| AAV CKd- | 669 | U.S. Pat. No. 8,734,809 SEQ ID NO: 77 |
| B5 | | |
| AAV CKd- | 670 | U.S. Pat. No. 8,734,809 SEQ ID NO: 78 |
| B6 | | |
| AAV CKd- | 671 | U.S. Pat. No. 8,734,809 SEQ ID NO: 79 |
| B7 | | |
| AAV CKd- | 672 | U.S. Pat. No. 8,734,809 SEQ ID NO: 80 |
| B8 | | |
| AAV CKd- | 673 | U.S. Pat. No. 8,734,809 SEQ ID NO: 81 |
| H1 | | |
| AAV CKd- | 674 | U.S. Pat. No. 8,734,809 SEQ ID NO: 82 |
| H2 | | |
| AAV CKd- | 675 | U.S. Pat. No. 8,734,809 SEQ ID NO: 83 |
| H3 | | |
| AAV CKd- | 676 | U.S. Pat. No. 8,734,809 SEQ ID NO: 84 |
| H4 | | |
| AAV CKd- | 677 | U.S. Pat. No. 8,734,809 SEQ ID NO: 85 |
| H5 | | |
| AAV CKd- | 678 | U.S. Pat. No. 8,734,809 SEQ ID NO: 77 |
| H6 | | |
| AAV CHt-1 | 679 | U.S. Pat. No. 8,734,809 SEQ ID NO: 86 |
| AAV CLv1-1 | 680 | U.S. Pat. No. 8,734,809 SEQ ID NO: 171 |
| AAV CLv1-2 | 681 | U.S. Pat. No. 8,734,809 SEQ ID NO: 172 |
| AAV CLv1-3 | 682 | U.S. Pat. No. 8,734,809 SEQ ID NO: 173 |
| AAV CLv1-4 | 683 | U.S. Pat. No. 8,734,809 SEQ ID NO: 174 |
| AAV CLv1-7 | 684 | U.S. Pat. No. 8,734,809 SEQ ID NO: 175 |
| AAV CLv1-8 | 685 | U.S. Pat. No. 8,734,809 SEQ ID NO: 176 |
| AAV CLv1-9 | 686 | U.S. Pat. No. 8,734,809 SEQ ID NO: 177 |
| AAV CLv1-10 | 687 | U.S. Pat. No. 8,734,809 SEQ ID NO: 178 |
| AAV.VR-355 | 688 | U.S. Pat. No. 8,734,809 SEQ ID NO: 181 |
| AAV.hu.48R3 | 689 | U.S. Pat. No. 8,734,809 SEQ ID NO: 183 |
| AAV CBr-E1 | 690 | U.S. Pat. No. 8,734,809 SEQ ID NO: 87 |
| AAV CBr-E2 | 691 | U.S. Pat. No. 8,734,809 SEQ ID NO: 88 |
| AAV CBr-E3 | 692 | U.S. Pat. No. 8,734,809 SEQ ID NO: 89 |
| AAV CBr-E4 | 693 | U.S. Pat. No. 8,734,809 SEQ ID NO: 90 |
| AAV CBr-E5 | 694 | U.S. Pat. No. 8,734,809 SEQ 11 NO: 91 |
| AAV CBr-e5 | 695 | U.S. Pat. No. 8,734,809 SEQ ID NO: 92 |
| AAV CBr-E6 | 696 | U.S. Pat. No. 8,734,809 SEQ ID NO: 93 |
| AAV CBr-E7 | 697 | U.S. Pat. No. 8,734,809 SEQ ID NO: 94 |
| AAV CBr-E8 | 698 | U.S. Pat. No. 8,734,809 SEQ ID NO: 95 |
| AAV CLv- | 699 | U.S. Pat. No. 8,734,809 SEQ ID NO: 96 |
| D1 | | |
| AAV CLv- | 700 | U.S. Pat. No. 8,734,809 SEQ ID NO: 97 |
| D2 | | |
| AAV CLv- | 701 | U.S. Pat. No. 8,734,809 SEQ ID NO: 98 |
| D3 | | |
| AAV CLv- | 702 | U.S. Pat. No. 8,734,809 SEQ ID NO: 99 |
| D4 | | |
| AAV CLv- | 703 | U.S. Pat. No. 8,734,809 SEQ ID NO: 100 |
| D5 | | |
| AAV CLv- | 704 | U.S. Pat. No. 8,734,809 SEQ ID NO: 101 |
| D6 | | |
| AAV CLv- | 705 | U.S. Pat. No. 8,734,809 SEQ ID NO: 102 |
| D7 | | |
| AAV CLv- | 706 | U.S. Pat. No. 8,734,809 SEQ ID NO: 103 |
| D8 | | |
| AAV CLv-E1 | 707 | U.S. Pat. No. 8,734,809 SEQ ID NO: 87 |
| AAV CLv- | 708 | U.S. Pat. No. 8,734,809 SEQ ID NO: 104 |
| R1 | | |
| AAV CLv- | 709 | U.S. Pat. No. 8,734,809 SEQ ID NO: 105 |
| R2 | | |
| AAV CLv- | 710 | U.S. Pat. No. 8,734,809 SEQ ID NO: 106 |
| R3 | | |
| AAV CLv- | 711 | U.S. Pat. No. 8,734,809 SEQ ID NO: 107 |
| R4 | | |
| AAV CLv- | 712 | U.S. Pat. No. 8,734,809 SEQ ID NO: 108 |
| R5 | | |
| AAV CLv- | 713 | U.S. Pat. No. 8,734,809 SEQ ID NO: 109 |
| R6 | | |
| AAV CLv- | 714 | U.S. Pat. No. 8,734,809 SEQ ID NO: 110 |
| R7 | | |
| AAV CLv- | 715 | U.S. Pat. No. 8,734,809 SEQ ID NO: 111 |
| R8 | | |
| AAV CLv- | 716 | U.S. Pat. No. 8,734,809 SEQ ID NO: 112 |
| R9 | | |
| AAV CLg-F1 | 717 | U.S. Pat. No. 8,734,809 SEQ ID NO: 113 |
| AAV CLg-F2 | 718 | U.S. Pat. No. 8,734,809 SEQ ID NO: 114 |
| AAV CLg-F3 | 719 | U.S. Pat. No. 8,734,809 SEQ ID NO: 115 |
| AAV CLg-74 | 720 | U.S. Pat. No. 8,734,809 SEQ ID NO: 116 |
| AAV CLg-F5 | 721 | U.S. Pat. No. 8,734,809 SEQ ID NO: 117 |
| AAV CLg-F6 | 722 | U.S. Pat. No. 8,734,809 SEQ ID NO: 117 |
| AAV CLg-F7 | 723 | U.S. Pat. No. 8,734,809 SEQ ID NO: 118 |
| AAV CLg-F8 | 724 | U.S. Pat. No. 8,734,809 SEQ ID NO: 117 |
| AAV CSp-1 | 725 | U.S. Pat. No. 8,734,809 SEQ ID NO: 119 |
| AAV CSp-10 | 726 | U.S. Pat. No. 8,734,809 SEQ ID NO: 120 |
| AAV CSp-11 | 727 | U.S. Pat. No. 8,734,809 SEQ ID NO: 121 |
| AAV CSp-2 | 728 | U.S. Pat. No. 8,734,809 SEQ ID NO: 122 |
| AAV CSp-3 | 729 | U.S. Pat. No. 8,734,809 SEQ ID NO: 123 |
| AAV CSp-4 | 730 | U.S. Pat. No. 8,734,809 SEQ ID NO: 124 |
| AAV CSp-6 | 731 | U.S. Pat. No. 8,734,809 SEQ ID NO: 125 |
| AAV CSp-7 | 732 | U.S. Pat. No. 8,734,809 SEQ ID NO: 126 |
| AAV CSp-8 | 733 | U.S. Pat. No. 8,734,809 SEQ ID NO: 127 |
| AAV CSp-9 | 734 | U.S. Pat. No. 8,734,809 SEQ ID NO: 128 |
| AAV CHt-2 | 735 | U.S. Pat. No. 8,734,809 SEQ ID NO: 129 |
| AAV CHt-3 | 736 | U.S. Pat. No. 8,734,809 SEQ ID NO: 130 |
| AAV CKd-1 | 737 | U.S. Pat. No. 8,734,809 SEQ ID NO: 131 |
| AAV CKd-10 | 738 | U.S. Pat. No. 8,734,809 SEQ ID NO: 132 |
| AAV CKd-2 | 739 | U.S. Pat. No. 8,734,809 SEQ ID NO: 133 |
| AAV CKd-3 | 740 | U.S. Pat. No. 8,734,809 SEQ ID NO: 134 |
| AAV CKd-4 | 741 | U.S. Pat. No. 8,734,809 SEQ ID NO: 135 |
| AAV CKd-6 | 742 | U.S. Pat. No. 8,734,809 SEQ ID NO: 136 |
| AAV CKd-7 | 743 | U.S. Pat. No. 8,734,809 SEQ ID NO: 137 |
| AAV CKd-8 | 744 | U.S. Pat. No. 8,734,809 SEQ ID NO: 138 |
| AAV CLv-1 | 745 | U.S. Pat. No. 8,734,809 SEQ ID NO: 139 |
| AAV CLv-12 | 746 | U.S. Pat. No. 8,734,809 SEQ ID NO: 140 |
| AAV CLv-13 | 747 | U.S. Pat. No. 8,734,809 SEQ ID NO: 141 |
| AAV CLv-2 | 748 | U.S. Pat. No. 8,734,809 SEQ ID NO: 142 |
| AAV CLv-3 | 749 | U.S. Pat. No. 8,734,809 SEQ ID NO: 143 |
| AAV CLv-4 | 750 | U.S. Pat. No. 8,734,809 SEQ ID NO: 144 |
| AAV CLv-6 | 751 | U.S. Pat. No. 8,734,809 SEQ ID NO: 145 |
| AAV CLv-8 | 752 | U.S. Pat. No. 8,734,809 SEQ ID NO: 146 |
| AAV CKd- | 753 | U.S. Pat. No. 8,734,809 SEQ ID NO: 147 |
| B1 | | |
| AAV CKd- | 754 | U.S. Pat. No. 8,734,809 SEQ ID NO: 148 |
| B3 | | |
| AAV CKd- | 755 | U.S. Pat. No. 8,734,809 SEQ ID NO: 149 |
| B3 | | |
| AAV CKd- | 756 | U.S. Pat. No. 8,734,809 SEQ ID NO: 150 |
| B4 | | |
| AAV CKd- | 757 | U.S. Pat. No. 8,734,809 SEQ ID NO: 151 |
| B5 | | |
| AAV CKd- | 758 | U.S. Pat. No. 8,734,809 SEQ ID NO: 152 |
| B6 | | |
| AAV CKd- | 759 | U.S. Pat. No. 8,734,809 SEQ ID NO: 153 |
| B7 | | |
| AAV CKd- | 760 | U.S. Pat. No. 8,734,809 SEQ ID NO: 154 |
| B8 | | |
| AAV CKd- | 761 | U.S. Pat. No. 8,734,809 SEQ ID NO: 155 |
| H1 | | |
| AAV CKd- | 762 | U.S. Pat. No. 8,734,809 SEQ ID NO: 156 |
| H2 | | |
| AAV CKd- | 763 | U.S. Pat. No. 8,734,809 SEQ ID NO: 157 |
| H3 | | |
| AAV CKd- | 764 | U.S. Pat. No. 8,734,809 SEQ ID NO: 158 |
| H4 | | |
| AAV CKd- | 765 | U.S. Pat. No. 8,734,809 SEQ ID NO: 159 |
| H5 | | |
| AAV CKd- | 766 | U.S. Pat. No. 8,734,809 SEQ ID NO: 151 |
| H6 | | |
| AAV CHt-1 | 767 | U.S. Pat. No. 8,734,809 SEQ ID NO: 160 |
| AAV CHt-P2 | 768 | WO2016065001 SEQ ID NO: 1 |
| AAV CHt-P5 | 769 | WO2016065001 SEQ ID NO: 2 |
| AAV CHt-P9 | 770 | WO2016065001 SEQ ID NO: 3 |
| AAV CBr- | 771 | WO2016065001 SEQ ID NO: 4 |
| 7.1 | | |
| AAV CBr- | 772 | WO2016065001 SEQ ID NO: 5 |
| 7.2 | | |
| AAV CBr- | 773 | WO2016065001 SEQ ID NO: 6 |
| 7.3 | | |
| AAV CBr- | 774 | WO2016065001 SEQ ID NO: 7 |
| 7.4 | | |
| AAV CBr- | 775 | WO2016065001 SEQ ID NO: 8 |
| 7.5 | | |
| AAV CBr- | 776 | WO2016065001 SEQ ID NO: 9 |
| 7.7 | | |
| AAV CBr- | 777 | WO2016065001 SEQ ID NO: 10 |
| 7.8 | | |
| AAV CBr- | 778 | WO2016065001 SEQ ID NO: 11 |
| 7.10 | | |
| AAV CKd- | 779 | WO2016065001 SEQ ID NO: 12 |
| N3 | | |
| AAV CKd- | 780 | WO2016065001 SEQ ID NO: 13 |
| N4 | | |
| AAV CKd- | 781 | WO2016065001 SEQ ID NO: 14 |
| N9 | | |
| AAV CLv-L4 | 782 | WO2016065001 SEQ ID NO: 15 |
| AAV CLv-L5 | 783 | WO2016065001 SEQ ID NO: 16 |
| AAV CLv-L6 | 784 | WO2016065001 SEQ ID NO: 17 |
| AAV CLv- | 785 | WO2016065001 SEQ ID NO: 18 |
| K1 | | |
| AAV CLv- | 786 | WO2016065001 SEQ ID NO: 19 |
| K3 | | |
| AAV CLv- | 787 | WO2016065001 SEQ ID NO: 20 |
| K6 | | |
| AAV CLv- | 788 | WO2016065001 SEQ ID NO: 21 |
| M1 | | |
| AAV CLv- | 789 | WO2016065001 SEQ ID NO: 22 |
| M11 | | |
| AAV CLv- | 790 | WO2016065001 SEQ ID NO: 23 |
| M2 | | |
| AAV CLv- | 791 | WO2016065001 SEQ ID NO: 24 |
| M5 | | |
| AAV CLv- | 792 | WO2016065001 SEQ ID NO: 25 |
| M6 | | |
| AAV CLv- | 793 | WO2016065001 SEQ ID NO: 26 |
| M7 | | |
| AAV CLv- | 794 | WO2016065001 SEQ ID NO: 27 |
| M8 | | |
| AAV CLv- | 795 | WO2016065001 SEQ ID NO: 28 |
| M9 | | |
| AAV CHt-P1 | 796 | WO2016065001 SEQ ID NO: 29 |
| AAV CHt-P6 | 797 | WO2016065001 SEQ ID NO: 30 |
| AAV CHt-P8 | 798 | WO2016065001 SEQ ID NO: 31 |
| AAV CHt- | 799 | WO2016065001 SEQ ID NO: 32 |
| 6.1 | | |
| AAV CHt- | 800 | WO2016065001 SEQ ID NO: 33 |
| 6.10 | | |
| AAV CHt- | 801 | WO2016065001 SEQ ID NO: 34 |
| 6.5 | | |
| AAV CHt- | 802 | WO2016065001 SEQ ID NO: 35 |
| 6.6 | | |
| AAV CHt- | 803 | WO2016065001 SEQ ID NO: 36 |
| 6.7 | | |
| AAV CHt- | 804 | WO2016065001 SEQ ID NO: 37 |
| 6.8 | | |
| AAV CSp- | 805 | WO2016065001 SEQ ID NO: 38 |
| 8.10 | | |
| AAV CSp- | 806 | WO2016065001 SEQ ID NO: 39 |
| 8.2 | | |
| AAV CSp- | 807 | WO2016065001 SEQ ID NO: 40 |
| 8.4 | | |
| AAV CSp- | 808 | WO2016065001 SEQ ID NO: 41 |
| 8.5 | | |
| AAV CSp- | 809 | WO2016065001 SEQ ID NO: 42 |
| 8.6 | | |
| AAV CSp- | 810 | WO2016065001 SEQ ID NO: 43 |
| 8.7 | | |
| AAV CSp- | 811 | WO2016065001 SEQ ID NO: 44 |
| 8.8 | | |
| AAV CSp- | 812 | WO2016065001 SEQ ID NO: 45 |
| 8.9 | | |
| AAV CBr- | 813 | WO2016065001 SEQ ID NO: 46 |
| B7.3 | | |
| AAV CBr- | 814 | WO2016065001 SEQ ID NO: 47 |
| B7.4 | | |
| AAV3B | 815 | WO2016065001 SEQ ID NO: 48 |
| AAV4 | 816 | WO2016065001 SEQ ID NO: 49 |
| AAV5 | 817 | WO2016065001 SEQ ID NO: 50 |
| AAV CHt-P2 | 818 | WO2016065001 SEQ ID NO: 51 |
| AAV CHt-P5 | 819 | WO2016065001 SEQ ID NO: 52 |
| AAV CHt-P9 | 820 | WO2016065001 SEQ ID NO: 53 |
| AAV CBr- | 821 | WO2016065001 SEQ ID NO: 54 |
| 7.1 | | |
| AAV CBr- | 822 | WO2016065001 SEQ ID NO: 55 |
| 7.2 | | |
| AAV CBr- | 823 | WO2016065001 SEQ ID NO: 56 |
| 7.3 | | |
| AAV CBr- | 824 | WO2016065001 SEQ ID NO: 57 |
| 7.4 | | |
| AAV CBr- | 825 | WO2016065001 SEQ ID NO: 58 |
| 7.5 | | |
| AAV CBr- | 826 | WO2016065001 SEQ ID NO: 59 |
| 7.7 | | |
| AAV CBr- | 827 | WO2016065001 SEQ ID NO: 60 |
| 7.8 | | |
| AAV CBr- | 828 | WO2016065001 SEQ ID NO: 61 |
| 7.10 | | |
| AAV CKd- | 829 | WO2016065001 SEQ ID NO: 62 |
| N3 | | |
| AAV CKd- | 830 | WO2016065001 SEQ ID NO: 63 |
| N4 | | |
| AAV CKd- | 831 | WO2016065001 SEQ ID NO: 64 |
| N9 | | |
| AAV CLv-L4 | 832 | WO2016065001 SEQ ID NO: 65 |
| AAV CLv-L5 | 833 | WO2016065001 SEQ ID NO: 66 |
| AAV CLv-L6 | 834 | WO2016065001 SEQ ID NO: 67 |
| AAV CLv- | 835 | WO2016065001 SEQ ID NO: 68 |
| K1 | | |
| AAV CLv- | 836 | WO2016065001 SEQ ID NO: 69 |
| K3 | | |
| AAV CLv- | 837 | WO2016065001 SEQ ID NO: 70 |
| K6 | | |
| AAV CL- | 838 | WO2016065001 SEQ ID NO: 71 |
| M1 | | |
| AAV CLv- | 839 | WO2016065001 SEQ ID NO: 72 |
| M11 | | |
| AAV CLv- | 840 | WO2016065001 SEQ ID NO: 73 |
| M2 | | |
| AAV CLv- | 841 | WO2016065001 SEQ ID NO: 74 |
| M5 | | |
| AAV CLv- | 842 | WO2016065001 SEQ ID NO: 75 |
| M6 | | |
| AAV CLv- | 843 | WO2016065001 SEQ ID NO: 76 |
| M7 | | |
| AAV CLv- | 844 | WO2016065001 SEQ ID NO: 77 |
| M8 | | |
| AAV CLv- | 845 | WO2016065001 SEQ ID NO: 78 |
| M9 | | |
| AAV CHt-P1 | 846 | WO2016065001 SEQ ID NO: 79 |
| AAV CHt-P6 | 847 | WO2016065001 SEQ ID NO: 80 |
| AAV CHt-P8 | 848 | WO2016065001 SEQ ID NO: 81 |
| AAV CHt- | 849 | WO2016065001 SEQ ID NO: 82 |
| 6.1 | | |
| AAV CHt- | 850 | WO2016065001 SEQ ID NO: 83 |
| 6.10 | | |
| AAV CHt- | 851 | WO2016065001 SEQ ID NO: 84 |
| 6.5 | | |
| AAV CHt- | 852 | WO2016065001 SEQ ID NO: 85 |
| 6.6 | | |
| AAV CHt- | 853 | WO2016065001 SEQ ID NO: 86 |
| 6.7 | | |
| AAV CHt- | 854 | WO2016065001 SEQ ID NO: 87 |
| 6.8 | | |
| AAV CSp- | 855 | WO2016065001 SEQ ID NO: 88 |
| 8.10 | | |
| AAV CSp- | 856 | WO2016i65001 SEQ ID NO: 89 |
| 8.2 | | |
| AAV CSp- | 857 | WO2016065001 SEQ ID NO: 90 |
| 8.4 | | |
| AAVTSp- | 858 | WO2016065001 SEQ ID NO: 91 |
| 8.5 | | |
| AAV CSp- | 859 | WO2016065001 SEQ ID NO: 92 |
| 8.6 | | |
| AAV CSp- | 860 | WO2016065001 SEQ ID NO: 93 |
| 8.7 | | |
| AAV CSp- | 861 | WO2016065001 SEQ ID NO: 94 |
| 8.8 | | |
| AAV CSp- | 862 | WO2016065001 SEQ ID NO: 95 |
| 8.9 | | |
| AAV CBr- | 863 | WO2016065001 SEQ ID NO: 96 |
| B7.3 | | |
| AAV CBr- | 864 | WO2016065001 SEQ ID NO: 97 |
| B7.4 | | |
| AAV3B | 865 | WO2016065001 SEQ ID NO: 98 |
| AAV4 | 866 | WO2016065001 SEQ ID NO: 99 |
| AAV5 | 867 | WO2016065001 SEQ ID NO: 100 |
| AAVPHP.B | 868 | WO2015038958 SEQ ID NO: 8 and 13, |
| or G2B-26 | | GenBankALU85156.1 |
| AAVPHP.B | 869 | WO2015038958 SEQ ID NO: 9 |
| AAVG2B-13 | 870 | WO2015038958 SEQ ID NO: 12 |
| AAVTH1.1- | 871 | WO2015038958 SEQ ID NO: 14 |
| 32 | | |
| AAVTH1.1- | 872 | WO2015038958 SEQ ID NO: 15 |
| 35 | | |
| PHP.N/ | 1439 | WO2017100671 SEQ ID NO: 46 |
| PHP.B-DGT | | |
| PHP.S/ | 1440 | WO2017100671 SEQ ID NO: 47 |
| G2A12 | | |
| AAV9/hu.14 | 1441 | WO2017100671 SEQ ID NO: 45 |
| K449R | | |
| GPV | 1518 | US9624274B2 SEQ ID NO: 192 |
| B19 | 1519 | US9624274B2 SEQ ID NO: 193 |
| MVM | 1520 | US9624274B2 SEQ ID NO: 194 |
| FPV | 1521 | US9624274B2 SEQ ID NO: 195 |
| CPV | 1522 | US9624274B2 SEQ ID NO: 196 |
| AAV6 | 1523 | US9546112B2 SEQ ID NO: 5 |
| AAV6 | 1524 | US9457103B2 SEQ ID NO: 1 |
| AAV2 | 1525 | US9457103B2 SEQ ID NO: 2 |
| ShH10 | 1526 | US9457103B2 SEQ ID NO: 3 |
| ShH13 | 1527 | US9457103B2 SEQ ID NO: 4 |
| ShH10 | 1528 | US9457103B2 SEQ ID NO: 5 |
| ShH10 | 1529 | US9457103B2 SEQ ID NO: 6 |
| ShH10 | 1530 | US9457103B2 SEQ ID NO: 7 |
| ShH10 | 1531 | US9457103B2 SEQ ID NO: 8 |
| ShH10 | 1532 | US9457103B2 SEQ ID NO: 9 |
| rh74 | 1533 | US9434928B2 SEQ ID NO: 1, |
| | | US2015023924A1 SEQ ID NO: 2 |
| rh74 | 1534 | US9434928B2 SEQ ID NO: 2, |
| | | US2015023924A1 SEQ ID NO: 1 |
| AAV8 | 1535 | US9434928B2 SEQ ID NO: 4 |
| rh74 | 1536 | US9434928B2 SEQ ID NO: 5 |
| rh74 | 1537 | US2015023924A1 SEQ ID NO: 5, |
| (RHM4-1) | | US20160375110A1 SEQ ID NO: 4 |
| rh74 | 1538 | US2015023924A1 SEQ ID NO: 6, |
| (RHM15-1) | | US20160375110A1 SEQ ID NO: 5 |
| rh74 | 1539 | US2015023924A1 SEQ ID NO: 7, |
| (RHM15-2) | | US20160375110A1 SEQ ID NO: 6 |
| rh74 | 1540 | US2015023924A1 SEQ ID NO: 8, |
| (RHM15- | | US20160375110A1 SEQ ID NO: 7 |
| 3/RHM15-5) | | |
| rh74 | 1541 | US2015023924A1 SEQ ID NO: 9, |
| (RHM15-4) | | US20160375110A1 SEQ ID NO: 8 |
| rh74 | 1542 | US2015023924A1 SEQ ID NO: 10, |
| (RHM15-6) | | US20160375110A1 SEQ ID NO: 9 |
| rh74 | 1543 | US2015023924A1 SEQ ID NO: 11 |
| (RHM4-1) | | |
| rh74 | 1544 | US2015023924A1 SEQ ID NO: 12 |
| (RHM15-1) | | |
| rh74 | 1545 | US2015023924A1 SEQ ID NO: 13 |
| (RHM15-2) | | |
| rh74 | 1546 | US2015023924A1 SEQ ID NO: 14 |
| (RHM15- | | |
| 3/RHM15-5) | | |
| rh74 | 1547 | US2015023924A1 SEQ ID NO: 15 |
| (RHM15-4) | | |
| rh74 | 1548 | US2015023924A1 SEQ ID NO: 16 |
| (RHM15-6) | | |
| AAV2 | 1549 | US20160175389A1 SEQ ID NO: 9 |
| (comprising | | |
| lung specific | | |
| polypeptide) | | |
| AAV2 | 1550 | US20160175389A1 SEQ ID NO: 10 |
| (comprising | | |
| lung specific | | |
| polypeptide) | | |
| Anc80 | 1551 | US20170051257A1 SEQ ID NO: 1 |
| Anc80 | 1552 | US20170051257A1 SEQ ID NO: 2 |
| Anc81 | 1553 | US20170051257A1 SEQ ID NO: 3 |
| Anc80 | 1554 | US20170051257A1 SEQ ID NO: 4 |
| Anc82 | 1555 | US20170051257A1 SEQ ID NO: 5 |
| Anc82 | 1556 | US20170051257A1 SEQ ID NO: 6 |
| Anc83 | 1557 | US20170051257A1 SEQ ID NO: 7 |
| Anc83 | 1558 | US20170051257A1 SEQ ID NO: 8 |
| Anc84 | 1559 | US20170051257A1 SEQ ID NO: 9 |
| Anc84 | 1560 | US20170051257A1 SEQ ID NO: 10 |
| Anc94 | 1561 | US20170051257A1 SEQ ID NO: 11 |
| Anc94 | 1562 | US20170051257A1 SEQ ID NO: 12 |
| Anc113 | 1563 | US20170051257A1 SEQ ID NO: 13 |
| Anc113 | 1564 | US20170051257A1 SEQ ID NO: 14 |
| Anc126 | 1565 | US20170051257A1 SEQ ID NO: 15 |
| Anc126 | 1566 | US20170051257A1 SEQ ID NO: 16 |
| Anc127 | 1567 | US20170051257A1 SEQ ID NO: 17 |
| Anc127 | 1568 | US20170051257A1 SEQ ID NO: 18 |
| Anc80L27 | 1569 | US20170051257A1 SEQ ID NO: 19 |
| Anc80L59 | 1570 | US20170051257A1 SEQ ID NO: 20 |
| Anc80L60 | 1571 | US20170051257A1 SEQ ID NO: 21 |
| Anc80L62 | 1572 | US20170051257A1 SEQ ID NO: 22 |
| Anc80L65 | 1573 | US20170051257A1 SEQ ID NO: 23 |
| Anc80L33 | 1574 | US20170051257A1 SEQ ID NO: 24 |
| Anc80L36 | 1575 | US20170051257A1 SEQ ID NO: 25 |
| Anc80L44 | 1576 | US20170051257A1 SEQ ID NO: 26 |
| Anc80L1 | 1577 | US20170051257A1 SEQ ID NO: 35 |
| Anc80L1 | 1578 | US20170051257A1 SEQ ID NO: 36 |
| AAV-X1 | 1579 | US8283151B2 SEQ ID NO: 11 |
| AAV-X1b | 1580 | US8283151B2 SEQ ID NO: 12 |
| AAV-X5 | 1581 | US8283151B2 SEQ ID NO: 13 |
| AAV-X19 | 1582 | US8283151B2 SEQ ID NO: 14 |
| AAV-X21 | 1583 | US8283151B2 SEQ ID NO: 15 |
| AAV-X22 | 1584 | US8283151B2 SEQ ID NO: 16 |
| AAV-X23 | 1585 | US8283151B2 SEQ ID NO: 17 |
| AAV-X24 | 1586 | US8283151B2 SEQ ID NO: 18 |
| AAV-X25 | 1587 | US8283151B2 SEQ ID NO: 19 |
| AAV-X26 | 1588 | US8283151B2 SEQ ID NO: 20 |
| AAV-X1 | 1589 | US8283151B2 SEQ ID NO: 21 |
| AAV-X1b | 1590 | US8283151B2 SEQ ID NO: 22 |
| AAV-X5 | 1591 | US8283151B2 SEQ ID NO: 23 |
| AAV-X19 | 1592 | US8283151B2 SEQ ID NO: 24 |
| AAV-X21 | 1593 | US8283151B2 SEQ ID NO: 25 |
| AAV-X22 | 1594 | US8283151B2 SEQ ID NO: 26 |
| AAV-X23 | 1595 | US8283151B2 SEQ ID NO: 27 |
| AAV-X24 | 1596 | US8283151B2 SEQ ID NO: 28 |
| AAV-X25 | 1597 | US8283151B2 SEQ ID NO: 29 |
| AAV-X26 | 1598 | US8283151B2 SEQ ID NO: 30 |
| AAVrh8 | 1599 | WO2016054554A1 SEQ ID NO: 8 |
| AAVrh8VP2 | 1600 | WO2016054554A1 SEQ ID NO: 9 |
| FCS | | |
| AAVrh8VP2 | 1601 | WO2016054554A1 SEQ ID NO: 10 |
| FC44 | | |
| AAVrh8VP2 | 1602 | WO2016054554A1 SEQ ID NO: 11 |
| ApoB100 | | |
| AAVrh8VP2 | 1603 | WO2016054554A1 SEQ ID NO: 12 |
| RVG | | |
| AAVrh8VP2 | 1604 | WO2016054554A1 SEQ ID NO: 13 |
| Angiopep-2 | | |
| VP2 | | |
| AAV9.47VP | 1605 | WO2016054554A1 SEQ ID NO: 14 |
| 1.3 | | |
| AAV9.47VP | 1606 | WO2016054554A1 SEQ ID NO: 15 |
| 2ICAMg3 | | |
| AAV9.47VP | 1607 | WO2016054554A1 SEQ ID NO: 16 |
| 2RVG | | |
| AAV9.47VP | 1608 | WO2016054554A1 SEQ ID NO: 17 |
| 2Angiopep-2 | | |
| AAV9.47VP | 1609 | WO2016054554A1 SEQ ID NO: 18 |
| 2A-string | | |
| AAVrh8VP2 | 1610 | WO2016054554A1 SEQ ID NO: 19 |
| FC5 VP2 | | |
| AAVrh8VP2 | 1611 | WO2016054554A1 SEQ ID NO: 20 |
| FC44 VP2 | | |
| AAVrh8VP2 | 1612 | WO2016054554A1 SEQ ID NO: 21 |
| ApoB100 | | |
| VP2 | | |
| AAVrh8VP2 | 1613 | WO2016054554A1 SEQ ID NO: 22 |
| RVG VP2 | | |
| AAVrh8VP2 | 1614 | WO2016054554A1 SEQ ID NO: 23 |
| Angiopep-2 | | |
| VP2 | | |
| AAV9.47VP | 1615 | WO2016054554A1 SEQ ID NO: 24 |
| 2ICAMg3 | | |
| VP2 | | |
| AAV9.47VP | 1616 | WO2016054554A1 SEQ ID NO: 25 |
| 2RVG VP2 | | |
| AAV9.47VP | 1617 | WO2016054554A1 SEQ ID NO: 26 |
| 2Angiopep-2 | | |
| VP2 | | |
| AAV9.47VP | 1618 | WO2016054554A1 SEQ ID NO: 27 |
| 2A-string | | |
| VP2 | | |
| rAAV-B1 | 1619 | WO2016054557A1 SEQ ID NO: 1 |
| rAAV-B2 | 1620 | WO2016054557A1 SEQ ID NO: 2 |
| rAAV-B3 | 1621 | WO2016054557A1 SEQ ID NO: 3 |
| rAAV-B4 | 1622 | WO2016054557A1 SEQ ID NO: 4 |
| rAAV-B1 | 1623 | WO2016054557A1 SEQ ID NO: 5 |
| rAAV-B2 | 1624 | WO2016054557A1 SEQ ID NO: 6 |
| rAAV-B3 | 1625 | WO2016054557A1 SEQ ID NO: 7 |
| rAAV-B4 | 1626 | WO2016054557A1 SEQ ID NO: 8 |
| rAAV-L1 | 1627 | WO2016054557A1 SEQ ID NO: 9 |
| rAAV-L2 | 1628 | WO2016054557A1 SEQ ID NO: 10 |
| rAAV-L3 | 1629 | WO2016054557A1 SEQ ID NO: 11 |
| rAAV-L4 | 1630 | WO2016054557A1 SEQ ID NO: 12 |
| rAAV-L1 | 1631 | WO2016054557A1 SEQ ID NO: 13 |
| rAAV-L2 | 1632 | WO2016054557A1 SEQ ID NO: 14 |
| rAAV-L3 | 1633 | WO2016054557A1 SEQ ID NO: 15 |
| rAAV-L4 | 1634 | WO2016054557A1 SEQ ID NO: 16 |
| AAV9 | 1635 | WO2016073739A1 SEQ ID NO: 3 |
| rAAV | 1636 | WO2016081811A1 SEQ ID NO: 1 |
| rAAV | 1637 | WO2016081811A1 SEQ ID NO: 2 |
| rAAV | 1638 | WO2016081811A1 SEQ ID NO: 3 |
| rAAV | 1639 | WO2016081811A1 SEQ ID NO: 4 |
| rAAV | 1640 | WO2016081811A1 SEQ ID NO: 5 |
| rAAV | 1641 | WO2016081811A1 SEQ ID NO: 6 |
| rAAV | 1642 | WO2016081811A1 SEQ ID NO: 7 |
| rAAV | 1643 | WO2016081811A1 SEQ ID NO: 8 |
| rAAV | 1644 | WO2016081811A1 SEQ ID NO: 9 |
| rAAV | 1645 | WO2016081811A1 SEQ ID NO: 10 |
| rAAV | 1646 | WO2016081811A1 SEQ ID NO: 11 |
| rAAV | 1647 | WO2016081811A1 SEQ ID NO: 12 |
| rAAV | 1648 | WO2016081811A1 SEQ ID NO: 13 |
| rAAV | 1649 | WO2016081811A1 SEQ ID NO: 14 |
| rAAV | 1650 | WO2016081811A1 SEQ ID NO: 15 |
| rAAV | 1651 | WO2016081811A1 SEQ ID NO: 16 |
| rAAV | 1652 | WO2016081811A1 SEQ ID NO: 17 |
| rAAV | 1653 | WO2016081811A1 SEQ ID NO: 18 |
| rAAV | 1654 | WO2016081811A1 SEQ ID NO: 19 |
| rAAV | 1655 | WO2016081811A1 SEQ ID NO: 20 |
| rAAV | 1656 | WO2016081811A1 SEQ ID NO: 21 |
| rAAV | 1657 | WO2016081811A1 SEQ ID NO: 22 |
| rAAV | 1658 | WO2016081811A1 SEQ ID NO: 23 |
| rAAV | 1659 | WO2016081811A1 SEQ ID NO: 24 |
| rAAV | 1660 | WO2016081811A1 SEQ ID NO: 25 |
| rAAV | 1661 | WO2016081811A1 SEQ ID NO: 26 |
| rAAV | 1662 | WO2016081811A1 SEQ ID NO: 27 |
| rAAV | 1663 | WO2016081811A1 SEQ ID NO: 28 |
| rAAV | 1664 | WO2016081811A1 SEQ ID NO: 29 |
| rAAV | 1665 | WO2016081811A1 SEQ ID NO: 30 |
| rAAV | 1666 | WO2016081811A1 SEQ ID NO: 31 |
| rAAV | 1667 | WO2016081811A1 SEQ ID NO: 32 |
| rAAV | 1668 | WO2016081811A1 SEQ ID NO: 33 |
| rAAV | 1669 | WO2016081811A1 SEQ ID NO: 34 |
| rAAV | 1670 | WO2016081811A1 SEQ ID NO: 35 |
| rAAV | 1671 | WO2016081811A1 SEQ ID NO: 36 |
| rAAV | 1672 | WO2016081811A1 SEQ ID NO: 37 |
| rAAV | 1673 | WO2016081811A1 SEQ ID NO: 38 |
| rAAV | 1674 | WO2016081811A1 SEQ ID NO: 39 |
| rAAV | 1675 | WO2016081811A1 SEQ ID NO: 40 |
| rAAV | 1676 | WO2016081811A1 SEQ ID NO: 41 |
| rAAV | 1677 | WO2016081811A1 SEQ ID NO: 42 |
| rAAV | 1678 | WO2016081811A1 SEQ ID NO: 43 |
| rAAV | 1679 | WO2016081811A1 SEQ ID NO: 44 |
| rAAV | 1680 | WO2016081811A1 SEQ ID NO: 45 |
| rAAV | 1681 | WO2016081811A1 SEQ ID NO: 46 |
| rAAV | 1682 | WO2016081811A1 SEQ ID NO: 47 |
| rAAV | 1683 | WO2016081811A1 SEQ ID NO: 48 |
| rAAV | 1684 | WO2016081811A1 SEQ ID NO: 49 |
| rAAV | 1685 | WO2016081811A1 SEQ ID NO: 50 |
| rAAV | 1686 | WO2016081811A1 SEQ ID NO: 51 |
| rAAV | 1687 | WO2016081811A1 SEQ ID NO: 52 |
| rAAV | 1688 | WO2016081811A1 SEQ ID NO: 53 |
| rAAV | 1689 | WO2016081811A1 SEQ ID NO: 54 |
| rAAV | 1690 | WO2016081811A1 SEQ ID NO: 55 |
| rAAV | 1691 | WO2016081811A1 SEQ ID NO: 56 |
| rAAV | 1692 | WO2016081811A1 SEQ ID NO: 57 |
| rAAV | 1693 | WO2016081811A1 SEQ ID NO: 58 |
| rAAV | 1694 | WO2016081811A1 SEQ ID NO: 59 |
| rAAV | 1695 | WO2016081811A1 SEQ ID NO: 60 |
| rAAV | 1696 | WO2016081811A1 SEQ ID NO: 61 |
| rAAV | 1697 | WO2016081811A1 SEQ ID NO: 62 |
| rAAV | 1698 | WO2016081811A1 SEQ ID NO: 63 |
| rAAV | 1699 | WO2016081811A1 SEQ ID NO: 64 |
| rAAV | 1700 | WO2016081811A1 SEQ ID NO: 65 |
| rAAV | 1701 | WO2016081811A1 SEQ ID NO: 66 |
| rAAV | 1702 | WO2016081811A1 SEQ ID NO: 67 |
| rAAV | 1703 | WO2016081811A1 SEQ ID NO: 68 |
| rAAV | 1704 | WO2016081811A1 SEQ ID NO: 69 |
| rAAV | 1705 | WO2016081811A1 SEQ ID NO: 70 |
| rAAV | 1706 | WO2016081811A1 SEQ ID NO: 71 |
| rAAV | 1707 | WO2016081811A1 SEQ ID NO: 72 |
| rAAV | 1708 | WO2016081811A1 SEQ ID NO: 73 |
| rAAV | 1709 | WO2016081811A1 SEQ ID NO: 74 |
| rAAV | 1710 | WO2016081811A1 SEQ ID NO: 75 |
| rAAV | 1711 | WO2016081811A1 SEQ ID NO: 76 |
| rAAV | 1712 | WO2016081811A1 SEQ ID NO: 77 |
| rAAV | 1713 | WO2016081811A1 SEQ ID NO: 78 |
| rAAV | 1714 | WO2016081811A1 SEQ ID NO: 79 |
| rAAV | 1715 | WO2016081811A1 SEQ ID NO: 80 |
| rAAV | 1716 | WO2016081811A1 SEQ ID NO: 81 |
| rAAV | 1717 | WO2016081811A1 SEQ ID NO: 82 |
| rAAV | 1718 | WO2016081811A1 SEQ ID NO: 83 |
| rAAV | 1719 | WO2016081811A1 SEQ ID NO: 84 |
| rAAV | 1720 | WO2016081811A1 SEQ ID NO: 85 |
| rAAV | 1721 | WO2016081811A1 SEQ ID NO: 86 |
| rAAV | 1722 | WO2016081811A1 SEQ ID NO: 87 |
| rAAV | 1723 | WO2016081811A1 SEQ ID NO: 88 |
| rAAV | 1724 | WO2016081811A1 SEQ ID NO: 89 |
| rAAV | 1725 | WO2016081811A1 SEQ ID NO: 90 |
| rAAV | 1726 | WO2016081811A1 SEQ ID NO: 91 |
| rAAV | 1727 | WO2016081811A1 SEQ ID NO: 92 |
| rAAV | 1728 | WO2016081811A1 SEQ ID NO: 93 |
| rAAV | 1729 | WO2016081811A1 SEQ ID NO: 94 |
| rAAV | 1730 | WO2016081811A1 SEQ ID NO: 95 |
| rAAV | 1731 | WO2016081811A1 SEQ ID NO: 96 |
| rAAV | 1732 | WO2016081811A1 SEQ ID NO: 97 |
| rAAV | 1733 | WO2016081811A1 SEQ ID NO: 98 |
| rAAV | 1734 | WO2016081811A1 SEQ ID NO: 99 |
| rAAV | 1735 | WO2016081811A1 SEQ ID NO: 100 |
| rAAV | 1736 | WO2016081811A1 SEQ ID NO: 101 |
| rAAV | 1737 | WO2016081811A1 SEQ ID NO: 102 |
| rAAV | 1738 | WO2016081811A1 SEQ ID NO: 103 |
| rAAV | 1739 | WO2016081811A1 SEQ ID NO: 104 |
| rAAV | 1740 | WO2016081811A1 SEQ ID NO: 105 |
| rAAV | 1741 | WO2016081811A1 SEQ ID NO: 106 |
| rAAV | 1742 | WO2016081811A1 SEQ ID NO: 107 |
| rAAV | 1743 | WO2016081811A1 SEQ ID NO: 108 |
| rAAV | 1744 | WO2016081811A1 SEQ ID NO: 109 |
| rAAV | 1745 | WO2016081811A1 SEQ ID NO: 110 |
| rAAV | 1746 | WO2016081811A1 SEQ ID NO: 111 |
| rAAV | 1747 | WO2016081811A1 SEQ ID NO: 112 |
| rAAV | 1748 | WO2016081811A1 SEQ ID NO: 113 |
| rAAV | 1749 | WO2016081811A1 SEQ ID NO: 114 |
| rAAV | 1750 | WO2016081811A1 SEQ ID NO: 115 |
| rAAV | 1751 | WO2016081811A1 SEQ ID NO: 116 |
| rAAV | 1752 | WO2016081811A1 SEQ ID NO: 117 |
| rAAV | 1753 | WO2016081811A1 SEQ ID NO: 118 |
| rAAV | 1754 | WO2016081811A1 SEQ ID NO: 119 |
| rAAV | 1755 | WO2016081811A1 SEQ ID NO: 120 |
| rAAV | 1756 | WO2016081811A1 SEQ ID NO: 121 |
| rAAV | 1757 | WO2016081811A1 SEQ ID NO: 122 |
| rAAV | 1758 | WO2016081811A1 SEQ ID NO: 123 |
| rAAV | 1759 | WO2016081811A1 SEQ ID NO: 124 |
| rAAV | 1760 | WO2016081811A1 SEQ ID NO: 125 |
| rAAV | 1761 | WO2016081811A1 SEQ ID NO: 126 |
| rAAV | 1762 | WO2016081811A1 SEQ ID NO: 127 |
| rAAV | 1763 | WO2016081811A1 SEQ ID NO: 128 |
| AAV8 | 1764 | WO2016081811A1 SEQ ID NO: 133 |
| E532K | | |
| AAV8 | 1765 | WO2016081811A1 SEQ ID NO: 134 |
| E532K | | |
| rAAV4 | 1766 | WO2016115382A1 SEQ ID NO: 2 |
| rAAV4 | 1767 | WO2016115382A1 SEQ ID NO: 3 |
| rAAV4 | 1768 | WO2016115382A1 SEQ ID NO: 4 |
| rAAV4 | 1769 | WO2016115382A1 SEQ ID NO: 5 |
| rAAV4 | 1770 | WO2016115382A1 SEQ ID NO: 6 |
| rAAV4 | 1771 | WO2016115382A1 SEQ ID NO: 7 |
| rAAV4 | 1772 | WO2016115382A1 SEQ ID NO: 8 |
| rAAV4 | 1773 | WO2016115382A1 SEQ ID NO: 9 |
| rAAV4 | 1774 | WO2016115382A1 SEQ ID NO: 10 |
| rAAV4 | 1775 | WO2016115382A1 SEQ ID NO: 11 |
| rAAV4 | 1776 | WO2016115382A1 SEQ ID NO: 12 |
| rAAV4 | 1777 | WO2016115382A1 SEQ ID NO: 13 |
| rAAV4 | 1778 | WO2016115382A1 SEQ ID NO: 14 |
| rAAV4 | 1779 | WO2016115382A1 SEQ ID NO: 15 |
| rAAV4 | 1780 | WO2016115382A1 SEQ ID NO: 16 |
| rAAV4 | 1781 | WO2016115382A1 SEQ ID NO: 17 |
| rAAV4 | 1782 | WO2016115382A1 SEQ ID NO: 18 |
| rAAV4 | 1783 | WO2016115382A1 SEQ ID NO: 19 |
| rAAV4 | 1784 | WO2016115382A1 SEQ ID NO: 20 |
| rAAV4 | 1785 | WO2016115382A1 SEQ ID NO: 21 |
| AAV11 | 1786 | WO2016115382A1 SEQ ID NO: 22 |
| AAV12 | 1787 | WO2016115382A1 SEQ ID NO: 23 |
| rh32 | 1788 | WO2016115382A1 SEQ ID NO: 25 |
| rh33 | 1789 | WO2016115382A1 SEQ ID NO: 26 |
| rh34 | 1790 | WO2016115382A1 SEQ ID NO: 27 |
| rAAV4 | 1791 | WO2016115382A1 SEQ ID NO: 28 |
| rAAV4 | 1792 | WO2016115382A1 SEQ ID NO: 29 |
| rAAV4 | 1793 | WO2016115382A1 SEQ ID NO: 30 |
| rAAV4 | 1794 | WO2016115382A1 SEQ ID NO: 31 |
| rAAV4 | 1795 | WO2016115382A1 SEQ ID NO: 32 |
| rAAV4 | 1796 | WO2016115382A1 SEQ ID NO: 33 |
| AAV2/8 | 1797 | WO2016115382A1 SEQ ID NO: 47 |
| AAV2/8 | 1798 | WO2016115382A1 SEQ ID NO: 48 |
| ancestral | 1799 | WO2016154344A1 SEQ ID NO: 7 |
| AAV | | |
| ancestral | 1800 | WO2016154344A1 SEQ ID NO: 13 |
| AAV variant | | |
| C4 | | |
| ancestral | 1801 | WO2016154344A1 SEQ ID NO: 14 |
| AAV variant | | |
| C7 | | |
| ancestral | 1802 | WO2016154344A1 SEQ ID NO: 15 |
| AAV variant | | |
| G4 | | |
| consensus | 1803 | WO2016154344A1 SEQ ID NO: 16 |
| amino acid | | |
| sequence of | | |
| ancestral | | |
| AAV | | |
| variants, C4, | | |
| C7 and G4 | | |
| consensus | 1804 | WO2016154344A1 SEQ ID NO: 17 |
| amino acid | | |
| sequence of | | |
| ancestral | | |
| AAV | | |
| variants, C4 | | |
| and C7 | | |
| AAV8 (with | 1805 | WO2016150403A1 SEQ ID NO: 13 |
| a AAV2 | | |
| phospholipase | | |
| domain) | | |
| AAV VR- | 1806 | US20160289275A1 SEQ ID NO: 10 |
| 942n | | |
| AAV5-A | 1807 | US20160289275A1 SEQ ID NO: 13 |
| (M569V) | | |
| AAV5-A | 1808 | US20160289275A1 SEQ ID NO: 14 |
| (M569V) | | |
| AAV5-A | 1809 | US20160289275A1 SEQ ID NO: 16 |
| (Y585V) | | |
| AAV5-A | 1810 | US20160289275A1 SEQ ID NO: 17 |
| (Y585V) | | |
| AAV5-A | 1811 | US20160289275A1 SEQ ID NO: 19 |
| (L587T) | | |
| AAV5-A | 1812 | US20160289275A1 SEQ ID NO: 20 |
| (L587T) | | |
| AAV5-A | 1813 | US20160289275A1 SEQ ID NO: 22 |
| (Y585V/ | | |
| L587T) | | |
| AAV5-A | 1814 | US20160289275A1 SEQ ID NO: 23 |
| (Y585V/ | | |
| L587T) | | |
| AAV5-B | 1815 | US20160289275A1 SEQ ID NO: 25 |
| (D652.A) | | |
| AAV5-B | 1816 | US20160289275A1 SEQ ID NO: 26 |
| (D652A) | | |
| AAV5-B | 1817 | US20160289275A1 SEQ ID NO: 28 |
| (T362M) | | |
| AAV5-B | 1818 | US20160289275A1 SEQ ID NO: 29 |
| (T362M) | | |
| AAV5-B | 1819 | US20160289275A1 SEQ ID NO: 31 |
| (Q359D) | | |
| AAV5-B | 1820 | US20160289275A1 SEQ ID NO: 32 |
| (Q359D) | | |
| AAV5-B | 1821 | US20160289275A1 SEQ ID NO: 34 |
| (E350Q) | | |
| AAV5-B | 1822 | US20160289275A1 SEQ ID NO: 35 |
| (E350Q) | | |
| AAV5-B | 1823 | US20160289275A1 SEQ ID NO: 37 |
| (P533S) | | |
| AAV5-B | 1824 | US20160289275A1 SEQ ID NO: 38 |
| (P533S) | | |
| AAV5-B | 1825 | US20160289275A1 SEQ ID NO: 40 |
| (P533G) | | |
| AAV5B | 1826 | US20160289275A1 SEQ ID NO: 41 |
| (P533G) | | |
| AAV5- | 1827 | US20160289275A1 SEQ ID NO: 43 |
| mutation in | | |
| loop VII | | |
| AAV5- | 1828 | US20160289275A1 SEQ ID NO: 44 |
| mutation in | | |
| loop VII | | |
| AAV8 | 1829 | US20160289275A1 SEQ ID NO: 47 |
| Mut A | 1830 | WO2016181123A1 SEQ ID NO: 1 |
| (LK03/AAV8) | | |
| Mut B | 1831 | WO2016181123A1 SEQ ID NO: 2 |
| (LK03/AAV5) | | |
| Mut C | 1832 | WO2016181123A1 SEQ ID NO: 3 |
| (AAV8/ | | |
| AAV3B) | | |
| Mut D | 1833 | WO2016181123A1 SEQ ID NO: 4 |
| (AAV5/ | | |
| AAV3E) | | |
| Mut E | 1834 | WO2016181123A1 SEQ ID NO: 5 |
| (AAV8/ | | |
| AAV3B) | | |
| Mut F | 1835 | WO2016181123A1 SEQ ID NO: 6 |
| (AAV3B/ | | |
| AAV8) | | |
| AAV44.9 | 1836 | WO2016183297A1 SEQ ID NO: 4 |
| AAV44.9 | 1837 | WO2016183297A1 SEQ ID NO: 5 |
| AAVrh8 | 1838 | WO2016183297A1 SEQ ID NO: 6 |
| AAV44.9 | 1839 | WO2016183297A1 SEQ ID NO: 9 |
| (S470N) | | |
| rh74 VP1 | 1840 | US20160375110A1 SEQ ID NO: 1 |
| AAV-LK03 | 1841 | WO2017015102A1 SEQ ID NO: 5 |
| (L125I) | | |
| AAV3B | 1842 | WO2017015102A1 SEQ ID NO: 6 |
| (S663V + | | |
| T492V) | | |
| Anc80 | 1843 | WO2017019994A2 SEQ ID NO: 1 |
| Anc80 | 1844 | WO2017019994A2 SEQ ID NO: 2 |
| Anc81 | 1845 | WO2017019994A2 SEQ ID NO: 3 |
| Anc81 | 1846 | WO2017019994A2 SEQ ID NO: 4 |
| Anc82 | 1847 | WO2017019994A2 SEQ ID NO: 5 |
| Anc82 | 1848 | WO2017019994A2 SEQ ID NO: 6 |
| Anc83 | 1849 | WO2017019994A2 SEQ ID NO: 7 |
| Anc83 | 1850 | WO2017019994A2 SEQ ID NO: 8 |
| Anc84 | 1851 | WO2017019994A2 SEQ ID NO: 9 |
| Anc84 | 1852 | WO2017019994A2 SEQ ID NO: 10 |
| Anc94 | 1853 | WO2017019994A2 SEQ ID NO: 11 |
| Anc94 | 1854 | WO2017019994A2 SEQ ID NO: 12 |
| Anc113 | 1855 | WO2017019994A2 SEQ ID NO: 13 |
| Anc113 | 1856 | WO2017019994A2 SEQ ID NO: 14 |
| Anc126 | 1857 | WO2017019994A2 SEQ ID NO: 15 |
| Anc126 | 1858 | WO2017019994A2 SEQ ID NO: 16 |
| Anc127 | 1859 | WO2017019994A2 SEQ ID NO: 17 |
| Anc127 | 1860 | WO2017019994A2 SEQ ID NO: 18 |
| Anc80L27 | 1861 | WO2017019994A2 SEQ ID NO: 19 |
| Anc80L59 | 1862 | WO2017019994A2 SEQ ID NO: 20 |
| Anc80L60 | 1863 | WO2017019994A2 SEQ ID NO: 21 |
| Anc80L62 | 1864 | WO2017019994A2 SEQ ID NO: 22 |
| Anc80L65 | 1865 | WO2017019994A2 SEQ ID NO: 23 |
| Anc80L33 | 1866 | WO2017019994A2 SEQ ID NO: 24 |
| Anc80L36 | 1867 | WO2017019994A2 SEQ ID NO: 25 |
| Am80L44 | 1868 | WO2017019994A2 SEQ ID NO: 26 |
| Anc80L1 | 1869 | WO2017019994A2 SEQ ID NO: 35 |
| Anc80LI | 1870 | WO2017019994A2 SEQ ID NO: 36 |
| AAVrh10 | 1871 | WO2017019994A2 SEQ ID NO: 41 |
| Anc110 | 1872 | WO2017019994A2 SEQ ID NO: 42 |
| Anc110 | 1873 | WO2017019994A2 SEQ ID NO: 43 |
| AAVrh32.33 | 1874 | WO2017019994A2 SEQ ID NO: 45 |
| AAVrh74 | 1875 | WO2017049031A1 SEQ ID NO: 1 |
| AAV2 | 1876 | WO2017053629A2 SEQ ID NO: 49 |
| AAV2 | 1877 | WO2017053629A2 SEQ ID NO: 50 |
| AAV2 | 1878 | WO2017053629A2 SEQ ID NO: 82 |
| Parvo-like | 1879 | WO2017070476A2 SEQ ID NO: 1 |
| virus | | |
| Parvo-like | 1880 | WO2017070476A2 SEQ ID NO: 2 |
| virus | | |
| Parvo-like | 1881 | WO2017070476A2 SEQ ID NO: 3 |
| virus | | |
| Parvo-like | 1882 | WO2017070476A2 SEQ ID NO: 4 |
| virus | | |
| Parvo-like | 1883 | WO2017070476A2 SEQ ID NO: 5 |
| virus | | |
| Parvo-like | 1884 | WO2017070476A2 SEQ ID NO: 6 |
| vints | | |
| AAVrh.10 | 1885 | WO2017070516A1 SEQ ID NO: 7 |
| AAVrh.10 | 1886 | WO2017070516A1 SEQ ID NO: 14 |
| AAV2tYF | 1887 | WO2017070491A1 SEQ ID NO: 1 |
| AAV-SPK | 1888 | WO2017075619A1 SEQ ID NO: 28 |
| AAV2.5 | 1889 | US20170128528A1 SEQ ID NO: 13 |
| AAV1.1 | 1890 | US20170128528A1 SEQ ID NO: 15 |
| AAV6.1 | 1891 | US20170128528A1 SEQ ID NO: 17 |
| AAV6.3.1 | 1892 | US20170128528A1 SEQ ID NO: 18 |
| AAV2i8 | 1893 | US20170128528A1 SEQ ID NO: 28 |
| AAV2i8 | 1894 | US20170128528A1 SEQ ID NO: 29 |
| ttAAV | 1895 | US20170128528A1 SEQ ID NO: 30 |
| ttAAV- | 1896 | U820170128528A1 SEQ ID NO: 32 |
| S312N | | |
| ttAAV- | 1897 | US20170128528A1 SEQ ID NO: 33 |
| S312N | | |
| AAV6 | 1898 | WO2016134337A1 SEQ ID NO: 24 |
| (Y705, Y731, | | |
| and T492) | | |
| AAV2 | 1899 | WO2016134375A1 SEQ ID NO: 9 |
| AAV2 | 1900 | WO2016134375A1 SEQ ID NO: 10 |

[0098] Each of the patents, applications and/or publications listed in Table 1 are hereby incorporated by reference in their entirety.

[0099] In one embodiment, the AAV serotype may be, or may have a sequence as described in International Patent Publication WO2015038958, the contents of which are herein incorporated by reference in their entirety, such as, but not limited to, AAV9 (SEQ ID NO: 2 and 11 of WO2015038958 or SEQ ID NO: 127 and 126 respectively herein), PHP.B (SEQ ID NO: 8 and 9 of WO2015038958, herein SEQ ID NO: 868 and 869). G2B-13 (SEQ ID NO: 12 of WO2015038958, herein SEQ ID NO: 870), G2B-26 (SEQ ID NO: 13 of WO2015038958, herein SEQ ID NO: 868 and 869), TH1.1-32 (SEQ ID NO: 14 of WO2015038958, herein SEQ ID NO: 871), TH1.1-35 (SEQ ID NO: 15 of WO2015038958, herein SEQ ID NO: 872) or variants thereof. Further, any of the targeting peptides or amino acid inserts described in WO2015038958, may be inserted into any parent AAV serotype, such as, but not limited to, AAV9 (SEQ ID NO: 126 for the DNA sequence and SEQ ID NO: 127 for the amino acid sequence). In one embodiment, the amino acid insert is inserted between amino acids 586-592 of the parent AAV (e.g., AAV9). In another embodiment, the amino acid insert is inserted between amino acids 588-589 of the parent AAV sequence. The amino acid insert may be, but is not limited to, any of the following amino acid sequences, TLAVPFK (SEQ ID NO: 1 of WO2015038958; herein SEQ ID NO: 873), KFPVALT (SEQ ID NO: 3 of WO2015038958; herein SEQ ID NO: 874), LAVPFK (SEQ ID NO: 31 of WO2015038958; herein SEQ ID NO: 875), AVPFK (SEQ ID NO: 32 of WO2015038958; herein SEQ ID NO: 876), VPFK (SEQ ID NO: 33 of WO2015038958; herein SEQ ID NO: 877), TLAVPF (SEQ ID NO: 34 of WO2015038958; herein SEQ ID NO: 878), TLAVP (SEQ ID NO: 35 of WO2015038958; herein SEQ ID NO: 879), TLAV (SEQ ID NO: 36 of WO2015038958; herein SEQ ID NO: 880), SVSKPFL (SEQ ID NO: 28 of WO2015038958; herein SEQ ID NO: 881), FTLTTPK (SEQ ID NO: 29 of WO2015038958; herein SEQ ID NO: 882), MNATKNV (SEQ ID NO: 30 of WO02015038958; herein SEQ ID NO: 883), QSSQTPR (SEQ ID NO: 54 of WO2015038958; herein SEQ ID NO: 884), ILGTGTS (SEQ ID NO: 55 of WO2015038958, herein SEQ ID NO: 885), TRTNPEA (SEQ ID NO: 56 of WO2015038958; herein SEQ ID NO: 886), NGGTSSS (SEQ ID NO: 58 of WO2015038958; herein SEQ ID NO: 887), or YTLSQGW (SEQ ID NO: 60 of WO2015038958; herein SEQ ID NO: 888). Non-limiting examples of nucleotide sequences that may encode the amino acid inserts include the following, AAGTTTCCTGTGGCGTTGACT (for SEQ ID NO: 3 of WO2015038958; herein SEQ ID NO: 889), ACTTTGGCGGTGCCTTTTAAG (SEQ ID NO: 24 and 49 of WO2015038958; herein SEQ ID NO: 890), AGTGTGAGTAAGCCTTTTTG (SEQ ID NO: 25 of WO2015038958; herein SEQ ID NO: 891), TTTACGTTGACGACGCCTAAG (SEQ ID NO: 26 of WO2015038958; herein SEQ ID NO: 892), ATGAATGCTACGAAGAATGTG (SEQ ID NO: 27 of WO2015038958; herein SEQ ID NO: 893), CAGTCGTCGCAGACGCCTAGG (SEQ ID NO: 48 of WO2015038958; herein SEQ ID NO: 894), ATTCTGGGGACTGGTACTTCG (SEQ ID NO: 50 and 52 of WO2015038958; herein SEQ ID NO: 895), ACGCGGACTAATCCTGAGGCT (SEQ ID NO: 51 of WO2015038958; herein SEQ ID NO: 896), AATGGGGGGACTAGTAGTTCT (SEQ ID NO: 53 of WO2015038958; herein SEQ ID NO: 897), or TATACTTTGTCGCAGGGTGG (SEQ ID NO: 59 of WO2015038958; herein SEQ ID NO: 898).

[0100] In one embodiment, the AAV serotype may be engineered to comprise at least one AAV capsid CD8+ T-cell epitope for AAV2 such as, but not limited to, SADNNNSEY (SEQ ID NO: 899), LIDQYLYYL (SEQ ID NO: 900), VPQYGYLTL (SEQ ID NO: 901), TTSTRTWAL (SEQ ID NO: 902), YHLNGRDSL (SEQ ID NO: 903), SQAVGRSSF (SEQ ID NO: 904), VPANPSTTF (SEQ ID NO: 905), FPQSGVLIF (SEQ ID NO: 906), YFDFNRFHCHFSPRD (SEQ ID NO: 907), VGNSSGNWHCDSTWM (SEQ ID NO: 908), QFSQAGASDIRDQSR (SEQ ID NO: 909), GASDIRQSRNWLP (SEQ ID NO: 910) and GNRQAATADVNTQGV (SEQ ID NO: 911).

[0101] In one embodiment, the AAV serotype may be engineered to comprise at least one AAV capsid CD8+ T-cell epitope for AAV1 such as, but not limited to, LDRLMNPLI (SEQ ID NO: 912), TTSTRTWAL (SEQ ID NO: 902), and QPAKKRLNF (SEQ ID NO: 913)).

[0102] In one embodiment, peptides for inclusion in an AAV serotype may be identified using the methods described by Hui et al. (Molecular Therapy—Methods & Clinical Development (2015) 2, 15029 doi:10.1038/mtm.2015.29; the contents of which are herein incorporated by reference in its entirety). As a non-limiting example, the procedure includes isolating human splenocytes, restimulating the splenocytes in vitro using individual peptides spanning the amino acid sequence of the AAV capsid protein, IFN-gamma ELISpot with the individual peptides used for the in vitro restimulation, bioinformatics analysis to determine the HLA restriction of 15-mers identified by IFN-gamma ELISpot, identification of candidate reactive 9-mer epitopes for a given HLA allele, synthesis candidate 9-mers, second IFN-gamma ELISpot screening of splenocytes from subjects carrying the HLA alleles to which identified AAV epitopes are predicted to bind, determine the AAV capsid-reactive CD8+ T cell epitopes and determine the frequency of subjects reacting to a given AAV epitope.

[0103] In one embodiment, the AAV may be a serotype generated by Cre-recombination-based AAV targeted evolution (CREATE) as described by Deverman et al., (Nature Biotechnology 34(2):204-209 (2016)), the contents of which are herein incorporated by reference in their entirety. In one embodiment, AAV serotypes generated in this manner have improved CNS transduction and/or neuronal and astrocytic tropism, as compared to other AAV serotypes. As non-limiting examples, the AAV serotype may be PHP.B, PHP.B2, PHP.B3, PHP.A, G2A12, G2A15. In one embodiment, these AAV serotypes may be AAV9 (SEQ ID NO: 126 and 127) derivatives with a 7-amino acid insert between amino acids 588-589. Non-limiting examples of these 7-amino acid inserts include TLAVPFK (SEQ ID NO: 873), SVSKPFL (SEQ ID NO: 1249), FTLTTPK (SEQ ID NO: 882), YTLSQGW (SEQ ID NO: 888), QAVRTSL (SEQ ID NO: 1176) and/or LAKERLS (SEQ ID NO: 1177).

[0104] In one embodiment, the AAV serotype may be, or may have a sequence as described in International Patent Publication WO2017100671, the contents of which are herein incorporated by reference in their entirety, such as, but not limited to, AAV9 (SEQ ID NO: 45 of WO2017100671, herein SEQ ID NO: 1441), PHP.N (SEQ ID NO: 46 of WO2017100671, herein SEQ ID NO: 1439), PHP.S (SEQ ID NO: 47 of WO2017100671, herein SEQ ID NO: 1440), or variants thereof. Further, any of the targeting peptides or amino acid inserts described in WO2017100671 may be inserted into any parent AAV serotype, such as, but not limited to, AAV9 (SEQ ID NO: 122 or SEQ ID NO: 1441). In one embodiment, the amino acid insert is inserted between amino acids 586-592 of the parent AAV (e.g., AAV9). In another embodiment, the amino acid insert is inserted between amino acids 588-589 of the parent AAV sequence. The amino acid insert may be, but is not limited to, any of the following amino acid sequences, AQTLAVPFKAQ (SEQ ID NO: 1 of WO2017100671; herein SEQ ID NO: 1442), AQSVSKPFLAQ (SEQ ID NO: 2 of WO2017100671; herein SEQ ID NO: 1443), AQFTLTTPKAQ (SEQ ID NO: 3 in the sequence listing of WO02017100671; herein SEQ ID NO: 1444), DGTLAVPFKAQ (SEQ ID NO: 4 in the sequence listing of WO2017100671; herein SEQ ID NO: 1445), ESTLAVPFKAQ (SEQ ID NO: 5 of WO2017100671; herein SEQ ID NO: 1446), GGTLAVPFKAQ (SEQ ID NO: 6 of WO2017100671; herein SEQ ID NO: 1447), AQTLATPFKAQ (SEQ ID NO: 7 and 33 of WO2017100671; herein SEQ ID NO: 1448), ATTTLATPFKAQ (SEQ ID NO: 8 of WO2017100671; herein SEQ ID NO: 1449), DGTLATPFKAQ (SEQ ID NO: 9 of WO2017100671; herein SEQ ID NO: 1450), GGTLATPFKAQ (SEQ ID NO: 10 of WO2017100671; herein SEQ ID NO: 1451), SGSLAVPFKAQ (SEQ ID NO: 11 of WO2017100671; herein SEQ ID NO: 1452), AQTLAQPFKAQ (SEQ ID NO: 12 of WO2017100671; herein SEQ ID NO: 1453), AQTLQQPFKAQ (SEQ ID NO: 13 of WO2017100671; herein SEQ ID NO: 1454), AQTLSNPFKAQ (SEQ ID NO: 14 of WO2017100671; herein SEQ ID NO: 1455), AQTLAVPFSNP (SEQ ID NO: 15 of WO2017100671; herein SEQ ID NO: 1456), QGTLAVPFKAQ (SEQ ID NO: 16 of WO2017100671; herein SEQ ID NO: 1457), NQTLAVPFKAQ (SEQ ID NO: 17 of WO2017100671; herein SEQ ID NO: 1458), EGSLAVPFKAQ (SEQ ID NO: 18 of WO2017100671; herein SEQ ID NO: 1459), SGNLAVPFKAQ (SEQ ID NO: 19 of WO2017100671; herein SEQ ID NO: 1460), EGTLAVPFKAQ (SEQ ID NO: 20 of WO2017100671; herein SEQ ID NO: 1461), DSTLAVPFKAQ (SEQ ID NO: 21 in Table 1 of WO2017100671; herein SEQ ID NO: 1462), AVTLAVPFKAQ (SEQ ID NO: 22 of WO2017100671; herein SEQ ID NO: 1463), AQTLSTPFKAQ (SEQ ID NO: 23 of WO2017100671; herein SEQ ID NO: 1464), AQTLPQPFKAQ (SEQ ID NO: 24 and 32 of WO2017100671; herein SEQ ID NO: 1465), AQTLSQPFKAQ (SEQ ID NO: 25 of WO2017100671; herein SEQ ID NO: 1466), AQTLQLPFKAQ (SEQ ID NO: 26 of WO2017100671; herein SEQ ID NO: 1467), AQTLTMPFKAQ (SEQ ID NO: 27, and 34 of WO2017100671 and SEQ ID NO: 35 in the sequence listing of WO2017100671; herein SEQ ID NO: 1468), AQTLTTPFKAQ (SEQ ID NO: 28 of WO2017100671; herein SEQ ID NO: 1469), AQYTLSQGWAQ (SEQ ID NO: 29 of WO2017100671; herein SEQ ID NO: 1470), AQMNATKNVAQ (SEQ ID NO: 30 of WO2017100671; herein SEQ ID NO: 1471), AQVSGGHHSAQ (SEQ ID NO: 31 of WO2017100671 herein SEQ ID NO: 1472), AQTLTAPFKAQ (SEQ ID NO: 35 in Table 1 of WO2017100671; herein SEQ ID NO: 1473), AQTLSKPFKAQ (SEQ ID NO: 36 of WO2017100671; herein SEQ ID NO: 1474), QAVRTSL (SEQ ID NO: 37 of WO2017100671; herein SEQ ID NO: 1475), YTLSQGW (SEQ ID NO: 38 of WO2017100671; herein SEQ ID NO: 888), LAKERLS (SEQ ID NO: 39 of WO2017100671; herein SEQ ID NO: 1476), TLAVPFK (SEQ ID NO: 40 in the sequence listing of WO2017100671; herein SEQ ID NO: 873), SVSKPFL (SEQ ID NO: 41 of WO2017100671; herein SEQ ID NO: 881), FTLTTPK (SEQ ID NO: 42 of WO2017100671; herein SEQ ID NO: 882), MNSTKNV (SEQ ID NO: 43 of WO2017100671; herein SEQ ID NO: 1477), VSGGHHS (SEQ ID NO: 44 of WO2017100671; herein SEQ ID NO: 1478), SAQTLAVPFKAQAQ (SEQ ID NO: 48 of WO2017100671; herein SEQ ID NO: 1479), SXXXLAVPFKAQAQ (SEQ ID NO: 49 of WO2017100671 wherein X may be any amino acid; herein SEQ ID NO: 1480), SAQXXXVPFKAQAQ (SEQ ID NO: 50 of WO2017100671 wherein X may be any amino acid; herein SEQ ID NO: 1481), SAQTLXXXFKAQAQ (SEQ ID NO: 51 of WO2017100671 wherein X may be any amino acid; herein SEQ ID NO: 1482), SAQTLAVXXXAQAQ (SEQ ID NO: 52 of WO2017100671 wherein X may be any amino acid; herein SEQ ID NO: 1483), SAQTLAVPFXXXAQ (SEQ ID NO: 53 of WO2017100671 wherein X may be any amino acid; herein SEQ ID NO: 1484), TNHQSAQ (SEQ ID NO: 65 of WO2017100671; herein SEQ ID NO: 1485), AQAQTGW (SEQ ID NO: 66 of WO02017100671; herein SEQ ID NO: 1486), DGTLATPFK (SEQ ID NO: 67 of WO2017100671; herein SEQ ID NO: 1487), DGTLATPFKXX (SEQ ID NO: 68 of WO2017100671 wherein X may be any amino acid; herein SEQ ID NO: 1488), LAVPFKAQ (SEQ ID NO: 80 of WO2017100671; herein SEQ ID NO: 1489), VPFKAQ (SEQ ID NO: 81 of WO2017100671; herein SEQ ID NO: 1490), FKAQ (SEQ ID NO: 82 of WO2017100671; herein SEQ ID NO: 1491), AQTLAV (SEQ ID NO: 83 of WO2017100671; herein SEQ ID NO: 1492), AQTLAVPF (SEQ ID NO: 84 of WO2017100671; herein SEQ ID NO: 1493), QAVR (SEQ ID NO: 85 of WO2017100671; herein SEQ ID NO: 1494), AVRT (SEQ ID NO: 86 of WO2017100671; herein SEQ ID NO: 1495), VRTS (SEQ ID NO: 87 of WO2017100671; herein SEQ ID NO: 1496), RTSL (SEQ ID NO: 88 of WO2017100671; herein SEQ ID NO: 1497), QAVRT (SEQ ID NO: 89 of WO2017100671; herein SEQ ID NO: 1498), AVRTS (SEQ ID NO: 90 of WO2017100671; herein SEQ ID NO: 1499), VRTSL (SEQ ID NO: 91 of WO02017100671; herein SEQ ID NO: 1500), QAVRTS (SEQ ID NO: 92 of WO2017100671; herein SEQ ID NO: 1501), or AVRTSL (SEQ ID NO: 93 of WO2017100671; herein SEQ ID NO: 1502).

[0105] Non-limiting examples of nucleotide sequences that may encode the amino acid inserts include the following, GATGGGACTTTGGCGGTGCCTTTTAAGGCACAG (SEQ ID NO: 54 of WO2017100671; herein SEQ ID NO: 1503), GATGGGACGTTGGCGGTGCCTTTTAAGGCACAG (SEQ ID NO: 55 of WO2017100671; herein SEQ ID NO: 1504), CAGGCGGTTAGGACGTCTTTG (SEQ ID NO: 56 of WO2017100671; herein SEQ ID NO: 1505), CAGGTCTTCACGGACTCAGACTATCAG (SEQ ID NO: 57 and 78 of WO2017100671; herein SEQ ID NO: 1506), CAAGTAAAACCTCTACAAATGTGGTAAAATCG (SEQ ID NO: 58 of WO2017100671; herein SEQ ID NO: 1507), ACTCATCGACCAATACTTGTACTATCTCTCTAGAAC (SEQ ID NO: 59 of WO2017100671; herein SEQ ID NO: 1508), GGAAGTATTCCTTGGTTTTGAACCCA (SEQ ID NO: 60 of WO2017100671; herein SEQ ID NO: 1509), GGTCGCGGTTCTTTGTTGTGGAT (SEQ ID NO: 61 of WO2017100671; herein SEQ ID NO: 1510), CGACCTTGAAGCGCATGAACTCCT (SEQ ID NO: 62 of WO2017100671; herein SEQ ID NO: 1511), GTATTCCTTGGTTTTGAACCCAACCGGTCTGCGCCTGTGCMNNMNNMNNMNNMNN MNNMNNTTGGGCACTCTGGTGGTTTGTC (SEQ ID NO: 63 of WO2017100671 wherein N may be A, C, T, or G; herein SEQ ID NO: 1512), GTATTCCTGGTTTGAACCCAACCGGTCTGCGCMNNMNNMNNAAAAGGCACCGCC AAAGTTTG (SEQ ID NO: 69 of WO2017100671 wherein N may be A, C, T, or G; herein SEQ ID NO: 1513), GTATTCCTTGGTTTGAACCCAACCGGTCTGCGCCTGTGCMNNMNNMNNCACCGCC AAAGTTTGGGCACT (SEQ ID NO: 70 of WO2017100671 wherein N may be A, C, T, or G; herein SEQ ID NO: 1514), GTATTCCTTGGTTTGAACCCAACCGGTCTGCGCCTGTGCCTTAAAMNNMNNMNNC AAAGTTTGGGCACTCTGGTGG (SEQ ID NO: 71 of WO2017100671 wherein N may be A, C, T, or G; herein SEQ ID NO: 1515), GTATTCCTTGGTTTTGAACCCAACCGGTCTGCGCCTGTGCCTTAAAAGGCACMNNM NNMNNTTGGGCACTCTGGTGGTTTGTG (SEQ ID NO: 72 of WO2017100671 wherein N may be A, C, T, or G; herein SEQ ID NO: 1516), ACTTTGGCGGTGCCTTTTAAG (SEQ ID NO: 74 of WO2017100671 herein SEQ ID NO: 890), AGTGTGAGTAAGCCTTTTTTG (SEQ ID NO: 75 of WO2017100671; herein SEQ ID NO: 891), TTTACGTTGACGACGCCTAAG (SEQ ID NO: 76 of WO2017100671; herein SEQ ID NO: 892), TATACTTTGTCGCAGGGTTGG (SEQ ID NO: 77 of WO2017100671; herein SEQ ID NO: 898), or CTTGCGAAGGAGCGGCTTTCG (SEQ ID NO: 79 of WO2017100671; herein SEQ ID NO: 1517).

[0106] In one embodiment, the AAV serotype may be, or may have a sequence as described in U.S. Pat. No. 9,624,274, the contents of which are herein incorporated by reference in their entirety, such as, but not limited to, AAV1 (SEQ ID NO: 181 of U.S. Pat. No. 9,624,274), AAV6 (SEQ ID NO: 182 of U.S. Pat. No. 9,624,274), AAV2 (SEQ ID NO: 183 of U.S. Pat. No. 9,624,274), AAV3b (SEQ ID NO: 184 of U.S. Pat. No. 9,624,274), AAV7 (SEQ ID NO: 185 of U.S. Pat. No. 9,624,274), AAV8 (SEQ ID NO: 186 of U.S. Pat. No. 9,624,274), AAV10 (SEQ ID NO: 187 of U.S. Pat. No. 9,624,274), AAV4 (SEQ ID NO: 188 of U.S. Pat. No. 9,624,274), AAV11 (SEQ ID NO: 189 of U.S. Pat. No. 9,624,274), bAAV (SEQ ID NO: 190 of U.S. Pat. No. 9,624,274), AAV5 (SEQ ID NO: 191 of U.S. Pat. No. 9,624,274), GPV (SEQ ID NO: 192 of U.S. Pat. No. 9,624,274; herein SEQ ID NO: 1518), B19 (SEQ ID NO: 193 of U.S. Pat. No. 9,624,274; herein SEQ ID NO: 1519), MVM (SEQ ID NO: 194 of U.S. Pat. No. 9,624,274; herein SEQ ID NO: 1520), FPV (SEQ ID NO: 195 of U.S. Pat. No. 9,624,274; herein SEQ ID NO: 1521), CPV (SEQ ID NO: 196 of U.S. Pat. No. 9,624,274; herein SEQ ID NO: 1522) or variants thereof. Further, any of the structural protein inserts described in U.S. Pat. No. 9,624,274, may be inserted into, but not limited to, 1-453 and 1-587 of any parent AAV serotype, such as, but not limited to, AAV2 (SEQ ID NO: 183 of U.S. Pat. No. 9,624,274). The amino acid insert may be, but is not limited to, any of the following amino acid sequences, VNLTWSRASG (SEQ ID NO: 50 of U.S. Pat. No. 9,624,274; herein SEQ ID NO: 1901), EFCINHRGYWVCGD (SEQ ID NO:55 of U.S. Pat. No. 9,624,274; herein SEQ ID NO: 1902), EDGQVMDVDLS (SEQ ID NO: 85 of U.S. Pat. No. 9,624,274; herein SEQ ID NO: 1903), EKQRNGTLT (SEQ ID NO: 86 of U.S. Pat. No. 9,624,274; herein SEQ ID NO: 1904), TYQCRVTHPHLPRALMR (SEQ ID NO: 87 of U.S. Pat. No. 9,624,274; herein SEQ ID NO: 1905), RHSTTQPRKTKGSG (SEQ ID NO: 88 of U.S. Pat. No. 9,624,274; herein SEQ ID NO: 1906), DSNPRGVSAYLSR (SEQ ID NO: 89 of U.S. Pat. No. 9,624,274; herein SEQ ID NO: 1907), TITCLWDLAPSK (SEQ ID NO: 90 of U.S. Pat. No. 9,624,274; herein SEQ ID NO: 1908), KTKGSGFFVF (SEQ ID NO: 91 of U.S. Pat. No. 9,624,274; herein SEQ ID NO: 1909), THPHLPRALMRS (SEQ ID NO: 92 of U.S. Pat. No. 9,624,274; herein SEQ ID NO: 1910), GETYQCRVTHPHLPRALMRSTTK (SEQ ID NO: 93 of U.S. Pat. No. 9,624,274; herein SEQ ID NO: 1911), LPRALMRS (SEQ ID NO: 94 of U.S. Pat. No. 9,624,274; herein SEQ ID NO: 1912), INHRGYWV (SEQ ID NO: 95 of U.S. Pat. No. 9,624,274; herein SEQ ID NO: 1913), CDAGSVRTNAPD (SEQ ID NO: 60 of U.S. Pat. No. 9,624,274; herein SEQ ID NO: 1914), AKAVSNLTESRSESLQS (SEQ ID NO: 96 of U.S. Pat. No. 9,624,274; herein SEQ ID NO: 1915), SLTGDEFKKVLET (SEQ ID NO: 97 of U.S. Pat. No. 9,624,274; herein SEQ ID NO: 1916), REAVAYRFEED (SEQ ID NO: 98 of U.S. Pat. No. 9,624,274; herein SEQ ID NO: 1917), INPEIITLDG (SEQ ID NO: 99 of U.S. Pat. No. 9,624,274; herein SEQ ID NO: 1918), DISVTGAPVITATYL (SEQ ID NO: 100 of U.S. Pat. No. 9,624,274; herein SEQ ID NO: 1919), DISVTGAPVITA (SEQ ID NO: 101 of U.S. Pat. No. 9,624,274; herein SEQ ID NO: 1920), PKTVSNLTESSSESVQS (SEQ ID NO: 102 of U.S. Pat. No. 9,624,274; herein SEQ ID NO: 1921), SLMGDEFKAVLET (SEQ ID NO: 103 of U.S. Pat. No. 9,624,274; herein SEQ ID NO: 1922), QHSVAYTFEED (SEQ ID NO: 104 of U.S. Pat. No. 9,624,274; herein SEQ ID NO: 1923), INPEIITRDG (SEQ ID NO: 105 of U.S. Pat. No. 9,624,274; herein SEQ ID NO: 1924), DISLTGDPVITASYL (SEQ ID NO: 106 of U.S. Pat. No. 9,624,274; herein SEQ ID NO: 1925), DISLTGDPVITA (SEQ ID NO: 107 of U.S. Pat. No. 9,624,274; herein SEQ ID NO: 1926), DQSIDFEIDSA (SEQ ID NO: 108 of U.S. Pat. No. 9,624,274; herein SEQ ID NO: 1927), KNVSEDLPLPTFSPTLLGDS (SEQ ID NO: 109 of U.S. Pat. No. 9,624,274; herein SEQ ID NO: 1928), KNVSEDLPLPT (SEQ ID NO: 110 of U.S. Pat. No. 9,624,274; herein SEQ ID NO: 1929), CDSGRVRTDAPD (SEQ ID NO: 111 of U.S. Pat. No. 9,624,274; herein SEQ ID NO: 1930), FPEHLLVDFLQSLS (SEQ ID NO: 112 of U.S. Pat. No. 9,624,274; herein SEQ ID NO: 1931), DAEFRHDSG (SEQ ID NO: 65 of U.S. Pat. No. 9,624,274; herein SEQ ID NO: 1932), HYAAAQWDFGNTMCQL (SEQ ID NO: 113 of U.S. Pat. No. 9,624,274; herein SEQ ID NO: 1933), YAAQWDFGNTMCQ (SEQ ID NO: 114 of U.S. Pat. No. 9,624,274; herein SEQ ID NO: 1934), RSQKEGLHYT (SEQ ID NO: 115 of U.S. Pat. No. 9,624,274; herein SEQ ID NO: 1935), SSRTPSDKPVAHWANPQAE (SEQ ID NO: 116 of U.S. Pat. No. 9,624,274; herein SEQ ID NO: 1936), SRTPSDKPVAHWANP (SEQ ID NO: 117 of U.S. Pat. No. 9,624,274; herein SEQ ID NO: 1937), SSRTPSDKP (SEQ ID NO: 118 of U.S. Pat. No. 9,624,274; herein SEQ ID NO: 1938), NADGNVDYHMNSVP (SEQ ID NO: 119 of U.S. Pat. No. 9,624,274; herein SEQ ID NO: 1939), DGNVDYHMNSV (SEQ ID NO: 120 of U.S. Pat. No. 9,624,274; herein SEQ ID NO: 1940), RSFKEFLQSSLRALRQ (SEQ ID NO: 121 of U.S. Pat. No. 9,624,274; herein SEQ ID NO: 1941); FKEFLQSSLRA (SEQ ID NO: 122 of U.S. Pat. No. 9,624,274; herein SEQ ID NO: 1942), or QMWAPQWGPD (SEQ ID NO: 123 of U.S. Pat. No. 9,624,274; herein SEQ ID NO: 1943).

[0107] In one embodiment, the AAV serotype may be, or may have a sequence as described in U.S. Pat. No. 9,475,845, the contents of which are herein incorporated by reference in their entirety, such as, but not limited to, AAV capsid proteins comprising modification of one or more amino acids at amino acid positions 585 to 590 of the native AAV2 capsid protein. Further the modification may result in, but not limited to, the amino acid sequence RGNRQA (SEQ ID NO: 3 of U.S. Pat. No. 9,475,845; herein SEQ ID NO: 1944), SSSTDP (SEQ ID NO: 4 of U.S. Pat. No. 9,475,845; herein SEQ ID NO: 1945), SSNTAP (SEQ ID NO: 5 of U.S. Pat. No. 9,475,845; herein SEQ ID NO: 1946), SNSNLP (SEQ ID NO: 6 of U.S. Pat. No. 9,475,845; herein SEQ ID NO: 1947), SSTTAP (SEQ ID NO: 7 of U.S. Pat. No. 9,475,845; herein SEQ ID NO: 1948), AANTAA (SEQ ID NO: 8 of U.S. Pat. No. 9,475,845; herein SEQ ID NO: 1949), QQNTAP (SEQ ID NO: 9 of U.S. Pat. No. 9,475,845; herein SEQ ID NO: 1950), SAQAQA (SEQ ID NO: 10 of U.S. Pat. No. 9,475,845; herein SEQ ID NO: 1951), QANTGP (SEQ ID NO: 11 of U.S. Pat. No. 9,475,845; herein SEQ ID NO: 1952), NATTAP (SEQ ID NO: 12 of U.S. Pat. No. 9,475,845; herein SEQ ID NO: 1953), SSTAGP (SEQ ID NO: 13 and 20 of U.S. Pat. No. 9,475,845; herein SEQ ID NO: 1954), QQNTAA (SEQ ID NO: 14 of U.S. Pat. No. 9,475,845; herein SEQ ID NO: 1955), PSTAGP (SEQ ID NO: 15 of U.S. Pat. No. 9,475,845; herein SEQ ID NO: 1956), NQNTAP (SEQ ID NO: 16 of U.S. Pat. No. 9,475,845; herein SEQ ID NO: 1957), QAANAP (SEQ ID NO: 17 of U.S. Pat. No. 9,475,845; herein SEQ ID NO: 1958), SIVGLP (SEQ ID NO: 18 of U.S. Pat. No. 9,475,845; herein SEQ ID NO: 1959), AASTAA (SEQ ID NO: 19, and 27 of U.S. Pat. No. 9,475,845; herein SEQ ID NO: 1960), SQNTTA (SEQ ID NO: 21 of U.S. Pat. No. 9,475,845; herein SEQ ID NO: 1961), QQDTAP (SEQ ID NO: 22 of U.S. Pat. No. 9,475,845; herein SEQ ID NO: 1962), QTNTGP (SEQ ID NO: 23 of U.S. Pat. No. 9,475,845; herein SEQ ID NO: 1963), QTNGAP (SEQ ID NO: 24 of U.S. Pat. No. 9,475,845; herein SEQ ID NO: 1964), QQNAAP (SEQ ID NO: 25 of U.S. Pat. No. 9,475,845; herein SEQ ID NO: 1965), or AANTQA (SEQ ID NO: 26 of U.S. Pat. No. 9,475,845; herein SEQ ID NO: 1966). In one embodiment, the amino acid modification is a substitution at amino acid positions 262 through 265 in the native AAV2 capsid protein or the corresponding position in the capsid protein of another AAV with a targeting sequence. The targeting sequence may be, but is not limited to, any of the amino acid sequences, NGRAHA (SEQ ID NO: 38 of U.S. Pat. No. 9,475,845; herein SEQ ID NO: 1967), QPEHSST (SEQ ID NO: 39 and 50 of U.S. Pat. No. 9,475,845; herein SEQ ID NO: 1968), VNTANST (SEQ ID NO: 40 of U.S. Pat. No. 9,475,845; herein SEQ ID NO: 1969), HGPMQKS (SEQ ID NO: 41 of U.S. Pat. No. 9,475,845; herein SEQ ID NO: 1970), PHKPPLA (SEQ ID NO: 42 of U.S. Pat. No. 9,475,845; herein SEQ ID NO: 1971), IKNNEMW (SEQ ID NO: 43 of U.S. Pat. No. 9,475,845; herein SEQ ID NO: 1972), RNLDTPM (SEQ ID NO: 44 of U.S. Pat. No. 9,475,845; herein SEQ ID NO: 1973), VDSHRQS (SEQ ID NO: 45 of U.S. Pat. No. 9,475,845; herein SEQ ID NO: 1974), YDSKTKT (SEQ ID NO: 46 of U.S. Pat. No. 9,475,845; herein SEQ ID NO: 1975), SQLPHQK (SEQ ID NO: 47 of U.S. Pat. No. 9,475,845; herein SEQ ID NO: 1976), STMQQNT (SEQ ID NO: 48 of U.S. Pat. No. 9,475,845; herein SEQ ID NO: 1977), TERYMTQ (SEQ ID NO: 49 of U.S. Pat. No. 9,475,845; herein SEQ ID NO: 1978), DASLSTS (SEQ ID NO: 51 of U.S. Pat. No. 9,475,845; herein SEQ ID NO: 1979), DLPNKKT (SEQ ID NO: 52 of U.S. Pat. No. 9,475,845; herein SEQ ID NO: 1980), DLTAARL (SEQ ID NO: 53 of U.S. Pat. No. 9,475,845; herein SEQ ID NO: 1981), EPHQFNY (SEQ ID NO: 54 of U.S. Pat. No. 9,475,845; herein SEQ ID NO: 1982), EPQSNHT (SEQ ID NO: 55 of U.S. Pat. No. 9,475,845; herein SEQ ID NO: 1983), MSSWPSQ (SEQ ID NO: 56 of U.S. Pat. No. 9,475,845; herein SEQ ID NO: 1984), NPKHNAT (SEQ ID NO: 57 of U.S. Pat. No. 9,475,845; herein SEQ ID NO: 1985), PDGMRTT (SEQ ID NO: 58 of U.S. Pat. No. 9,475,845; herein SEQ ID NO: 1986), PNNNKTT (SEQ ID NO: 59 of U.S. Pat. No. 9,475,845; herein SEQ ID NO: 1987), QSTTHDS (SEQ ID NO: 60 of U.S. Pat. No. 9,475,845; herein SEQ ID NO: 1988), TGSKQKQ (SEQ ID NO: 61 of U.S. Pat. No. 9,475,845; herein SEQ ID NO: 1989), SLKHQAL (SEQ ID NO: 62 of U.S. Pat. No. 9,475,845; herein SEQ ID NO: 1990), SPIDGEQ (SEQ ID NO: 63 of U.S. Pat. No. 9,475,845; herein SEQ ID NO: 1991), WIFPWIQL (SEQ ID NO: 64 and 112 of U.S. Pat. No. 9,475,845; herein SEQ ID NO: 1992), CDCRGDCFC (SEQ ID NO: 65 of U.S. Pat. No. 9,475,845; herein SEQ ID NO: 1993), CNGRC (SEQ ID NO: 66 of U.S. Pat. No. 9,475,845; herein SEQ ID NO: 1994), CPRECES (SEQ ID NO: 67 of U.S. Pat. No. 9,475,845; herein SEQ ID NO: 1995), CTTHWGFTLC (SEQ ID NO: 68 and 123 of U.S. Pat. No. 9,475,845; herein SEQ ID NO: 1996), CGRRAGGSC (SEQ ID NO: 69 of U.S. Pat. No. 9,475,845; herein SEQ ID NO: 1997), CKGGRAKDC (SEQ ID NO: 70 of U.S. Pat. No. 9,475,845; herein SEQ ID NO: 1998), CVPELGHEC (SEQ ID NO: 71 and 115 of U.S. Pat. No. 9,475,845; herein SEQ ID NO: 1999), CRRETAWAK (SEQ ID NO: 72 of U.S. Pat. No. 9,475,845; herein SEQ ID NO: 2000), VSWFSHRYSPFAVS (SEQ ID NO: 73 of U.S. Pat. No. 9,475,845; herein SEQ ID NO: 2001), GYRDGYAGPILYN (SEQ ID NO: 74 of U.S. Pat. No. 9,475,845; herein SEQ ID NO: 2002), XXXYXXX (SEQ ID NO: 75 of U.S. Pat. No. 9,475,845; herein SEQ ID NO: 2003), YXNW (SEQ ID NO: 76 of U.S. Pat. No. 9,475,845; herein SEQ ID NO: 2004), RPLPPLP (SEQ ID NO: 77 of U.S. Pat. No. 9,475,845; herein SEQ ID NO: 2005), APPLPPR (SEQ ID NO: 78 of U.S. Pat. No. 9,475,845; herein SEQ ID NO: 2006), DVFYPYPYASGS (SEQ ID NO: 79 of U.S. Pat. No. 9,475,845; herein SEQ ID NO: 2007), MYWYPY (SEQ ID NO: 80 of U.S. Pat. No. 9,475,845; herein SEQ ID NO: 2008), DITWDQLWDLMK (SEQ ID NO: 81 of U.S. Pat. No. 9,475,845; herein SEQ ID NO: 2009), CWDDXWLC (SEQ ID NO: 82 of U.S. Pat. No. 9,475,845; herein SEQ ID NO: 2010), EWCEYLGGYLRCYA (SEQ ID NO: 83 of U.S. Pat. No. 9,475,845; herein SEQ ID NO: 2011), YXCXXGPXTWXCXP (SEQ ID NO: 84 of U.S. Pat. No. 9,475,845; herein SEQ ID NO: 2012), IEGPTLRQWLAARA (SEQ ID NO: 85 of U.S. Pat. No. 9,475,845; herein SEQ ID NO: 2013), LWXXX (SEQ ID NO: 86 of U.S. Pat. No. 9,475,845; herein SEQ ID NO: 2014), XFXXYLW (SEQ ID NO: 87 of U.S. Pat. No. 9,475,845; herein SEQ ID NO: 2015), SSIISHFRWGLCD (SEQ ID NO: 88 of U.S. Pat. No. 9,475,845; herein SEQ ID NO: 2016), MSRPACPPNDKYE (SEQ ID NO: 89 of U.S. Pat. No. 9,475,845; herein SEQ ID NO: 2017), CLRSGRGC (SEQ ID NO: 90 of U.S. Pat. No. 9,475,845; herein SEQ ID NO: 2018), CHWMFSPWC (SEQ ID NO: 91 of U.S. Pat. No. 9,475,845; herein SEQ ID NO: 2019), WXXF (SEQ ID NO: 92 of U.S. Pat. No. 9,475,845; herein SEQ ID NO: 2020), CSSRLDAC (SEQ ID NO: 93 of U.S. Pat. No. 9,475,845; herein SEQ ID NO: 2021), CLPVASC (SEQ ID NO: 94 of U.S. Pat. No. 9,475,845; herein SEQ ID NO: 2022), CGFECVRQCPERC (SEQ ID NO: 95 of U.S. Pat. No. 9,475,845; herein SEQ ID NO: 2023), CVALCREACGEGC (SEQ ID NO: 96 of U.S. Pat. No. 9,475,845; herein SEQ ID NO: 2024), SWCEPGWCR (SEQ ID NO: 97 of U.S. Pat. No. 9,475,845; herein SEQ ID NO: 2025), YSGKWGW (SEQ ID NO: 98 of U.S. Pat. No. 9,475,845; herein SEQ ID NO: 2026), GLSGGRS (SEQ ID NO: 99 of U.S. Pat. No. 9,475,845; herein SEQ ID NO: 2027), LMLPRAD (SEQ ID NO: 100 of U.S. Pat. No. 9,475,845; herein SEQ ID NO: 2028), CSCFRDVCC (SEQ ID NO: 101 of U.S. Pat. No. 9,475,845; herein SEQ ID NO: 2029), CRDVVSVIC (SEQ ID NO: 102 of U.S. Pat. No. 9,475,845; herein SEQ ID NO: 2030), MARSGL (SEQ ID NO: 103 of U.S. Pat. No. 9,475,845; herein SEQ ID NO: 2031), MARAKE (SEQ ID NO: 104 of U.S. Pat. No. 9,475,845; herein SEQ ID NO: 2032), MSRTMS (SEQ ID NO: 105 of U.S. Pat. No. 9,475,845; herein SEQ ID NO: 2033), KCCYSL (SEQ ID NO: 106 of U.S. Pat. No. 9,475,845, herein SEQ ID NO: 2034), MYWGDSHWLQYWYE (SEQ ID NO: 107 of U.S. Pat. No. 9,475,845; herein SEQ ID NO: 2035), MQLPLAT (SEQ ID NO: 108 of U.S. Pat. No. 9,475,845; herein SEQ ID NO: 2036), EWLS (SEQ ID NO: 109 of U.S. Pat. No. 9,475,845; herein SEQ ID NO: 2037), SNEW (SEQ ID NO: 110 of U.S. Pat. No. 9,475,845; herein SEQ ID NO: 2038), TNYL (SEQ ID NO: 111 of U.S. Pat. No. 9,475,845; herein SEQ ID NO: 2039), WDLAWMFRLPVG (SEQ ID NO: 113 of U.S. Pat. No. 9,475,845; herein SEQ ID NO: 2040), CTVALPGGYVRVC (SEQ ID NO: 114 of U.S. Pat. No. 9,475,845; herein SEQ ID NO: 2041), CVAYCIEHHCWTC (SEQ ID NO: 116 of U.S. Pat. No. 9,475,845; herein SEQ ID NO: 2042), CVFAHNYDYLVC (SEQ ID NO: 117 of U.S. Pat. No. 9,475,845; herein SEQ ID NO: 2043), CVFTSNYAFC (SEQ ID NO: 118 of U.S. Pat. No. 9,475,845; herein SEQ ID NO: 2044), VHSPNKK (SEQ ID NO: 119 of U.S. Pat. No. 9,475,845 herein SEQ ID NO: 2045), CRGDGWC (SEQ ID NO: 120 of U.S. Pat. No. 9,475,845; herein SEQ ID NO: 2046), XRGCDX (SEQ ID NO: 121 of U.S. Pat. No. 9,475,845; herein SEQ ID NO: 2047), PXXX (SEQ ID NO: 122 of U.S. Pat. No. 9,475,845; herein SEQ ID NO: 2048), SGKGPRQITAL (SEQ ID NO: 124 of U.S. Pat. No. 9,475,845; herein SEQ ID NO: 2049), AAAAAAAAAXXXXX (SEQ ID NO: 125 of U.S. Pat. No. 9,475,845; herein SEQ ID NO: 2050), VYMSPF (SEQ ID NO: 126 of U.S. Pat. No. 9,475,845; herein SEQ ID NO: 2051), ATWLPPR (SEQ ID NO: 127 of U.S. Pat. No. 9,475,845; herein SEQ ID NO: 2052), HTMYYHHHYQHHL (SEQ ID NO: 128 of U.S. Pat. No. 9,475,845; herein SEQ ID NO: 2053), SEVGCRAGPLQWLCEKYFG (SEQ ID NO: 129 of U.S. Pat. No. 9,475,845; herein SEQ ID NO: 2054), CGLLPVGRPDRNVWRWLC (SEQ ID NO: 130 of U.S. Pat. No. 9,475,845; herein SEQ ID NO: 2055), CKGQCDRFKGLPWEC (SEQ ID NO: 131 of U.S. Pat. No. 9,475,845; herein SEQ ID NO: 2056), SGRSA (SEQ ID NO: 132 of U.S. Pat. No. 9,475,845; herein SEQ ID NO: 2057), WGFP (SEQ ID NO: 133 of U.S. Pat. No. 9,475,845 herein SEQ ID NO: 2058), AEPMPHSLNFSQYLWYT (SEQ ID NO: 134 of U.S. Pat. No. 9,475,845; herein SEQ ID NO: 2059), WAYXSP (SEQ ID NO: 135 of U.S. Pat. No. 9,475,845; herein SEQ ID NO: 2060), IELLQAR (SEQ ID NO: 136 of US9475845; herein SEQ ID NO: 2061), AYTKCSRQWRTCMTTH (SEQ ID NO: 137 of U.S. Pat. No. 9,475,845; herein SEQ ID NO: 2062), PQNSKIPGPTFLDPH (SEQ ID NO: 138 of U.S. Pat. No. 9,475,845; herein SEQ ID NO: 2063), SMEPALPDWWWKMFK (SEQ ID NO: 139 of U.S. Pat. No. 9,475,845; herein SEQ ID NO: 2064), ANTPCGPYTHDCPVKR (SEQ ID NO: 140 of U.S. Pat. No. 9,475,845; herein SEQ ID NO: 2065), TACHQHVRMVRP (SEQ ID NO: 141 of U.S. Pat. No. 9,475,845; herein SEQ ID NO: 2066), VPWMEPAYQRFL (SEQ ID NO: 142 of U.S. Pat. No. 9,475,845; herein SEQ ID NO: 2067), DPRATPGS (SEQ ID NO: 143 of U.S. Pat. No. 9,475,845; herein SEQ ID NO: 2068), FRPNRAQDYNTN (SEQ ID NO: 144 of U.S. Pat. No. 9,475,845; herein SEQ ID NO: 2069), CTKNSYLMC (SEQ ID NO: 145 of U.S. Pat. No. 9,475,845; herein SEQ ID NO: 2070), CXXTXXXGXGC (SEQ ID NO: 146 of U.S. Pat. No. 9,475,845; herein SEQ ID NO: 2071), CPIEDRPMC (SEQ ID NO: 147 of U.S. Pat. No. 9,475,845; herein SEQ ID NO: 2072), HEWSYLAPYPWF (SEQ ID NO: 148 of U.S. Pat. No. 9,475,845; herein SEQ ID NO: 2073), MCPKHPLGC (SEQ ID NO: 149 of U.S. Pat. No. 9,475,845; herein SEQ ID NO: 2074), RMWPSSTVNLSAGRR (SEQ ID NO: 150 of U.S. Pat. No. 9,475,845; herein SEQ ID NO: 2075), SAKTAVSQRVWLPSHRGGEP (SEQ ID NO: 151 of U.S. Pat. No. 9,475,845; herein SEQ ID NO: 2076), KSREHVNNSACPSKRITAAL (SEQ ID NO: 152 of U.S. Pat. No. 9,475,845; herein SEQ ID NO: 2077), EGFR (SEQ ID NO: 153 of U.S. Pat. No. 9,475,845; herein SEQ ID NO: 2078), AGLGVR (SEQ ID NO: 154 of U.S. Pat. No. 9,475,845; herein SEQ ID NO: 2079), GTRQGHTMRLGVSDG (SEQ ID NO: 155 of U.S. Pat. No. 9,475,845; herein SEQ ID NO: 2080), IAGLATPGWSHWLAL (SEQ ID NO: 156 of U.S. Pat. No. 9,475,845; herein SEQ ID NO: 2081), SMSIARL (SEQ ID NO: 157 of U.S. Pat. No. 9,475,845; herein SEQ ID NO: 2082), HTFEPGV (SEQ ID NO: 158 of U.S. Pat. No. 9,475,845; herein SEQ ID NO: 2083), NTSLKRISNKRIRRK (SEQ ID NO: 159 of U.S. Pat. No. 9,475,845; herein SEQ ID NO: 2084), LRIKRKRRKRKKTRK (SEQ ID NO: 160 of U.S. Pat. No. 9,475,845; herein SEQ ID NO: 2085), GGG, GFS, LWS, EGG, LLV, LSP, LBS, AGG, GRR, GGH and GTV.

[0108] In one embodiment, the AAV serotype may be, or may have a sequence as described in United States Publication No. US 20160369298, the contents of which are herein incorporated by reference in their entirety, such as, but not limited to, site-specific mutated capsid protein of AAV2 (SEQ ID NO: 97 of US 20160369298; herein SEQ ID NO: 2086) or variants thereof, wherein the specific site is at least one site selected from sites R447, G453, S578, N587, N587+1, S662 of VP1 or fragment thereof.

[0109] Further, any of the mutated sequences described in US 20160369298, may be or may have, but not limited to, any of the following sequences SDSGASN (SEQ ID NO: 1 and SEQ ID NO: 231 of US20160369298; herein SEQ ID NO: 2087), SPSGASN (SEQ ID NO: 2 of US20160369298; herein SEQ ID NO: 2088), SHSGASN (SEQ ID NO: 3 of US20160369298; herein SEQ ID NO: 2089), SRSGASN (SEQ ID NO: 4 of US20160369298; herein SEQ ID NO: 2090), SKSGASN (SEQ ID NO: 5 of US20160369298; herein SEQ ID NO: 2091), SNSGASN (SEQ ID NO: 6 of US20160369298; herein SEQ ID NO: 2092), SGSGASN (SEQ ID NO: 7 of US20160369298; herein SEQ ID NO: 2093), SASGASN (SEQ ID NO: 8, 175, and 221 of US20160369298; herein SEQ ID NO: 2094), SESGTSN (SEQ ID NO: 9 of US20160369298; herein SEQ ID NO: 2095), STTGGSN (SEQ ID NO: 10 of US20160369298; herein SEQ ID NO: 2096), SSAGSTN (SEQ ID NO: 11 of US20160369298; herein SEQ ID NO: 2097), NNDSQA (SEQ ID NO: 12 of US20160369298; herein SEQ ID NO: 2098), NNRNQA (SEQ ID NO: 13 of US20160369298; herein SEQ ID NO: 2099), NNNKQA (SEQ ID NO: 14 of US20160369298; herein SEQ ID NO: 2100), NAKRQA (SEQ ID NO: 15 of US20160369298; herein SEQ ID NO: 2101), NDEHQA (SEQ ID NO: 16 of US20160369298; herein SEQ ID NO: 2102), NTSQKA (SEQ ID NO: 17 of US20160369298; herein SEQ ID NO: 2103), YYLSRTNTPSGTDTQSRLVFSQAGA (SEQ ID NO: 18 of US20160369298; herein SEQ ID NO: 2104), YYLSRTNTDSGTETQSGLDFSQAGA (SEQ ID NO: 19 of US20160369298; herein SEQ ID NO: 2105), YYLSRTNTESGTPTQSALEFSQAGA (SEQ ID NO: 20 of US20160369298; herein SEQ ID NO: 2106), YYLSRTNTHSGTHTQSPLHFSQAGA (SEQ ID NO: 21 of US20160369298; herein SEQ ID NO: 2107), YYLSRTNTSSGTITISHLIFSQAGA (SEQ ID NO: 22 of US20160369298; herein SEQ ID NO: 2108), YYLSRTNTRSGIMTKSSLMFSQAGA (SEQ ID NO: 23 of US20160369298; herein SEQ ID NO: 2109), YYLSRTNTKSGRKTLSNLSFSQAGA (SEQ ID NO: 24 of US20160369298; herein SEQ ID NO: 2110), YYLSRTNDGSGPVTPSKLRFSQRGA (SEQ ID NO: 25 of US20160369298; herein SEQ ID NO: 2111), YYLSRTNAASGHATHSDLKFSQPGA (SEQ ID NO: 26 of US20160369298; herein SEQ ID NO: 2112), YYLSRTNGQAGSLTMSELGFSQVGA (SEQ ID NO: 27 of US20160369298; herein SEQ ID NO: 2113), YYLSRTNSTGGNQTTSQLLFSQLSA (SEQ ID NO: 28 of US20160369298; herein SEQ ID NO: 2114), YFLSRTNNNTGLNTNSTLNFSQGRA (SEQ ID NO: 29 of US20160369298; herein SEQ ID NO: 2115), SKTGADNNNSEYSWTG (SEQ ID NO: 30 of US20160369298; herein SEQ ID NO: 2116), SKTDADNNNSEYSWTG (SEQ ID NO: 31 of US20160369298; herein SEQ ID NO: 2117), SKTEADNNNSEYSWTG (SEQ ID NO: 32 of US20160369298; herein SEQ ID NO: 2118), SKTPADNNNSEYSWTG (SEQ ID NO: 33 of US20160369298; herein SEQ ID NO: 2119), SKTHADNNNSEYSWTG (SEQ ID NO: 34 of US20160369298; herein SEQ ID NO: 2120), SKTQADNNNSEYSWTG (SEQ ID NO: 35 of US20160369298; herein SEQ ID NO: 2121), SKTIADNNNSEYSWTG (SEQ ID NO: 36 of US20160369298; herein SEQ ID NO: 2122), SKTMADNNNSEYSWTG (SEQ ID NO: 37 of US20160369298; herein SEQ ID NO: 2123), SKTRADNNNSEYSWTG (SEQ ID NO: 38 of US20160369298; herein SEQ ID NO: 2124), SKTNADNNNSEYSWTG (SEQ ID NO: 39 of US20160369298; herein SEQ ID NO: 2125), SKTVGRNNNSEYSWTG (SEQ ID NO: 40 of US20160369298; herein SEQ ID NO: 2126), SKTADRNNNSEYSWTG (SEQ ID NO: 41 of US20160369298; herein SEQ ID NO: 2127), SKKLSQNNNSKYSWQG (SEQ ID NO: 42 of US20160369298; herein SEQ ID NO: 2128), SKPTTGNNNSDYSWPG (SEQ ID NO: 43 of US20160369298; herein SEQ ID NO: 2129), STQKNENNNSNYSWPG (SEQ ID NO: 44 of US20160369298; herein SEQ ID NO: 2130), HKDDEGKF (SEQ ID NO: 45 of US20160369298; herein SEQ ID NO: 2131), HKDDNRKF (SEQ ID NO: 46 of US20160369298; herein SEQ ID NO: 2132), HKDDTNKF (SEQ ID NO: 47 of US20160369298; herein SEQ ID NO: 2133), HEDSDKNF (SEQ ID NO: 48 of US20160369298; herein SEQ ID NO: 2134), HRDGADSF (SEQ ID NO: 49 of US20160369298; herein SEQ ID NO: 2135), HGDNKSRF (SEQ ID NO: 50 of US20160369298; herein SEQ ID NO: 2136), KQGSEKTNVDFEEV (SEQ ID NO: 51 of US20160369298; herein SEQ ID NO: 2137), KQGSEKTNVDSEEV (SEQ ID NO: 52 of US20160369298; herein SEQ ID NO: 2138), KQGSEKTNVDVEEV (SEQ ID NO: 53 of US20160369298; herein SEQ ID NO: 2139), KQGSDKTNVDDAGV (SEQ ID NO: 54 of US20160369298; herein SEQ ID NO: 2140), KQGSSKTNVDPREV (SEQ ID NO: 55 of US20160369298; herein SEQ ID NO: 2141), KQGSRKTNVDHKQV (SEQ ID NO: 56 of US20160369298; herein SEQ ID NO: 2142), KQGSKGGNVDTNRV (SEQ ID NO: 57 of US20160369298; herein SEQ ID NO: 2143), KQGSGEANVDNGDV (SEQ ID NO: 58 of US20160369298; herein SEQ ID NO: 2144), KQDAAADNIDYDHV (SEQ ID NO: 59 of US20160369298; herein SEQ ID NO: 2145), KQSGTRSNAAASSV (SEQ ID NO: 60 of US20160369298; herein SEQ ID NO: 2146), KENTNTNDTELTNV (SEQ ID NO: 61 of US20160369298; herein SEQ ID NO: 2147), QRGNNVAATADVNT (SEQ ID NO: 62 of US20160369298; herein SEQ ID NO: 2148), QRGNNEAATADVNT (SEQ ID NO: 63 of US20160369298; herein SEQ ID NO: 2149), QRGNNPAATADVNT (SEQ ID NO: 64 of US20160369298; herein SEQ ID NO: 2150), QRGNNHAATADVNT (SEQ ID NO: 65 of US20160369298; herein SEQ ID NO: 2151), QEENNIAATPGVNT (SEQ ID NO: 66 of US20160369298; herein SEQ ID NO: 2152), QPPNNMAATHEVNT (SEQ ID NO: 67 of US20160369298; herein SEQ ID NO: 2153), QHHNNSAATTIVNT (SEQ ID NO: 68 of US20160369298; herein SEQ ID NO: 2154), QTTNNRAAFNMVET (SEQ ID NO: 69 of US20160369298; herein SEQ ID NO: 2155), QKKNNNAASKKVAT (SEQ ID NO: 70 of US20160369298; herein SEQ ID NO: 2156), QGGNNKAADDAVKT (SEQ ID NO: 71 of US20160369298; herein SEQ ID NO: 2157), QAAKGGAADDAVKT (SEQ ID NO: 72 of US20160369298; herein SEQ ID NO: 2158), QDDRAAAANESVDT (SEQ ID NO: 73 of US20160369298; herein SEQ ID NO: 2159), QQQHDDAAYQRVHT (SEQ ID NO: 74 of US20160369298; herein SEQ ID NO: 2160), QSSSSLAAVSTVQT (SEQ ID NO: 75 of US20160369298; herein SEQ ID NO: 2161), QNNQTTAAIRNVTT (SEQ ID NO: 76 of US20160369298; herein SEQ ID NO: 2162), NYNKKSDNVDFT (SEQ ID NO: 77 of US20160369298; herein SEQ ID NO: 2163), NYNKKSENVDFT (SEQ ID NO: 78 of US20160369298; herein SEQ ID NO: 2164), NYNKKSLNVDFT (SEQ ID NO: 79 of US20160369298; herein SEQ ID NO: 2165), NYNKKSPNVDFT (SEQ ID NO: 80 of US20160369298; herein SEQ ID NO: 2166), NYSKKSHCVDFT (SEQ ID NO: 81 of US20160369298; herein SEQ ID NO: 2167), NYRKTIYVDFT (SEQ ID NO: 82 of US20160369298; herein SEQ ID NO: 2168), NYKEKKDVHFT (SEQ ID NO: 83 of US20160369298; herein SEQ ID NO: 2169), NYGHRAIVQFT (SEQ ID NO: 84 of US20160369298; herein SEQ ID NO: 2170), NYANHQFVVCT (SEQ ID NO: 85 of US20160369298; herein SEQ ID NO: 2171), NYDDDPTGVLLT (SEQ ID NO: 86 of US20160369298; herein SEQ ID NO: 2172), NYDDPTGVLLT (SEQ ID NO: 87 of US20160369298; herein SEQ ID NO: 2173), NFEQQNSVEWT (SEQ ID NO: 88 of US20160369298; herein SEQ ID NO: 2174), SQSGASN (SEQ ID NO: 89 and SEQ ID NO: 241 of US20160369298; herein SEQ ID NO: 2175), NNGSQA (SEQ ID NO: 90 of US20160369298; herein SEQ ID NO: 2176), YYLSRTNTPSGTTTWSRLQFSQAGA (SEQ ID NO: 91 of US20160369298; herein SEQ ID NO: 2177), SKTSADNNNSEYSWTG (SEQ ID NO: 92 of US20160369298; herein SEQ ID NO: 2178), HKDDEEKF (SEQ ID NO: 93, 209, 214, 219, 224, 234, 239, and 244 of US20160369298; herein SEQ ID NO: 2179), KQGSEKTNVDIEEV (SEQ ID NO: 94 of US20160369298; herein SEQ ID NO: 2180), QRGNNQAATADVNT (SEQ ID NO: 95 of US20160369298; herein SEQ ID NO: 2181), NYNKKSVNVDFT (SEQ ID NO: 96 of US20160369298; herein SEQ ID NO: 2182), SQSGASNYNTPSGTTTQSRLQFSTSADNNNSEYSWTGATKYH (SEQ ID NO: 106 of US20160369298; herein SEQ ID NO: 2183), SASGASNFNSEGGSLTQSSLGFSTDGENNNSDFSWTGATKYH (SEQ ID NO: 107 of US20160369298; herein SEQ ID NO: 2184), SQSGASNYNTPSGTTTQSRLQFSTDGENNNSDFSWTGATKYH (SEQ ID NO: 108 of US20160369298; herein SEQ ID NO: 2185), SASGASNYNTPSGTTTQSRLQFSTSADNNNSEFSWPGATTYH (SEQ ID NO: 109 of US20160369298; herein SEQ ID NO: 2186), SQSGASNFNSEGGSLTQSSLGFSTDGENNNSDFSWTGATKYH (SEQ ID NO: 110 of US20160369298; herein SEQ ID NO: 2187), SASGASNYNTPSGSLTQSSLGFSTDGENNNSDFSWTGATKYH (SEQ ID NO: 111 of US20160369298; herein SEQ ID NO: 2188), SQSGASNYNTPSGTTTQSRLQFSTSADNNNSDFSWTGATKYH (SEQ ID NO: 112 of US20160369298; herein SEQ ID NO: 2189), SGAGASNFNSEGGSLTQSSLGFSTDGENNNSDFSWTGATKYH (SEQ ID NO: 113 of US20160369298; herein SEQ ID NO: 2190), SGAGASN (SEQ ID NO: 176 of US20160369298; herein SEQ ID NO: 2191), NSEGGSLTQSSLGFS (SEQ ID NO: 177, 185, 193 and 202 of US20160369298; herein SEQ ID NO: 2192), TDGENNNSDFS (SEQ ID NO: 178 of US20160369298; herein SEQ ID NO: 2193), SEFSWPGATT (SEQ ID NO: 179 of US20160369298; herein SEQ ID NO: 2194), TSADNNNSDFSWT (SEQ ID NO: 180 of US20160369298; herein SEQ ID NO: 2195), SQSGASNY (SEQ ID NO: 181, 187, and 198 of US20160369298; herein SEQ ID NO: 2196), NTPSGTTTQSRLQFS (SEQ ID NO: 182, 188, 191, and 199 of US20160369298; herein SEQ ID NO: 2197), TSADNNNSEYSWTGATKYH (SEQ ID NO: 183 of US20160369298; herein SEQ ID NO: 2198), SASGASNF (SEQ ID NO: 184 of US20160369298; herein SEQ ID NO: 2199), TDGENNNSDFSWTGATKYH (SEQ ID NO: 186, 189, 194, 197, and 203 of US20160369298; herein SEQ ID NO: 2200), SASGASNY (SEQ ID NO: 190 and SEQ ID NO: 195 of US20160369298; herein SEQ ID NO: 2201), TSADNNNSEFSWPGATTYH (SEQ ID NO: 192 of US20160369298; herein SEQ ID NO: 2202), NTPSGSLTQSSLGFS (SEQ ID NO: 196 of US20160369298; herein SEQ ID NO: 2203), TSADNNNSDFSWTGATKYH (SEQ ID NO: 200 of US20160369298; herein SEQ ID NO: 2204), SGAGASNF (SEQ ID NO: 201 of US20160369298; herein SEQ ID NO: 2205), CTCCAGVVSVVSMRSRVCVNSGCAGCTDHCVVSRNSGTCVMSACACAA (SEQ ID NO: 204 of US20160369298; herein SEQ ID NO: 2206), CTCCAGAGAGGCAACAGACAAGCAGCTACCGCAGATGTCAACACACAA (SEQ ID NO: 205 of US20160369298; herein SEQ ID NO: 2207), SAAGASN (SEQ ID NO: 206 of US20160369298; herein SEQ ID NO: 2208), YFLSRTNTESGSTTQSTLRFSQAG (SEQ ID NO: 207 of US20160369298; herein SEQ ID NO: 2209), SKTSADNNNSDFS (SEQ ID NO: 208, 228, and 253 of US20160369298; herein SEQ ID NO: 2210), KQGSEKTDVDIDKV (SEQ ID NO: 210 of US20160369298; herein SEQ ID NO: 2211), STAGASN (SEQ ID NO: 211 of US20160369298; herein SEQ ID NO: 2212), YFLSRTNTTTSGIETQSTLRFSQAG (SEQ ID NO: 212 and SEQ ID NO: 247 of US20160369298; herein SEQ ID NO: 213), SKTDGENNNSDFS (SEQ ID NO: 213 and SEQ ID NO: 248 of US20160369298; herein SEQ ID NO: 2214), KQGAAADDVEIDGV (SEQ ID NO: 215 and SEQ ID NO: 250 of US20160369298; herein SEQ ID NO: 2215), SEAGASN (SEQ ID NO: 216 of US20160369298; herein SEQ ID NO: 2216), YYLSRTNTPSGTTTQSRLQFSQAG (SEQ ID NO: 217, 232 and 242 of US20160369298; herein SEQ ID NO: 2217), SKTSADNNNSEYS (SEQ ID NO: 218, 233, 238, and 243 of US20160369298; herein SEQ ID NO: 2218), KQGSEKTNVDIEKV (SEQ ID NO: 220, 225 and 245 of US20160369298; herein SEQ ID NO: 2219), YFLSRTNDASGSDTKSTLLFSQAG (SEQ ID NO: 222 of US20160369298; herein SEQ ID NO: 2220), STTPSENNNSEYS (SEQ ID NO: 223 of US20160369298; herein SEQ ID NO: 2221), SAAGATN (SEQ ID NO: 226 and SEQ ID NO: 251 of US20160369298; herein SEQ ID NO: 2222), YFLSRTNGEAGSATLSELRFSQAG (SEQ ID NO: 227 of US20160369298; herein SEQ ID NO: 2223), HGDDADRF (SEQ ID NO: 229 and SEQ ID NO: 254 of US20160369298; herein SEQ ID NO: 2224), KQGAEKSDVEVDRV (SEQ ID NO: 230 and SEQ ID NO: 255 of US20160369298; herein SEQ ID NO: 2225), KQDSGGDNIDIDQV (SEQ ID NO: 235 of US20160369298; herein SEQ ID NO: 2226), SDAGASN (SEQ ID NO: 236 of US20160369298; herein SEQ ID NO: 2227), YFLSRTNTEGGHDTQSTLRFSQAG (SEQ ID NO: 237 of US20160369298; herein SEQ ID NO: 2228), KEDGGGSDVAIDEV (SEQ ID NO: 240 of US20160369298; herein SEQ ID NO: 2229), SNAGASN (SEQ ID NO: 246 of US20160369298; herein SEQ ID NO: 2230), and YFLSRTNGEAGSATLSELRFSQPG (SEQ ID NO: 252 of US20160369298; herein SEQ ID NO: 2231). Non-limiting examples of nucleotide sequences that may encode the amino acid mutated sites include the following, AGCVVMDCAGGARSCASCAAC (SEQ ID NO: 97 of US20160369298; herein SEQ ID NO: 2232), AACRACRRSMRSMAGGCA (SEQ ID NO: 98 of US20160369298; herein SEQ ID NO: 2233), CACRRGGACRRCRMSRRSARSITF (SEQ ID NO: 99 of US20160369298; herein SEQ ID NO: 2234), TATTTCTGAGCAGAACAAACRVCVVSRSCGGAMNCVHSACGMHSTCAVVSCTFVDS TTTTCTCAGSBCRGSGCG (SEQ ID NO: 100 of US20160369298; herein SEQ ID NO: 2235), TCAAMAMMAVNSRVCSRSAACAACAACAGTRASTTCTCGTGGMMAGGA (SEQ ID NO: 101 of US20160369298; herein SEQ ID NO: 2236), AAGSAARRCRSCRVSRVARVCRATRYCGMSNHCRVMVRSGTC (SEQ ID NO: 102 of US20160369298; herein SEQ ID NO: 2237), CAGVVSVVSMRSRVCVNSGCAGCTDHCVVSRNSGTCVMSACA (SEQ ID NO: 103 of US20160369298; herein SEQ ID NO: 2238), AACTWCRVSVASMVSVHSDDTGTGSWSTKSACT (SEQ ID NO: 104 of US20160369298; herein SEQ ID NO: 2239), TTGTTGAACATCACCACGTGACGCACGTTC (SEQ ID NO: 256 of US20160369298; herein SEQ ID NO: 2240), TCCCCGTGGTTCTACTACATAATGTGGCCG (SEQ ID NO: 257 of US20160369298; herein SEQ ID NO: 2241), TTCCACACTCCGTTTTGGATAATGTTGAAC (SEQ ID NO: 258 of US20160369298; herein SEQ ID NO: 2242), AGGGACATCCCCAGCTCCATGCTGTGGTCG (SEQ ID NO: 259 of US20160369298; herein SEQ ID NO: 2243), AGGGACAACCCCTCCGACTCGCCCTAATCC (SEQ ID NO: 260 of US20160369298; herein SEQ ID NO: 2244), TCCTAGTAGAAGACACCCTCTCACTGCCCG (SEQ ID NO: 261 of US20160369298; herein SEQ ID NO: 2245), AGTACCATGTACACCCACTCTCCCAGTGCC (SEQ ID NO: 262 of US20160369298; herein SEQ ID NO: 2246), ATATGGACGTTCATGCTGATCACCATACCG (SEQ ID NO: 263 of US20160369298; herein SEQ ID NO: 2247), AGCAGGAGCTCCTTGGCCTCAGCGTGCGAG (SEQ ID NO: 264 of US20160369298; herein SEQ ID NO: 2248), ACAAGCAGCTCACTATGACAACCACTGAC (SEQ ID NO: 265 of US20160369298; herein SEQ ID NO: 2249), CAGCCTAGGAACTGGCTTCCTGGACCCTGTTACCGCCAGCAGAGAGTCTCAAMAMM AVNSRVCSRSAACAACAACAGTRASTTCTCCTGGMMAGGAGCTACCAAGTACCACC TCAATGGCAGAGACTCTCTGGTGAATCCCGGACCAGCTATGGCAAGCCACRRGGAC RRCRMSRRSARSTTTTTTCCTCAGAGCGGGGTTCTCATCTTGGGAAGSAARRCRSCR VSRVARVCRATRYCGMSNHCRVMVRSGTCATGATTACAGACGAAGAGGAGATCTGG AC (SEQ ID NO: 266 of US20160369298; herein SEQ ID NO: 2250), TGGACAATGGCGGTCGTCTCTCAGAGTTKTKKT (SEQ ID NO: 267 of US20160369298; herein SEQ ID NO: 2251), AGAGGACCKKTCCTCGATGGTTCATGGTGGAGTTA (SEQ ID NO: 268 of US20160369298; herein SEQ ID NO: 2252), CCACTTAGGGCCTGGTCGATACCGTTCGGTG (SEQ ID NO: 269 of US20160369298; herein SEQ ID NO: 2253), and TCTCGCCCCAAGAGTAGAAACCCTFCSTTYYG (SEQ ID NO: 270 of US20160369298; herein SEQ ID NO: 2254).

[0110] In some embodiments, the AAV serotype may comprise an ocular cell targeting peptide as described in International Patent Publication WO2016134375, the contents of which are herein incorporated by reference in their entirety, such as, but not limited to SEQ ID NO: 9, and SEQ ID NO: 10 of WO2016134375. Further, any of the ocular cell targeting peptides or amino acids described in WO2016134375, may be inserted into any parent AAV serotype, such as, but not limited to, AAV2 (SEQ ID NO:8 of WO2016134375; herein SEQ ID NO: 2255), or AAV9 (SEQ ID NO: 11 of WO2016134375; herein SEQ ID NO: 2256). In some embodiments, modifications, such as insertions are made in AAV2 proteins at P34-A35, T138-A139, A139-P140, G453-T454, N587-R588, and/or R588-Q589. In certain embodiments, insertions are made at D384, G385, 1560, T561, N562, E563, E564, E565, N704, and/or Y705 of AAV9. The ocular cell targeting peptide may be, but is not limited to, any of the following amino acid sequences, GSTPPPM (SEQ ID NO: 1 of WO2016134375; herein SEQ ID NO: 2257), or GETRAPL (SEQ ID NO: 4 of WO2016134375; herein SEQ ID NO: 2258).

[0111] In some embodiments, the AAV serotype may be modified as described in the United States Publication US 20170145405 the contents of which are herein incorporated by reference in their entirety, AAV serotypes may include, modified AAV2 (e.g., modifications at Y444F, Y500F, Y730F and/or S662V), modified AAV3 (e.g., modifications at Y705F, Y731F and/or T492V), and modified AAV6 (e.g., modifications at S663V and/or T492V).

[0112] In some embodiments, the AAV serotype may be modified as described in the International Publication WO2017083722 the contents of which are herein incorporated by reference in their entirety, AAV serotypes may include, AAV1 (Y705+731F+T492V), AAV2 (Y444+500+730F+T491V), AAV3 (Y705+731F), AAV5, AAV 5(Y436+693+719F), AAV6 (VP3 variant Y705F/Y731F/T492V), AAV8 (Y733F), AAV9, AAV9 (VP3 variant Y731F), and AAV10 (Y733F).

[0113] In some embodiments, the AAV serotype may comprise, as described in International Patent Publication WO2017015102, the contents of which are herein incorporated by reference in their entirety, an engineered epitope comprising the amino acids SPAKFA (SEQ ID NO: 24 of WO2017015102, herein SEQ ID NO: 2259) or NKDKLN (SEQ ID NO:2 of WO2017015102; herein SEQ ID NO: 2260). The epitope may be inserted in the region of amino acids 665 to 670 based on the numbering of the VP1 capsid of AAV8 (SEQ ID NO:3 of WO2017015102) and/or residues 664 to 668 of AAV3B (SEQ ID NO:3).

[0114] In one embodiment, the AAV serotype may be, or may have a sequence as described in International Patent Publication WO2017058892, the contents of which are herein incorporated by reference in their entirety, such as, but not limited to, AAV variants with capsid proteins that may comprise a substitution at one or more (e.g., 2, 3, 4, 5, 6, or 7) of amino acid residues 262-268, 370-379, 451-459, 472-473, 493-500, 528-534, 547-552, 588-597, 709-710, 716-722 of AAV1, in any combination, or the equivalent amino acid residues in AAV2, AAV3, AAV4, AAV5, AAV6, AAV7, AAV8, AAV9, AAV10, AAV11, AAV12, AAVrh8 AAVrh10, AAVrh32.33, bovine AAV or avian AAV. The amino acid substitution may be, but is not limited to, any of the amino acid sequences described in WO2017058892. In one embodiment, the AAV may comprise an amino acid substitution at residues 256L, 258K, 259Q, 261S, 263A, 264S, 265T, 266G, 272H, 385S, 386Q, S472R, V473D, N500E547S, 709A, 710N, 716D, 717N, 718N, 720L, A456T, Q457T, N458Q, K459S, T492S, K493A, S586R, S587G, S588N, T589R and/or 722T of AAV1 (SEQ ID NO: 1 of WO2017058892) in any combination, 244N, 246Q, 248R, 249E, 2501, 251K, 252S, 253G, 254S, 255V, 256D, 263Y, 377E, 378N, 453L, 456R, 532Q, 533P, 535N, 536P, 537G, 538T, 539T, 540A, 541T, 542Y, 543L, 546N, 653V, 654P, 656S, 697Q, 698F, 704D, 705S, 706T, 707G, 708E, 709Y and/or 710R of AAV5 (SEQ ID NO:5 of WO2017058892) in any combination, 248R, 316V, 317Q, 318D, 319S, 443N, 530N, 531S, 532Q 533P, 534A, 535N, 540A, 541 T, 542Y, 543L, 545G, 546N, 697Q, 704D, 706T, 708E, 709Y and/or 710R of AAV5 (SEQ ID NO: 5 of WO2017058892) in any combination, 264S, 266G, 269N, 272H, 457Q, 588S and/or 589I of AAV6 (SEQ ID NO:6 WO2017058892) in any combination, 457T, 459N, 496G, 499N, 500N, 589Q, 590N and/or 592A of AAV8 (SEQ ID NO: 8 WO2017058892) in any combination, 451I, 452N, 453G, 454S, 455G, 456Q, 457N and/or 458Q of AAV9 (SEQ ID NO: 9 WO2017058892) in any combination.

[0115] In some embodiments, the AAV may include a sequence of amino acids at positions 155, 156 and 157 of VP1 or at positions 17, 18, 19 and 20 of VP2, as described in International Publication No. WO 2017066764, the contents of which are herein incorporated by reference in their entirety. The sequences of amino acid may be, but not limited to, N—S—S, S—X—S, S—S—Y, N—X—S, N—S—Y, S—X—Y and N—X—Y, where N, X and Y are, but not limited to, independently non-serine, or non-threonine amino acids, wherein the AAV may be, but not limited to AAV1, AAV2, AAV3, AAV4, AAV5, AAV6, AAV7, AAV8, AAV9, AAV10, AAV11 and AAV12. In some embodiments, the AAV may include a deletion of at least one amino acid at positions 156, 157 or 158 of VP1 or at positions 19, 20 or 21 of VP2, wherein the AAV may be, but not limited to AAV1, AAV2, AAV3, AAV4, AAV5, AAV6, AAV7, AAV8, AAV9, AAV10, AAV11 and AAV12.

[0116] In one embodiment, the AAV serotype may be as described in Jackson et al (Frontiers in Molecular Neuroscience 9:154 (2016)), the contents of which are herein incorporated by reference in their entirety. In some embodiments, the AAV serotype is PHP.B or AAV9. In some embodiments, the AAV serotype is paired with a synapsin promoter to enhance neuronal transduction, as compared to when more ubiquitous promoters are used (i.e., CBA or CMV).

[0117] In one embodiment, peptides for inclusion in an AAV serotype may be identified by isolating human splenocytes, restimulating the splenocytes in vitro using individual peptides spanning the amino acid sequence of the AAV capsid protein, IFN-gamma ELISpot with the individual peptides used for the in vitro restimulation, bioinformatics analysis to determine the given allele restriction of 15-mers identified by IFN-gamma ELISpot, identification of candidate reactive 9-mer epitopes for a given allele, synthesis candidate 9-mers, second IFN-gamma ELISpot screening of splenocytes from subjects carrying the specific alleles to which identified AAV epitopes are predicted to bind, determine the AAV capsid-reactive CD8+ T cell epitopes and determine the frequency of subjects reacting to a given AAV epitope.

[0118] AAV particles comprising a modulatory polynucleotide encoding the siRNA molecules may be prepared or derived from various serotypes of AAVs, including, but not limited to, AAV1, AAV2, AAV3, AAV4, AAV5, AAV6, AAV7, AAV8, AAV9, AAV9.47, AAV9(hu14), AAV10, AAV11, AAV12, AAVrh8, AAVrh10, AAV-DJ8 and AAV-DJ. In some cases, different serotypes of AAVs may be mixed together or with other types of viruses to produce chimeric AAV particles. As a non-limiting example, the AAV particle is derived from the AAV9 serotype.

### Viral Genome

[0119] In one embodiment, as shown in an AAV particle comprises a viral genome with a payload region.

[0120] In one embodiment, the viral genome may comprise the components as shown in FIG. 1. The payload region 110 is located within the viral genome 100. At the 5′ and/or the 3′ end of the viral genome 100 there may be at least one inverted terminal repeat (ITR) 120. Between the 5′ ITR 120 and the payload region 110, there may be a promoter region 130. In one embodiment, the payload region may comprise at least one modulatory polynucleotide.

[0121] In one embodiment, the viral genome 100 may comprise the components as shown in FIG. 2. The payload region 110 is located within the viral genome 100. At the 5′ and/or the 3′ end of the viral genome 100 there may be at least one inverted terminal repeat (ITR) 120. Between the 5′ ITR 120 and the payload region 110, there may be a promoter region 130. Between the promoter region 130 and the payload region 110, there may be an intron region 140. In one embodiment, the payload region may comprise at least one modulatory polynucleotide.

[0122] In one embodiment, the viral genome 100 may comprise the components as shown in FIG. 3. At the 5′ and/or the 3′ end of the viral genome 100 there may be at least one inverted terminal repeat (ITR) 120. Within the viral genome 100, there may be an enhancer region 150, a promoter region 130, an intron region 140, and a payload region 110. In one embodiment, the payload region may comprise at least one modulatory polynucleotide.

[0123] In one embodiment, the viral genome 100 may comprise the components as shown in FIG. 4. At the 5′ and/or the 3′ end of the viral genome 100 there may be at least one inverted terminal repeat (ITR) 120. Within the viral genome 100, there may be an enhancer region 150, a promoter region 130, an intron region 140, a payload region 110, and a polyadenylation signal sequence region 160. In one embodiment, the payload region may comprise at least one modulatory polynucleotide.

[0124] In one embodiment, the viral genome 100 may comprise the components as shown in FIG. 5. At the 5′ and/or the 3′ end of the viral genome 100 there may be at least one inverted terminal repeat (ITR) 120. Within the viral genome 100, there may be at least one MCS region 170, an enhancer region 150, a promoter region 130, an intron region 140, a payload region 110, and a polyadenylation signal sequence region 160. In one embodiment, the payload region may comprise at least one modulatory polynucleotide.

[0125] In one embodiment, the viral genome 100 may comprise the components as shown in FIG. 6. At the 5′ and/or the 3′ end of the viral genome 100 there may be at least one inverted terminal repeat (ITR) 120. Within the viral genome 100, there may be at least one MCS region 170, an enhancer region 150, a promoter region 130, at least one exon region 180, at least one intron region 140, a payload region 110, and a polyadenylation signal sequence region 160. In one embodiment, the payload region may comprise at least one modulatory polynucleotide.

[0126] In one embodiment, the viral genome 100 may comprise the components as shown in FIGS. 7 and 8. Within the viral genome 100, there may be at least one promoter region 130, and a payload region 110. In one embodiment, the payload region may comprise at least one modulatory polynucleotide.

[0127] In one embodiment, the viral genome 100 may comprise the components as shown in FIG. 9. Within the viral genome 100, there may be at least one promoter region 130, a payload region 110, and a polyadenylation signal sequence region 160. In one embodiment, the payload region may comprise at least one modulatory polynucleotide.

### Viral Genome Size

[0128] In one embodiment, the viral genome which comprises a payload described herein, may be single stranded or double stranded viral genome. The size of the viral genome may be small, medium, large or the maximum size. Additionally, the viral genome may comprise a promoter and a polyA tail.

[0129] In one embodiment, the viral genome which comprises a payload described herein, may be a small single stranded viral genome. A small single stranded viral genome may be 2.7 to 3.5 kb in size such as about 2.7, 2.8, 2.9, 3.0, 3.1, 3.2, 3.3, 3.4, and 3.5 kb in size. As a non-limiting example, the small single stranded viral genome may be 3.2 kb in size. Additionally, the viral genome may comprise a promoter and a polyA tail.

[0130] In one embodiment, the viral genome which comprises a payload described herein, may be a small double stranded viral genome. A small double stranded viral genome may be 1.3 to 1.7 kb in size such as about 1.3, 1.4, 1.5, 1.6, and 1.7 kb in size. As a non-limiting example, the small double stranded viral genome may be 1.6 kb in size. Additionally, the viral genome may comprise a promoter and a polyA tail.

[0131] In one embodiment, the viral genome which comprises a payload described herein, may a medium single stranded viral genome. A medium single stranded viral genome may be 3.6 to 4.3 kb in size such as about 3.6, 3.7, 3.8, 3.9, 4.0, 4.1, 4.2 and 4.3 kb in size. As a non-limiting example, the medium single stranded viral genome may be 4.0 kb in size. Additionally, the viral genome may comprise a promoter and a polyA tail.

[0132] In one embodiment, the viral genome which comprises a payload described herein, may be a medium double stranded viral genome. A medium double stranded viral genome may be 1.8 to 2.1 kb in size such as about 1.8, 1.9, 2.0, and 2.1 kb in size. As a non-limiting example, the medium double stranded viral genome may be 2.0 kb in size. Additionally, the viral genome may comprise a promoter and a polyA tail.

[0133] In one embodiment, the viral genome which comprises a payload described herein, may be a large single stranded viral genome. A large single stranded viral genome may be 4.4 to 6.0 kb in size such as about 4.4, 4.5, 4.6, 4.7, 4.8, 4.9, 5.0, 5.1, 5.2, 5.3, 5.4, 5.5, 5.6, 5.7, 5.8, 5.9 and 6.0 kb in size. As a non-limiting example, the large single stranded viral genome may be 4.7 kb in size. As another non-limiting example, the large single stranded viral genome may be 4.8 kb in size. As yet another non-limiting example, the large single stranded viral genome may be 6.0 kb in size. Additionally, the viral genome may comprise a promoter and a polyA tail.

[0134] In one embodiment, the viral genome which comprises a payload described herein, may be a large double stranded viral genome. A large double stranded viral genome may be 2.2 to 3.0 kb in size such as about 2.2, 2.3, 2.4, 2.5, 2.6, 2.7, 2.8, 2.9 and 3.0 kb in size. As a non-limiting example, the large double stranded viral genome may be 2.4 kb in size. Additionally, the viral genome may comprise a promoter and a polyA tail.

### Viral Genome Component: Inverted Terminal Repeats (ITRs)

[0135] The AAV particles of the present invention comprise a viral genome with at least one ITR region and a payload region. In one embodiment the viral genome has two ITRs. These two ITRs flank the payload region at the 5′ and 3′ ends. The ITRs function as origins of replication comprising recognition sites for replication. ITRs comprise sequence regions which can be complementary and symmetrically arranged. ITRs incorporated into viral genomes of the invention may be comprised of naturally occurring polynucleotide sequences or recombinantly derived polynucleotide sequences.

[0136] The ITRs may be derived from the same serotype as the capsid, selected from any of the serotypes listed in Table 1, or a derivative thereof. The ITR may be of a different serotype from the capsid. In one embodiment the AAV particle has more than one ITR. In a non-limiting example, the AAV particle has a viral genome comprising two ITRs. In one embodiment the ITRs are of the same serotype as one another. In another embodiment the ITRs are of different serotypes. Non-limiting examples include zero, one or both of the ITRs having the same serotype as the capsid. In one embodiment both ITRs of the viral genome of the AAV particle are AAV2 ITRs.

[0137] Independently, each ITR may be about 100 to about 150 nucleotides in length. An ITR may be about 100-105 nucleotides in length, 106-110 nucleotides in length, 111-115 nucleotides in length, 116-120 nucleotides in length, 121-125 nucleotides in length, 126-130 nucleotides in length, 131-135 nucleotides in length, 136-140 nucleotides in length, 141-145 nucleotides in length or 146-150 nucleotides in length. In one embodiment the ITRs are 140-142 nucleotides in length. Non limiting examples of ITR length are 102, 140, 141, 142, 145 nucleotides in length, and those having at least 95% identity thereto.

[0138] In one embodiment, the AAV particle comprises a nucleic acid sequence encoding an siRNA molecule which may be located near the 5′ end of the flip ITR in an expression vector. In another embodiment, the AAV particle comprises a nucleic acid sequence encoding an siRNA molecule may be located near the 3′ end of the flip ITR in an expression vector. In yet another embodiment, the AAV particle comprises a nucleic acid sequence encoding an siRNA molecule may be located near the 5′ end of the flop ITR in an expression vector. In yet another embodiment, the AAV particle comprises a nucleic acid sequence encoding an siRNA molecule may be located near the 3′ end of the flop ITR in an expression vector. In one embodiment, the AAV particle comprises a nucleic acid sequence encoding an siRNA molecule may be located between the 5′ end of the flip ITR and the 3′ end of the flop ITR in an expression vector. In one embodiment, the AAV particle comprises a nucleic acid sequence encoding an siRNA molecule may be located between (e.g., half-way between the 5′ end of the flip ITR and 3′ end of the flop ITR or the 3′ end of the flop ITR and the 5′ end of the flip ITR), the 3′ end of the flip ITR and the 5′ end of the flip ITR in an expression vector. As a non-limiting example, the AAV particle comprises a nucleic acid sequence encoding an siRNA molecule may be located within 1, 2, 3, 4, 5, 6, 7, 8, 9, 10, 11, 12, 13, 14, 15, 16, 17, 18, 19, 20, 21, 22, 23, 24, 25, 26, 27, 28, 29, 30 or more than 30 nucleotides downstream from the 5′ or 3′ end of an ITR (e.g., Flip or Flop ITR) in an expression vector. As a non-limiting example, the AAV particle comprises a nucleic acid sequence encoding an siRNA molecule may be located within 1, 2, 3, 4, 5, 6, 7, 8, 9, 10, 11, 12, 13, 14, 15, 16, 17, 18, 19, 20, 21, 22, 23, 24, 25, 26, 27, 28, 29, 30 or more than 30 nucleotides upstream from the 5′ or 3′ end of an ITR (e.g., Flip or Flop ITR) in an expression vector. As another non-limiting example, the AAV particle comprises a nucleic acid sequence encoding an siRNA molecule may be located within 1-5, 1-10, 1-15, 1-20, 1-25, 1-30, 5-10, 5-15, 5-20, 5-25, 5-30, 10-15, 10-20, 10-25, 10-30, 15-20, 15-25, 15-30, 20-25, 20-30 or 25-30 nucleotides downstream from the 5′ or 3′ end of an ITR (e.g., Flip or Flop ITR) in an expression vector. As another non-limiting example, the AAV particle comprises a nucleic acid sequence encoding an siRNA molecule may be located within 1-5, 1-10, 1-15, 1-20, 1-25, 1-30, 5-10, 5-15, 5-20, 5-25, 5-30, 10-15, 10-20, 10-25, 10-30, 15-20, 15-25, 15-30, 20-25, 20-30 or 25-30 upstream from the 5′ or 3′ end of an ITR (e.g., Flip or Flop ITR) in an expression vector. As a non-limiting example, the AAV particle comprises a nucleic acid sequence encoding an siRNA molecule may be located within the first 1%, 2%, 3%, 4%, 5%, 6%, 7%, 8%, 9%, 10%, 15%, 20%, 25% or more than 25% of the nucleotides upstream from the 5′ or 3′ end of an ITR (e.g., Flip or Flop ITR) in an expression vector. As another non-limiting example, the AAV particle comprises a nucleic acid sequence encoding an siRNA molecule may be located with the first 1-5%, 1-10%, 1-15%, 1-20%, 1-25%, 5-10%, 5-15%, 5-20%, 5-25%, 10-15%, 10-20%, 10-25%, 15-20%, 15-25%, or 20-25% downstream from the 5′ or 3′ end of an ITR (e.g., Flip or Flop ITR) in an expression vector.

### Viral Genome Component: Promoters

[0139] In one embodiment, the payload region of the viral genome comprises at least one element to enhance the transgene target specificity and expression (See e.g., Powell et al. Viral Expression Cassette Elements to Enhance Transgene Target Specificity and Expression in Gene Therapy, 2015; the contents of which are herein incorporated by reference in its entirety). Non-limiting examples of elements to enhance the transgene target specificity and expression include promoters, endogenous miRNAs, post-transcriptional regulatory elements (PREs), polyadenylation (PolyA) signal sequences and upstream enhancers (USEs), CMV enhancers and introns.

[0140] A person skilled in the art may recognize that expression of the polypeptides of the invention in a target cell may require a specific promoter, including but not limited to, a promoter that is species specific, inducible, tissue-specific, or cell cycle-specific (Parr et al., Nat. Med. 3:1145-9 (1997); the contents of which are herein incorporated by reference in their entirety).

[0141] In one embodiment, the promoter is deemed to be efficient when it drives expression of the polypeptide(s) encoded in the payload region of the viral genome of the AAV particle.

[0142] In one embodiment, the promoter is a promoter deemed to be efficient to drive the expression of the modulatory polynucleotide.

[0143] In one embodiment, the promoter is a promoter deemed to be efficient when it drives expression in the cell being targeted.

[0144] In one embodiment, the promoter drives expression of the payload for a period of time in targeted tissues. Expression driven by a promoter may be for a period of 1 hour, 2, hours, 3 hours, 4 hours, 5 hours, 6 hours, 7 hours, 8 hours, 9 hours, 10 hours, 11 hours, 12 hours, 13 hours, 14 hours, 15 hours, 16 hours, 17 hours, 18 hours, 19 hours, 20 hours, 21 hours, 22 hours, 23 hours, 1 day, 2 days, 3 days, 4 days, 5 days, 6 days, 1 week, 8 days, 9 days, 10 days, 11 days, 12 days, 13 days, 2 weeks, 15 days, 16 days, 17 days, 18 days, 19 days, 20 days, 3 weeks, 22 days, 23 days, 24 days, 25 days, 26 days, 27 days, 28 days, 29 days, 30 days, 31 days, 1 month, 2 months, 3 months, 4 months, 5 months, 6 months, 7 months, 8 months, 9 months, 10 months, 11 months, 1 year, 13 months, 14 months, 15 months, 16 months, 17 months, 18 months, 19 months, 20 months, 21 months, 22 months, 23 months, 2 years, 3 years, 4 years, 5 years, 6 years, 7 years, 8 years, 9 years, 10 years or more than 10 years. Expression may be for 1-5 hours, 1-12 hours, 1-2 days, 1-5 days, 1-2 weeks, 1-3 weeks, 1-4 weeks, 1-2 months, 1-4 months, 1-6 months, 2-6 months, 3-6 months, 3-9 months, 4-8 months, 6-12 months, 1-2 years, 1-5 years, 2-5 years, 3-6 years, 3-8 years, 4-8 years or 5-10 years.

[0145] In one embodiment, the promoter drives expression of the payload for at least 1 month, 2 months, 3 months, 4 months, 5 months, 6 months, 7 months, 8 months, 9 months, 10 months, 11 months, 1 year, 2 years, 3 years 4 years, 5 years, 6 years, 7 years, 8 years, 9 years, 10 years, 11 years, 12 years, 13 years, 14 years, 15 years, 16 years, 17 years, 18 years, 19 years, 20 years, 21 years, 22 years, 23 years, 24 years, 25 years, 26 years, 27 years, 28 years, 29 years, 30 years, 31 years, 32 years, 33 years, 34 years, 35 years, 36 years, 37 years, 38 years, 39 years, 40 years, 41 years, 42 years, 43 years, 44 years, 45 years, 46 years, 47 years, 48 years, 49 years, 50 years, 55 years, 60 years, 65 years, or more than 65 years.

[0146] Promoters may be naturally occurring or non-naturally occurring. Non-limiting examples of promoters include viral promoters, plant promoters and mammalian promoters. In some embodiments, the promoters may be human promoters. In some embodiments, the promoter may be truncated.

[0147] Promoters which drive or promote expression in most tissues include, but are not limited to, human elongation factor 1α-subunit (EF1α), cytomegalovirus (CMV) immediate-early enhancer and/or promoter, chicken β-actin (CBA) and its derivative CAG, β glucuronidase (GUSB), or ubiquitin C (UBC). Tissue-specific expression elements can be used to restrict expression to certain cell types such as, but not limited to, muscle specific promoters, B cell promoters, monocyte promoters, leukocyte promoters, macrophage promoters, pancreatic acinar cell promoters, endothelial cell promoters, lung tissue promoters, astrocyte promoters, or nervous system promoters which can be used to restrict expression to neurons, astrocytes, or oligodendrocytes.

[0148] Non-limiting examples of muscle-specific promoters include mammalian muscle creatine kinase (MCK) promoter, mammalian desmin (DES) promoter, mammalian troponin I (TNNI2) promoter, and mammalian skeletal alpha-actin (ASKA) promoter (see, e.g. U.S. Patent Publication US 20110212529, the contents of which are herein incorporated by reference in their entirety)

[0149] Non-limiting examples of tissue-specific expression elements for neurons include neuron-specific enolase (NSE), platelet-derived growth factor (PDGF), platelet-derived growth factor B-chain (PDGF-3), synapsin (Syn), methyl-CpG binding protein 2 (MeCP2), Ca²⁺/calmodulin-dependent protein kinase II (CaMKII), metabotropic glutamate receptor 2 (mGluR2), neurofilament light (NFL) or heavy (NFH), β-globin minigene nβ2, preproenkephalin (PPE), enkephalin (Enk) and excitatory amino acid transporter 2 (EAAT2) promoters. Non-limiting examples of tissue-specific expression elements for astrocytes include glial fibrillary acidic protein (GFAP) and EAAT2 promoters. A non-limiting example of a tissue-specific expression element for oligodendrocytes includes the myelin basic protein (MBP) promoter.

[0150] In one embodiment, the promoter may be less than 1 kb. The promoter may have a length of 200, 210, 220, 230, 240, 250, 260, 270, 280, 290, 300, 310, 320, 330, 340, 350, 360, 370, 380, 390, 400, 410, 420, 430, 440, 450, 460, 470, 480, 490, 500, 510, 520, 530, 540, 550, 560, 570, 580, 590, 600, 610, 620, 630, 640, 650, 660, 670, 680, 690, 700, 710, 720, 730, 740, 750, 760, 770, 780, 790, 800 or more than 800 nucleotides. The promoter may have a length between 200-300, 200-400, 200-500, 200-600, 200-700, 200-800, 300-400, 300-500, 300-600, 300-700, 300-800, 400-500, 400-600, 400-700, 400-800, 500-600, 500-700, 500-800, 600-700, 600-800 or 700-800.

[0151] In one embodiment, the promoter may be a combination of two or more components of the same or different starting or parental promoters such as, but not limited to, CMV and CBA. Each component may have a length of 200, 210, 220, 230, 240, 250, 260, 270, 280, 290, 300, 310, 320, 330, 340, 350, 360, 370, 380, 381, 382, 383, 384, 385, 386, 387, 388, 389, 390, 400, 410, 420, 430, 440, 450, 460, 470, 480, 490, 500, 510, 520, 530, 540, 550, 560, 570, 580, 590, 600, 610, 620, 630, 640, 650, 660, 670, 680, 690, 700, 710, 720, 730, 740, 750, 760, 770, 780, 790, 800 or more than 800. Each component may have a length between 200-300, 200-400, 200-500, 200-600, 200-700, 200-800, 300-400, 300-500, 300-600, 300-700, 300-800, 400-500, 400-600, 400-700, 400-800, 500-600, 500-700, 500-800, 600-700, 600-800 or 700-800. In one embodiment, the promoter is a combination of a 382 nucleotide CMV-enhancer sequence and a 260 nucleotide CBA-promoter sequence.

[0152] In one embodiment, the viral genome comprises a ubiquitous promoter. Non-limiting examples of ubiquitous promoters include CMV, CBA (including derivatives CAG, CBh, etc.), EF-1α, PGK, UBC, GUSB (hGBp), and UCOE (promoter of HNRPA2B1-CBX3).

[0153] Yu et al. (Molecular Pain 2011, 7:63; the contents of which are herein incorporated by reference in their entirety) evaluated the expression of eGFP under the CAG, EF1α, PGK and UBC promoters in rat DRG cells and primary DRG cells using lentiviral vectors and found that UBC showed weaker expression than the other 3 promoters and only 10-12% glial expression was seen for all promoters. Soderblom et al. (E. Neuro 2015; the contents of which are herein incorporated by reference in its entirety) evaluated the expression of eGFP in AAV8 with CMV and UBC promoters and AAV2 with the CMV promoter after injection in the motor cortex. Intranasal administration of a plasmid containing a UBC or EF1α promoter showed a sustained airway expression greater than the expression with the CMV promoter (See e.g., Gill et al., Gene Therapy 2001, Vol. 8, 1539-1546, the contents of which are herein incorporated by reference in their entirety). Husain et al. (Gene Therapy 2009; the contents of which are herein incorporated by reference in its entirety) evaluated an HOH construct with a hGUSB promoter, a HSV-1LAT promoter and an NSE promoter and found that the HPH construct showed weaker expression than NSE in mouse brain. Passini and Wolfe (J. Virol. 2001, 12382-12392, the contents of which are herein incorporated by reference in its entirety) evaluated the long-term effects of the HPH vector following an intraventricular injection in neonatal mice and found that there was sustained expression for at least 1 year. Low expression in all brain regions was found by Xu et al. (Gene Therapy 2001, 8, 1323-1332; the contents of which are herein incorporated by reference in their entirety) when NFL and NFH promoters were used as compared to the CMV-lacZ, CMV-luc, EF, GFAP, hENK, nAChR, PPE, PPE+wpre, NSE (0.3 kb), NSE (1.8 kb) and NSE (1.8 kb+wpre). Xu et al. found that the promoter activity in descending order was NSE (1.8 kb), EF, NSE (0.3 kb), GFAP, CMV, hENK, PPE, NFL and NFH. NFL is a 650 nucleotide promoter and NFH is a 920 nucleotide promoter which are both absent in the liver but NFH is abundant in the sensory proprioceptive neurons, brain and spinal cord and NFH is present in the heart. Scn8a is a 470 nucleotide promoter which expresses throughout the DRG, spinal cord and brain with particularly high expression seen in the hippocampal neurons and cerebellar Purkinje cells, cortex, thalamus and hypothalamus (See e.g., Drews et al. Identification of evolutionary conserved, functional noncoding elements m the promoter region of the sodium channel gene SCN8A. Mamm Genome (2007) 18:723-731; and Raymond et al. Expression of Alternatively Spliced Sodium Channel α-subunit genes. Journal of Biological Chemistry (2004) 279(44) 46234-46241; the contents of each of which are herein incorporated by reference in their entireties).

[0154] Any of promoters taught by the aforementioned Yu, Soderblom, Gill. Husain, Passini, Xu, Drews or Raymond may be used in the present inventions.

[0155] In one embodiment, the promoter is not cell specific.

[0156] In one embodiment, the promoter is an ubiquitin c (UBC) promoter. The UBC promoter may have a size of 300-350 nucleotides. As a non-limiting example, the UBC promoter is 332 nucleotides.

[0157] In one embodiment, the promoter is a f-glucuronidase (GUSB) promoter. The GUSB promoter may have a size of 350-400 nucleotides. As a non-limiting example, the GUSB promoter is 378 nucleotides.

[0158] In one embodiment, the promoter is a neurofilament light (NFL) promoter. The NFL promoter may have a size of 600-700 nucleotides. As a non-limiting example, the NFL promoter is 650 nucleotides. As a non-limiting example, the construct may be AAV-promoter-CMV/globin intron-modulatory polynucleotide-RBG, where the AAV may be self-complementary and the AAV may be the DJ serotype.

[0159] In one embodiment, the promoter is a neurofilament heavy (NFH) promoter. The NFH promoter may have a size of 900-950 nucleotides. As a non-limiting example, the NFH promoter is 920 nucleotides. As a non-limiting example, the construct may be AAV-promoter-CMV/globin intron-modulatory polynucleotide-RBG, where the AAV may be self-complementary and the AAV may be the DJ serotype.

[0160] In one embodiment, the promoter is a scn8a promoter. The scn8a promoter may have a size of 450-500 nucleotides. As a non-limiting example, the scn8a promoter is 470 nucleotides. As a non-limiting example, the construct may be AAV-promoter-CMV/globin intron-modulatory polynucleotide-RBG, where the AAV may be self-complementary and the AAV may be the DJ serotype

[0161] In one embodiment, the viral genome comprises a Pol III promoter.

[0162] In one embodiment, the viral genome comprises a P promoter.

[0163] In one embodiment, the viral genome comprises a FXN promoter.

[0164] In one embodiment, the promoter is a phosphoglycerate kinase 1 (PGK) promoter.

[0165] In one embodiment, the promoter is a chicken β-actin (CBA) promoter.

[0166] In one embodiment, the promoter is a CAG promoter which is a construct comprising the cytomegalovirus (CMV) enhancer fused to the chicken beta-actin (CBA) promoter.

[0167] In one embodiment, the promoter is a cytomegalovirus (CMV) promoter.

[0168] In one embodiment, the viral genome comprises a H1 promoter.

[0169] In one embodiment, the viral genome comprises a U6 promoter.

[0170] In one embodiment, the promoter is a liver or a skeletal muscle promoter. Non-limiting examples of liver promoters include human α-1-antitrypsin (hAAT) and thyroxine binding globulin (TBG). Non-limiting examples of skeletal muscle promoters include Desmin, MCK or synthetic C5-12.

[0171] In one embodiment, the promoter is a RNA pol III promoter. As a non-limiting example, the RNA pol III promoter is U6. As a non-limiting example, the RNA pol III promoter is H1.

[0172] In one embodiment, the viral genome comprises two promoters. As a non-limiting example, the promoters are an EF1α promoter and a CMV promoter.

[0173] In one embodiment, the viral genome comprises an enhancer element, a promoter and/or a 5′UTR intron. The enhancer element, also referred to herein as an “enhancer,” may be, but is not limited to, a CMV enhancer, the promoter may be, but is not limited to, a CMV, CBA, UBC, GUSB, NSE, Synapsin, MeCP2, and GFAP promoter and the 5′UTR/intron may be, but is not limited to, SV40, and CBA-MVM. As a non-limiting example, the enhancer, promoter and/or intron used in combination may be: (1) CMV enhancer, CMV promoter, SV40 5′UTR intron; (2) CMV enhancer, CBA promoter, SV 40 5′UTR intron; (3) CMV enhancer, CBA promoter, CBA-MVM 5′UTR intron; (4) UBC promoter; (5) GUSB promoter; (6) NSE promoter; (7) Synapsin promoter; (8) MeCP2 promoter, (9) GFAP promoter, (10) H1 promoter; and (11) U6 promoter.

[0174] In one embodiment, the viral genome comprises an engineered promoter.

[0175] In another embodiment the viral genome comprises a promoter from a naturally expressed protein.

### Viral Genome Component: Untranslated Regions (UTRs)

[0176] By definition, wild type untranslated regions (UTRs) of a gene are transcribed but not translated. Generally, the 5′ UTR starts at the transcription start site and ends at the start codon and the 3′ UTR starts immediately following the stop codon and continues until the termination signal for transcription.

[0177] Features typically found in abundantly expressed genes of specific target organs may be engineered into UTRs to enhance the stability and protein production. As a non-limiting example, a 5′ UTR from mRNA normally expressed in the liver (e.g., albumin, serum amyloid A, Apolipoprotein A/B/E, transferrin, alpha fetoprotein, erythropoietin, or Factor VIII) may be used in the viral genomes of the AAV particles of the invention to enhance expression in hepatic cell lines or liver.

[0178] While not wishing to be bound by theory, wild-type 5′ untranslated regions (UTRs) include features which play roles in translation initiation. Kozak sequences, which are commonly known to be involved in the process by which the ribosome initiates translation of many genes, are usually included in 5′ UTRs. Kozak sequences have the consensus CCR(A/G)CCAUGG, where R is a purine (adenine or guanine) three bases upstream of the start codon (ATG), which is followed by another ‘G’.

[0179] In one embodiment, the 5′UTR in the viral genome includes a Kozak sequence.

[0180] In one embodiment, the 5′UTR in the viral genome does not include a Kozak sequence.

[0181] While not wishing to be bound by theory, wild-type 3′ UTRs are known to have stretches of Adenosines and Uridines embedded therein. These AU rich signatures are particularly prevalent in genes with high rates of turnover. Based on their sequence features and functional properties, the AU rich elements (AREs) can be separated into three classes (Chen et al, 1995, the contents of which are herein incorporated by reference in its entirety): Class I AREs, such as, but not limited to, c-Myc and MyoD, contain several dispersed copies of an AUUUA motif within U-rich regions. Class II AREs, such as, but not limited to, GM-CSF and TNF-α, possess two or more overlapping UUAUUUA(U/A)(U/A) nonamers. Class III ARES, such as, but not limited to, c-Jun and Myogenin, are less well defined. These U rich regions do not contain an AUUUA motif. Most proteins binding to the AREs are known to destabilize the messenger, whereas members of the ELAV family, most notably HuR, have been documented to increase the stability of mRNA. HuR binds to AREs of all the three classes. Engineering the HuR specific binding sites into the 3′ UTR of nucleic acid molecules will lead to HuR binding and thus, stabilization of the message in vivo.

[0182] Introduction, removal or modification of 3′ UTR AU rich elements (AREs) can be used to modulate the stability of polynucleotides. When engineering specific polynucleotides, e.g., payload regions of viral genomes, one or more copies of an ARE can be introduced to make polynucleotides less stable and thereby curtail translation and decrease production of the resultant protein. Likewise, AREs can be identified and removed or mutated to increase the intracellular stability and thus increase translation and production of the resultant protein.

[0183] In one embodiment, the 3′ UTR of the viral genome may include an oligo(dT) sequence for templated addition of a poly-A tail.

[0184] In one embodiment, the viral genome may include at least one miRNA seed, binding site or full sequence, microRNAs (or miRNA or miR) are 19-25 nucleotide noncoding RNAs that bind to the sites of nucleic acid targets and down-regulate gene expression either by reducing nucleic acid molecule stability or by inhibiting translation. A microRNA sequence comprises a “seed” region, i.e., a sequence in the region of positions 2-8 of the mature microRNA, which sequence has perfect Watson-Crick complementarity to the miRNA target sequence of the nucleic acid.

[0185] In one embodiment, the viral genome may be engineered to include, alter or remove at least one miRNA binding site, sequence or seed region.

[0186] Any UTR from any gene known in the art may be incorporated into the viral genome of the AAV particle. These UTRs, or portions thereof, may be placed in the same orientation as in the gene from which they were selected or they may be altered in orientation or location. In one embodiment, the UTR used in the viral genome of the AAV particle may be inverted, shortened, lengthened, made with one or more other 5′ UTRs or 3′ UTRs known in the art. As used herein, the term “altered” as it relates to a UTR, means that the UTR has been changed in some way in relation to a reference sequence. For example, a 3′ or 5′ UTR may be altered relative to a wild type or native UTR by the change in orientation or location as taught above or may be altered by the inclusion of additional nucleotides, deletion of nucleotides, swapping or transposition of nucleotides.

[0187] In one embodiment, the viral genome of the AAV particle comprises at least one artificial UTRs which is not a variant of a wild type UTR

[0188] In one embodiment, the viral genome of the AAV particle comprises UTRs which have been selected from a family of transcripts whose proteins share a common function, structure, feature or property.

### Viral Genome Component: Polradenvlation Sequence

[0189] In one embodiment, the viral genome of the AAV particles of the present invention comprise at least one polyadenylation sequence. The viral genome of the AAV particle may comprise a polyadenylation sequence between the 3′ end of the payload coding sequence and the 5′ end of the 3′ITR.

[0190] In one embodiment, the polyadenylation sequence or “polyA sequence” may range from absent to about 500 nucleotides in length. The polyadenylation sequence may be, but is not limited to, 1, 2, 3, 4, 5, 6, 7, 8, 9, 10, 11, 12, 13, 14, 15, 16, 17, 18, 19, 20, 21, 22, 23, 24, 25, 26, 27, 28, 29, 30, 31, 32, 33, 34, 35, 36, 37, 38, 39, 40, 41, 42, 43, 44, 45, 46, 47, 48, 49, 50, 51, 52, 53, 54, 55, 56, 57, 58, 59, 60, 61, 62, 63, 64, 65, 66, 67, 68, 69, 70, 71, 72, 73, 74, 75, 76, 77, 78, 79, 80, 81, 82, 83, 84, 85, 86, 87, 88, 89, 90, 91, 92, 93, 94, 95, 96, 97, 98, 99, 100, 101, 102, 103, 104, 105, 106, 107, 108, 109, 110, 111, 112, 113, 114, 115, 116, 117, 118, 119, 120, 121, 122, 123, 124, 125, 126, 127, 128, 129, 130, 131, 132, 133, 134, 135, 136, 137, 138, 139, 140, 141, 142, 143, 144, 145, 146, 147, 148, 149, 150, 151, 152, 153, 154, 155, 156, 157, 158, 159, 160, 161, 162, 163, 164, 165, 166, 167, 168, 169, 170, 171, 172, 173, 174, 175, 176, 177, 178, 179, 180, 181, 182, 183, 184, 185, 186, 187, 188, 189, 190, 191, 192, 193, 194, 195, 196, 197, 198, 199, 200, 201, 202, 203, 204, 205, 206, 207, 208, 209, 210, 211, 212, 213, 214, 215, 216, 217, 218, 219, 220, 221, 222, 223, 224, 225, 226, 227, 228, 229, 230, 231, 232, 233, 234, 235, 236, 237, 238, 239, 240, 241, 242, 243, 244, 245, 246, 247, 248, 249, 250, 251, 252, 253, 254, 255, 256, 257, 258, 259, 260, 261, 262, 263, 264, 265, 266, 267, 268, 269, 270, 271, 272, 273, 274, 275, 276, 277, 278, 279, 280, 281, 282, 283, 284, 285, 286, 287, 288, 289, 290, 291, 292, 293, 294, 295, 296, 297, 298, 299, 300, 301, 302, 303, 304, 305, 306, 307, 308, 309, 310, 311, 312, 313, 314, 315, 316, 317, 318, 319, 320, 321, 322, 323, 324, 325, 326, 327, 328, 329, 330, 331, 332, 333, 334, 335, 336, 337, 338, 339, 340, 341, 342, 343, 344, 345, 346, 347, 348, 349, 350, 351, 352, 353, 354, 355, 356, 357, 358, 359, 360, 361, 362, 363, 364, 365, 366, 367, 368, 369, 370, 371, 372, 373, 374, 375, 376, 377, 378, 379, 380, 381, 382, 383, 384, 385, 386, 387, 388, 389, 390, 391, 392, 393, 394, 395, 396, 397, 398, 399, 400, 401, 402, 403, 404, 405, 406, 407, 408, 409, 410, 411, 412, 413, 414, 415, 416, 417, 418, 419, 420, 421, 422, 423, 424, 425, 426, 427, 428, 429, 430, 431, 432, 433, 434, 435, 436, 437, 438, 439, 440, 441, 442, 443, 444, 445, 446, 447, 448, 449, 450, 451, 452, 453, 454, 455, 456, 457, 458, 459, 460, 461, 462, 463, 464, 465, 466, 467, 468, 469, 470, 471, 472, 473, 474, 475, 476, 477, 478, 479, 480, 481, 482, 483, 484, 485, 486, 487, 488, 489, 490, 491, 492, 493, 494, 495, 496, 497, 498, 499, and 500 nucleotides in length.

[0191] In one embodiment, the polyadenylation sequence is 50-100 nucleotides in length.

[0192] In one embodiment, the polyadenylation sequence is 50-150 nucleotides in length.

[0193] In one embodiment, the polyadenylation sequence is 50-160 nucleotides in length.

[0194] In one embodiment, the polyadenylation sequence is 50-200 nucleotides in length.

[0195] In one embodiment, the polyadenylation sequence is 60-100 nucleotides in length.

[0196] In one embodiment, the polyadenylation sequence is 60-150 nucleotides in length.

[0197] In one embodiment, the polyadenylation sequence is 60-160 nucleotides in length.

[0198] In one embodiment, the polyadenylation sequence is 60-200 nucleotides in length.

[0199] In one embodiment, the polyadenylation sequence is 70-100 nucleotides in length.

[0200] In one embodiment, the polyadenylation sequence is 70-150 nucleotides in length.

[0201] In one embodiment, the polyadenylation sequence is 70-160 nucleotides in length.

[0202] In one embodiment, the polyadenylation sequence is 70-200 nucleotides in length.

[0203] In one embodiment, the polyadenylation sequence is 80-100 nucleotides in length.

[0204] In one embodiment, the polyadenylation sequence is 80-150 nucleotides in length.

[0205] In one embodiment, the polyadenylation sequence is 80-160 nucleotides in length.

[0206] In one embodiment, the polyadenylation sequence is 80-200 nucleotides in length.

[0207] In one embodiment, the polyadenylation sequence is 90-100 nucleotides in length.

[0208] In one embodiment, the polyadenylation sequence is 90-150 nucleotides in length.

[0209] In one embodiment, the polyadenylation sequence is 90-160 nucleotides in length.

[0210] In one embodiment, the polyadenylation sequence is 90-200 nucleotides in length.

[0211] In one embodiment, the AAV particle comprises a nucleic acid sequence encoding an siRNA molecule may be located upstream of the polyadenylation sequence in an expression vector. Further, the AAV particle comprises a nucleic acid sequence encoding an siRNA molecule may be located downstream of a promoter such as, but not limited to, CMV, U6, CAG, CBA or a CBA promoter with a SV40 intron or a human betaglobin intron in an expression vector. As a non-limiting example, the AAV particle comprises a nucleic acid sequence encoding an siRNA molecule may be located within 1, 2, 3, 4, 5, 6, 7, 8, 9, 10, 11, 12, 13, 14, 15, 16, 17, 18, 19, 20, 21, 22, 23, 24, 25, 26, 27, 28, 29, 30 or more than 30 nucleotides downstream from the promoter and/or upstream of the polyadenylation sequence in an expression vector. As another non-limiting example, the AAV particle comprises a nucleic acid sequence encoding an siRNA molecule may be located within 1-5, 1-10, 1-15, 1-20, 1-25, 1-30, 5-10, 5-15, 5-20, 5-25, 5-30, 10-15, 10-20, 10-25, 10-30, 15-20, 15-25, 15-30, 20-25, 20-30 or 25-30 nucleotides downstream from the promoter and/or upstream of the polyadenylation sequence in an expression vector. As a non-limiting example, the AAV particle comprises a nucleic acid sequence encoding an siRNA molecule may be located within the first 1%, 2%, 3%, 4%, 5%, 6%, 7%, 8%, 9%, 10%, 15%, 20%, 25% or more than 25% of the nucleotides downstream from the promoter and/or upstream of the polyadenylation sequence in an expression vector. As another non-limiting example, the AAV particle comprises a nucleic acid sequence encoding an siRNA molecule may be located with the first 1-5%, 1-10%, 1-15%, 1-20%, 1-25%, 5-10%, 5-15%, 5-20%, 5-25%, 10-15%, 10-20%, 10-25%, 15-20%, 15-25%, or 20-25% downstream from the promoter and/or upstream of the polyadenylation sequence in an expression vector.

[0212] In one embodiment, the AAV particle comprises a rabbit globin polyadenylation (polyA) signal sequence.

[0213] In one embodiment, the AAV particle comprises a human growth hormone polyadenylation (polyA) signal sequence.

### Viral Genome Component: Introns

[0214] In one embodiment, the payload region comprises at least one element to enhance the expression such as one or more introns or portions thereof. Non-limiting examples of introns include, MVM (67-97 bps), F.IX truncated intron 1 (300 bps), f-globin SD/immunoglobulin heavy chain splice acceptor (250 bps), adenovirus splice donor/immunoglobin splice acceptor (500 bps), SV40 late splice donor/splice acceptor (19S/16S) (180 bps) and hybrid adenovirus splice donor/gG splice acceptor (230 bps).

[0215] In one embodiment, the intron or intron portion may be 100-500 nucleotides in length. The intron may have a length of 80, 90, 100, 110, 120, 130, 140, 150, 160, 170, 171, 172, 173, 174, 175, 176, 177, 178, 179, 180, 190, 200, 210, 220, 230, 240, 250, 260, 270, 280, 290, 300, 310, 320, 330, 340, 350, 360, 370, 380, 390, 400, 410, 420, 430, 440, 450, 460, 470, 480, 490 or 500, The intron may have a length between 80-100, 80-120, 80-140, 80-160, 80-180, 80-200, 80-250, 80-300, 80-350, 80-400, 80-450, 80-500, 200-300, 200-400, 200-500, 300-400, 300-500, or 400-500.

[0216] In one embodiment, the AAV viral genome may comprise a promoter such as, but not limited to, CMV or U6. As a non-limiting example, the promoter for the AAV comprising the nucleic acid sequence for the siRNA molecules of the present invention is a CMV promoter. As another non-limiting example, the promoter for the AAV comprising the nucleic acid sequence for the siRNA molecules of the present invention is a U6 promoter.

[0217] In one embodiment, the AAV viral genome may comprise a CMV promoter.

[0218] In one embodiment, the AAV viral genome may comprise a U6 promoter.

[0219] In one embodiment, the AAV viral genome may comprise a CMV and a U6 promoter.

[0220] In one embodiment, the AAV viral genome may comprise a H1 promoter.

[0221] In one embodiment, the AAV viral genome may comprise a CBA promoter.

[0222] In one embodiment, the encoded siRNA molecule may be located downstream of a promoter in an expression vector such as, but not limited to, CMV, U6, H1, CBA, CAG, or a CBA promoter with an intron such as SV40 or others known in the art. Further, the encoded siRNA molecule may also be located upstream of the polyadenylation sequence in an expression vector. As a non-limiting example, the encoded siRNA molecule may be located within 1, 2, 3, 4, 5, 6, 7, 8, 9, 10, 11, 12, 13, 14, 15, 16, 17, 18, 19, 20, 21, 22, 23, 24, 25, 26, 27, 28, 29, 30 or more than 30 nucleotides downstream from the promoter and/or upstream of the polyadenylation sequence in an expression vector. As another non-limiting example, the encoded siRNA molecule may be located within 1-5, 1-10, 1-15, 1-20, 1-25, 1-30, 5-10, 5-15, 5-20, 5-25, 5-30, 10-15, 10-20, 10-25, 10-30, 15-20, 15-25, 15-30, 20-25, 20-30 or 25-30 nucleotides downstream from the promoter and/or upstream of the polyadenylation sequence in an expression vector. As a non-limiting example, the encoded siRNA molecule may be located within the first 1%, 2%, 3%, 4%, 5%, 6%, 7%, 8%, 9%, 10%, 15%, 20%, 25% or more than 25% of the nucleotides downstream from the promoter and/or upstream of the polyadenylation sequence in an expression vector. As another non-limiting example, the encoded siRNA molecule may be located with the first 1-5%, 1-10%, 1-15%, 1-20%, 1-25%, 5-10%, 5-15%, 5-20%, 5-25%, 10-15%, 10-20%, 10-25%, 15-20%, 15-25%, or 20-25% downstream from the promoter and/or upstream of the polyadenylation sequence in an expression vector.

### Viral Genome Component: Filler Sequence

[0223] In one embodiment, the viral genome comprises one or more filler sequences.

[0224] In one embodiment, the viral genome comprises one or more filler sequences in order to have the length of the viral genome be the optimal size for packaging. As a non-limiting example, the viral genome comprises at least one filler sequence in order to have the length of the viral genome be about 2.3 kb. As a non-limiting example, the viral genome comprises at least one filler sequence in order to have the length of the viral genome be about 4.6 kb.

[0225] In one embodiment, the viral genome comprises one or more filler sequences in order to reduce the likelihood that a hairpin structure of the vector genome (e.g., a modulatory polynucleotide described herein) may be read as an inverted terminal repeat (ITR) during expression and/or packaging. As a non-limiting example, the viral genome comprises at least one filler sequence in order to have the length of the viral genome be about 2.3 kb. As a non-limiting example, the viral genome comprises at least one filler sequence in order to have the length of the viral genome be about 4.6 kb

[0226] In one embodiment, the viral genome is a single stranded (ss) viral genome and comprises one or more filler sequences which have a length about between 0.1 kb-3.8 kb, such as, but not limited to, 0.1 kb, 0.2 kb, 0.3 kb, 0.4 kb, 0.5 kb, 0.6 kb, 0.7 kb, 0.8 kb, 0.9 kb, 1 kb, 1.1 kb, 1.2 kb, 1.3 kb, 1.4 kb, 1.5 kb, 1.6 kb, 1.7 kb, 1.8 kb, 1.9 kb, 2 kb, 2.1 kb, 2.2 kb, 2.3 kb, 2.4 kb, 2.5 kb, 2.6 kb, 2.7 kb, 2.8 kb, 2.9 kb, 3 kb, 3.1 kb, 3.2 kb, 3.3 kb, 3.4 kb, 3.5 kb, 3.6 kb, 3.7 kb, or 3.8 kb. As a non-limiting example, the total length filler sequence in the vector genome is 3.1 kb. As a non-limiting example, the total length filler sequence in the vector genome is 2.7 kb. As a non-limiting example, the total length filler sequence in the vector genome is 0.8 kb. As a non-limiting example, the total length filler sequence in the vector genome is 0.4 kb. As a non-limiting example, the length of each filler sequence in the vector genome is 0.8 kb. As a non-limiting example, the length of each filler sequence in the vector genome is 0.4 kb.

[0227] In one embodiment, the viral genome is a self-complementary (sc) viral genome and comprises one or more filler sequences which have a length about between 0.1 kb-1.5 kb, such as, but not limited to, 0.1 kb, 0.2 kb, 0.3 kb, 0.4 kb, 0.5 kb, 0.6 kb, 0.7 kb, 0.8 kb, 0.9 kb, 1 kb, 1.1 kb, 1.2 kb, 1.3 kb, 1.4 kb, or 1.5 kb. As a non-limiting example, the total length filler sequence in the vector genome is 0.8 kb. As a non-limiting example, the total length filler sequence in the vector genome is 0.4 kb. As a non-limiting example, the length of each filler sequence in the vector genome is 0.8 kb. As a non-limiting example, the length of each filler sequence in the vector genome is 0.4 kb

[0228] In one embodiment, the viral genome comprises any portion of a filler sequence. The viral genome may comprise 1%, 2%, 3%, 4%, 5%, 6%, 7%, 8%, 9%, 10%, 15%, 20%, 25%, 30%, 35%, 40%, 45%, 50%, 55%, 60%, 65%, 70%, 75%, 80%, 85%, 90%, 95%, or 99% of a filler sequence.

[0229] In one embodiment, the viral genome is a single stranded (ss) viral genome and comprises one or more filler sequences in order to have the length of the viral genome be about 4.6 kb. As a non-limiting example, the viral genome comprises at least one filler sequence and the filler sequence is located 3′ to the 5′ ITR sequence. As a non-limiting example, the viral genome comprises at least one filler sequence and the filler sequence is located 5′ to a promoter sequence. As a non-limiting example, the viral genome comprises at least one filler sequence and the filler sequence is located 3′ to the polyadenylation signal sequence. As a non-limiting example, the viral genome comprises at least one filler sequence and the filler sequence is located 5′ to the 3′ ITR sequence. As a non-limiting example, the viral genome comprises at least one filler sequence, and the filler sequence is located between two intron sequences. As a non-limiting example, the viral genome comprises at least one filler sequence, and the filler sequence is located within an intron sequence. As a non-limiting example, the viral genome comprises two filler sequences, and the first filler sequence is located 3′ to the 5′ ITR sequence and the second filler sequence is located 3′ to the polyadenylation signal sequence. As a non-limiting example, the viral genome comprises two filler sequences, and the first filler sequence is located 5′ to a promoter sequence and the second filler sequence is located 3′ to the polyadenylation signal sequence. As a non-limiting example, the viral genome comprises two filler sequences, and the first filler sequence is located 3′ to the 5′ ITR sequence and the second filler sequence is located 5′ to the 5′ ITR sequence.

[0230] In one embodiment, the viral genome is a self-complementary (sc) viral genome and comprises one or more filler sequences in order to have the length of the viral genome be about 2.3 kb. As a non-limiting example, the viral genome comprises at least one filler sequence and the filler sequence is located 3′ to the 5′ ITR sequence. As a non-limiting example, the viral genome comprises at least one filler sequence and the filler sequence is located 5′ to a promoter sequence. As a non-limiting example, the viral genome comprises at least one filler sequence and the filler sequence is located 3′ to the polyadenylation signal sequence. As a non-limiting example, the viral genome comprises at least one filler sequence and the filler sequence is located 5′ to the 3′ ITR sequence. As a non-limiting example, the viral genome comprises at least one filler sequence, and the filler sequence is located between two intron sequences. As a non-limiting example, the viral genome comprises at least one filler sequence, and the filler sequence is located within an intron sequence. As a non-limiting example, the viral genome comprises two filler sequences, and the first filler sequence is located 3′ to the 5′ ITR sequence and the second filler sequence is located 3′ to the polyadenylation signal sequence. As a non-limiting example, the viral genome comprises two filler sequences, and the first filler sequence is located 5′ to a promoter sequence and the second filler sequence is located 3′ to the polyadenylation signal sequence. As a non-limiting example, the viral genome comprises two filler sequences, and the first filler sequence is located 3′ to the 5′ ITR sequence and the second filler sequence is located 5′ to the 5′ ITR sequence.

[0231] In one embodiment, the viral genome may comprise one or more filler sequences between one of more regions of the viral genome. In one embodiment, the filler region may be located before a region such as, but not limited to, a payload region, an inverted terminal repeat (ITR), a promoter region, an intron region, an enhancer region, a polyadenylation signal sequence region, a multiple cloning site (MCS) region, and/or an exon region. In one embodiment, the filler region may be located after a region such as, but not limited to, a payload region, an inverted terminal repeat (ITR), a promoter region, an intron region, an enhancer region, a polyadenylation signal sequence region, a multiple cloning site (MCS) region, and/or an exon region. In one embodiment, the filler region may be located before and after a region such as, but not limited to, a payload region, an inverted terminal repeat (ITR), a promoter region, an intron region, an enhancer region, a polyadenylation signal sequence region, a multiple cloning site (MCS) region, and/or an exon region.

[0232] In one embodiment, the viral genome may comprise one or more filler sequences which bifurcates at least one region of the viral genome. The bifurcated region of the viral genome may comprise 1%, 2%, 3%, 4%, 5%, 6%, 7%, 8%, 9%, 10%, 15%, 20%, 25%, 30%, 35%, 40%, 45%, 50%, 55%, 60%, 65%, 70%, 75%, 80%, 85%, 90%, 95%, or 99% of the of the region to the 5′ of the filler sequence region. As a non-limiting example, the filler sequence may bifurcate at least one region so that 10% of the region is located 5′ to the filler sequence and 90% of the region is located 3′ to the filler sequence. As a non-limiting example, the filler sequence may bifurcate at least one region so that 20% of the region is located 5′ to the filler sequence and 80% of the region is located 3′ to the filler sequence. As a non-limiting example, the filler sequence may bifurcate at least one region so that 30% of the region is located 5′ to the filler sequence and 70% of the region is located 3′ to the filler sequence. As a non-limiting example, the filler sequence may bifurcate at least one region so that 40% of the region is located 5′ to the filler sequence and 60% of the region is located 3′ to the filler sequence. As a non-limiting example, the filler sequence may bifurcate at least one region so that 50% of the region is located 5′ to the filler sequence and 50% of the region is located 3′ to the filler sequence. As a non-limiting example, the filler sequence may bifurcate at least one region so that 60% of the region is located 5′ to the filler sequence and 40% of the region is located 3′ to the filler sequence. As a non-limiting example, the filler sequence may bifurcate at least one region so that 70% of the region is located 5′ to the filler sequence and 30% of the region is located 3′ to the filler sequence. As a non-limiting example, the filler sequence may bifurcate at least one region so that 80% of the region is located 5′ to the filler sequence and 20% of the region is located 3′ to the filler sequence. As a non-limiting example, the filler sequence may bifurcate at least one region so that 90% of the region is located 5′ to the filler sequence and 10% of the region is located 3′ to the filler sequence.

[0233] In one embodiment, the viral genome comprises a filler sequence after the 5′ ITR.

[0234] In one embodiment, the viral genome comprises a filler sequence after the promoter region. In one embodiment, the viral genome comprises a filler sequence after the payload region. In one embodiment, the viral genome comprises a filler sequence after the intron region. In one embodiment, the viral genome comprises a filler sequence after the enhancer region. In one embodiment, the viral genome comprises a filler sequence after the polyadenylation signal sequence region. In one embodiment, the viral genome comprises a filler sequence after the MCS region. In one embodiment, the viral genome comprises a filler sequence after the exon region.

[0235] In one embodiment, the viral genome comprises a filler sequence before the promoter region. In one embodiment, the viral genome comprises a filler sequence before the payload region. In one embodiment, the viral genome comprises a filler sequence before the intron region. In one embodiment, the viral genome comprises a filler sequence before the enhancer region. In one embodiment, the viral genome comprises a filler sequence before the polyadenylation signal sequence region. In one embodiment, the viral genome comprises a filler sequence before the MCS region. In one embodiment, the viral genome comprises a filler sequence before the exon region.

[0236] In one embodiment, the viral genome comprises a filler sequence before the 3′ ITR.

[0237] In one embodiment, a filler sequence may be located between two regions, such as, but not limited to, the 5′ ITR and the promoter region. In one embodiment, a filler sequence may be located between two regions, such as, but not limited to, the 5′ ITR and the payload region. In one embodiment, a filler sequence may be located between two regions, such as, but not limited to, the 5′ ITR and the intron region. In one embodiment, a filler sequence may be located between two regions, such as, but not limited to, the 5′ ITR and the enhancer region. In one embodiment, a filler sequence may be located between two regions, such as, but not limited to, the 5′ ITR and the polyadenylation signal sequence region. In one embodiment, a filler sequence may be located between two regions, such as, but not limited to, the 5′ ITR and the MCS region.

[0238] In one embodiment, a filler sequence may be located between two regions, such as, but not limited to, the 5′ ITR and the exon region.

[0239] In one embodiment, a filler sequence may be located between two regions, such as, but not limited to, the promoter region and the payload region. In one embodiment, a filler sequence may be located between two regions, such as, but not limited to, the promoter region and the intron region. In one embodiment, a filler sequence may be located between two regions, such as, but not limited to, the promoter region and the enhancer region. In one embodiment, a filler sequence may be located between two regions, such as, but not limited to, the promoter region and the polyadenylation signal sequence region. In one embodiment, a filler sequence may be located between two regions, such as, but not limited to, the promoter region and the MCS region. In one embodiment, a filler sequence may be located between two regions, such as, but not limited to, the promoter region and the exon region. In one embodiment, a filler sequence may be located between two regions, such as, but not limited to, the promoter region and the 3′ ITR.

[0240] In one embodiment, a filler sequence may be located between two regions, such as, but not limited to, the payload region and the intron region. In one embodiment, a filler sequence may be located between two regions, such as, but not limited to, the payload region and the enhancer region. In one embodiment, a filler sequence may be located between two regions, such as, but not limited to, the payload region and the polyadenylation signal sequence region. In one embodiment, a filler sequence may be located between two regions, such as, but not limited to, the payload region and the MCS region. In one embodiment, a filler sequence may be located between two regions, such as, but not limited to, the payload region and the exon region.

[0241] In one embodiment, a filler sequence may be located between two regions, such as, but not limited to, the payload region and the 3′ ITR.

[0242] In one embodiment, a filler sequence may be located between two regions, such as, but not limited to, the intron region and the enhancer region. In one embodiment, a filler sequence may be located between two regions, such as, but not limited to, the intron region and the polyadenylation signal sequence region. In one embodiment, a filler sequence may be located between two regions, such as, but not limited to, the intron region and the MCS region. In one embodiment, a filler sequence may be located between two regions, such as, but not limited to, the intron region and the exon region. In one embodiment, a filler sequence may be located between two regions, such as, but not limited to, the intron region and the 3′ ITR. In one embodiment, a filler sequence may be located between two regions, such as, but not limited to, the enhancer region and the polyadenylation signal sequence region. In one embodiment, a filler sequence may be located between two regions, such as, but not limited to, the enhancer region and the MCS region. In one embodiment, a filler sequence may be located between two regions, such as, but not limited to, the enhancer region and the exon region. In one embodiment, a filler sequence may be located between two regions, such as, but not limited to, the enhancer region and the 3′ ITR.

[0243] In one embodiment, a filler sequence may be located between two regions, such as, but not limited to, the polyadenylation signal sequence region and the MCS region. In one embodiment, a filler sequence may be located between two regions, such as, but not limited to, the polyadenylation signal sequence region and the exon region. In one embodiment, a filler sequence may be located between two regions, such as, but not limited to, the polyadenylation signal sequence region and the 3′ ITR.

[0244] In one embodiment, a filler sequence may be located between two regions, such as, but not limited to, the MCS region and the exon region. In one embodiment, a filler sequence may be located between two regions, such as, but not limited to, the MCS region and the 3′ ITR.

[0245] In one embodiment, a filler sequence may be located between two regions, such as, but not limited to, the exon region and the 3′ ITR.

[0246] In one embodiment, a viral genome may comprise two filler sequences, the first filler sequence may be located between the 5′ ITR and promoter region, and the second filler sequence may be located between the promoter region and payload region. In one embodiment, a viral genome may comprise two filler sequences, the first filler sequence may be located between the 5′ ITR and promoter region, and the second filler sequence may be located between the promoter region and intron region. In one embodiment, a viral genome may comprise two filler sequences, the first filler sequence may be located between the 5′ ITR and promoter region, and the second filler sequence may be located between the promoter region and enhancer region. In one embodiment, a viral genome may comprise two filler sequences, the first filler sequence may be located between the 5′ ITR and promoter region, and the second filler sequence may be located between the promoter region and polyadenylation signal sequence region. In one embodiment, a viral genome may comprise two filler sequences, the first filler sequence may be located between the 5′ ITR and promoter region, and the second filler sequence may be located between the promoter region and MCS region. In one embodiment, a viral genome may comprise two filler sequences, the first filler sequence may be located between the 5′ ITR and promoter region, and the second filler sequence may be located between the promoter region and exon region. In one embodiment, a viral genome may comprise two filler sequences, the first filler sequence may be located between the 5′ ITR and promoter region, and the second filler sequence may be located between the promoter region and 3′ ITR. In one embodiment, a viral genome may comprise two filler sequences, the first filler sequence may be located between the 5′ ITR and promoter region, and the second filler sequence may be located between the payload region and intron region. In one embodiment, a viral genome may comprise two filler sequences, the first filler sequence may be located between the 5′ ITR and promoter region, and the second filler sequence may be located between the payload region and enhancer region. In one embodiment, a viral genome may comprise two filler sequences, the first filler sequence may be located between the 5′ ITR and promoter region, and the second filler sequence may be located between the payload region and polyadenylation signal sequence region. In one embodiment, a viral genome may comprise two filler sequences, the first filler sequence may be located between the 5′ ITR and promoter region, and the second filler sequence may be located between the payload region and MCS region. In one embodiment, a viral genome may comprise two filler sequences, the first filler sequence may be located between the 5′ ITR and promoter region, and the second filler sequence may be located between the payload region and exon region. In one embodiment, a viral genome may comprise two filler sequences, the first filler sequence may be located between the 5′ ITR and promoter region, and the second filler sequence may be located between the payload region and 3′ ITR. In one embodiment, a viral genome may comprise two filler sequences, the first filler sequence may be located between the 5′ ITR and promoter region, and the second filler sequence may be located between the intron region and enhancer region. In one embodiment, a viral genome may comprise two filler sequences, the first filler sequence may be located between the 5′ ITR and promoter region, and the second filler sequence may be located between the intron region and polyadenylation signal sequence region. In one embodiment, a viral genome may comprise two filler sequences, the first filler sequence may be located between the 5′ ITR and promoter region, and the second filler sequence may be located between the intron region and MCS region. In one embodiment, a viral genome may comprise two filler sequences, the first filler sequence may be located between the 5′ ITR and promoter region, and the second filler sequence may be located between the intron region and exon region. In one embodiment, a viral genome may comprise two filler sequences, the first filler sequence may be located between the 5′ ITR and promoter region, and the second filler sequence may be located between the intron region and 3′ ITR In one embodiment, a viral genome may comprise two filler sequences, the first filler sequence may be located between the 5′ ITR and promoter region, and the second filler sequence may be located between the enhancer region and polyadenylation signal sequence region. In one embodiment, a viral genome may comprise two filler sequences, the first filler sequence may be located between the 5′ ITR and promoter region, and the second filler sequence may be located between the enhancer region and MCS region. In one embodiment, a viral genome may comprise two filler sequences, the first filler sequence may be located between the 5′ ITR and promoter region, and the second filler sequence may be located between the enhancer region and exon region. In one embodiment, a viral genome may comprise two filler sequences, the first filler sequence may be located between the 5′ ITR and promoter region, and the second filler sequence may be located between the enhancer region and 3′ ITR. In one embodiment, a viral genome may comprise two filler sequences, the first filler sequence may be located between the 5′ ITR and promoter region, and the second filler sequence may be located between the polyadenylation signal sequence region and MCS region. In one embodiment, a viral genome may comprise two filler sequences, the first filler sequence may be located between the 5′ ITR and promoter region, and the second filler sequence may be located between the polyadenylation signal sequence region and exon region. In one embodiment, a viral genome may comprise two filler sequences, the first filler sequence may be located between the 5′ ITR and promoter region, and the second filler sequence may be located between the polyadenylation signal sequence region and 3′ ITR. In one embodiment, a viral genome may comprise two filler sequences, the first filler sequence may be located between the 5′ ITR and promoter region, and the second filler sequence may be located between the MCS region and exon region. In one embodiment, a viral genome may comprise two filler sequences, the first filler sequence may be located between the 5′ ITR and promoter region, and the second filler sequence may be located between the MCS region and 3′ ITR. In one embodiment, a viral genome may comprise two filler sequences, the first filler sequence may be located between the 5′ ITR and promoter region, and the second filler sequence may be located between the exon region and 3′ ITR.

[0247] In one embodiment, a viral genome may comprise two filler sequences, the first filler sequence may be located between the 5′ ITR and payload region, and the second filler sequence may be located between the promoter region and payload region. In one embodiment, a viral genome may comprise two filler sequences, the first filler sequence may be located between the 5′ ITR and payload region, and the second filler sequence may be located between the promoter region and intron region. In one embodiment, a viral genome may comprise two filler sequences, the first filler sequence may be located between the 5′ ITR and payload region, and the second filler sequence may be located between the promoter region and enhancer region. In one embodiment, a viral genome may comprise two filler sequences, the first filler sequence may be located between the 5′ ITR and payload region, and the second filler sequence may be located between the promoter region and polyadenylation signal sequence region. In one embodiment, a viral genome may comprise two filler sequences, the first filler sequence may be located between the 5′ ITR and payload region, and the second filler sequence may be located between the promoter region and MCS region. In one embodiment, a viral genome may comprise two filler sequences, the first filler sequence may be located between the 5′ ITR and payload region, and the second filler sequence may be located between the promoter region and exon region. In one embodiment, a viral genome may comprise two filler sequences, the first filler sequence may be located between the 5′ ITR and payload region, and the second filler sequence may be located between the promoter region and 3′ ITR. In one embodiment, a viral genome may comprise two filler sequences, the first filler sequence may be located between the 5′ ITR and payload region, and the second filler sequence may be located between the payload region and intron region. In one embodiment, a viral genome may comprise two filler sequences, the first filler sequence may be located between the 5′ ITR and payload region, and the second filler sequence may be located between the payload region and enhancer region. In one embodiment, a viral genome may comprise two filler sequences, the first filler sequence may be located between the 5′ ITR and payload region, and the second filler sequence may be located between the payload region and polyadenylation signal sequence region. In one embodiment, a viral genome may comprise two filler sequences, the first filler sequence may be located between the 5′ ITR and payload region, and the second filler sequence may be located between the payload region and MCS region. In one embodiment, a viral genome may comprise two filler sequences, the first filler sequence may be located between the 5′ ITR and payload region, and the second filler sequence may be located between the payload region and exon region. In one embodiment, a viral genome may comprise two filler sequences, the first filler sequence may be located between the 5′ ITR and payload region, and the second filler sequence may be located between the payload region and 3′ ITR. In one embodiment, a viral genome may comprise two filler sequences, the first filler sequence may be located between the 5′ ITR and payload region, and the second filler sequence may be located between the intron region and enhancer region. In one embodiment, a viral genome may comprise two filler sequences, the first filler sequence may be located between the 5′ ITR and payload region, and the second filler sequence may be located between the intron region and polyadenylation signal sequence region. In one embodiment, a viral genome may comprise two filler sequences, the first filler sequence may be located between the 5′ ITR and payload region, and the second filler sequence may be located between the intron region and MCS region. In one embodiment, a viral genome may comprise two filler sequences, the first filler sequence may be located between the 5′ ITR and payload region, and the second filler sequence may be located between the intron region and exon region. In one embodiment, a viral genome may comprise two filler sequences, the first filler sequence may be located between the 5′ ITR and payload region, and the second filler sequence may be located between the intron region and 3′ ITR. In one embodiment, a viral genome may comprise two filler sequences, the first filler sequence may be located between the 5′ ITR and payload region, and the second filler sequence may be located between the enhancer region and polyadenylation signal sequence region. In one embodiment, a viral genome may comprise two filler sequences, the first filler sequence may be located between the 5′ ITR and payload region, and the second filler sequence may be located between the enhancer region and MCS region. In one embodiment, a viral genome may comprise two filler sequences, the first filler sequence may be located between the 5′ ITR and payload region, and the second filler sequence may be located between the enhancer region and exon region. In one embodiment, a viral genome may comprise two filler sequences, the first filler sequence may be located between the 5′ ITR and payload region, and the second filler sequence may be located between the enhancer region and 3′ ITR. In one embodiment, a viral genome may comprise two filler sequences, the first filler sequence may be located between the 5′ ITR and payload region, and the second filler sequence may be located between the polyadenylation signal sequence region and MCS region. In one embodiment, a viral genome may comprise two filler sequences, the first filler sequence may be located between the 5′ ITR and payload region, and the second filler sequence may be located between the polyadenylation signal sequence region and exon region. In one embodiment, a viral genome may comprise two filler sequences, the first filler sequence may be located between the 5′ ITR and payload region, and the second filler sequence may be located between the polyadenylation signal sequence region and 3′ ITR. In one embodiment, a viral genome may comprise two filler sequences, the first filler sequence may be located between the 5′ ITR and payload region, and the second filler sequence may be located between the MCS region and exon region. In one embodiment, a viral genome may comprise two filler sequences, the first filler sequence may be located between the 5′ ITR and payload region, and the second filler sequence may be located between the MCS region and 3′ ITR. In one embodiment, a viral genome may comprise two filler sequences, the first filler sequence may be located between the 5′ ITR and payload region, and the second filler sequence may be located between the exon region and 3′ ITR.

[0248] In one embodiment, a viral genome may comprise two filler sequences, the first filler sequence may be located between the 5′ ITR and intron region, and the second filler sequence may be located between the promoter region and payload region. In one embodiment, a viral genome may comprise two filler sequences, the first filler sequence may be located between the 5′ ITR and intron region, and the second filler sequence may be located between the promoter region and intron region. In one embodiment, a viral genome may comprise two filler sequences, the first filler sequence may be located between the 5′ ITR and intron region, and the second filler sequence may be located between the promoter region and enhancer region. In one embodiment, a viral genome may comprise two filler sequences, the first filler sequence may be located between the 5′ ITR and intron region, and the second filler sequence may be located between the promoter region and polyadenylation signal sequence region. In one embodiment, a viral genome may comprise two filler sequences, the first filler sequence may be located between the 5′ ITR and intron region, and the second filler sequence may be located between the promoter region and MCS region. In one embodiment, a viral genome may comprise two filler sequences, the first filler sequence may be located between the 5′ ITR and intron region, and the second filler sequence may be located between the promoter region and exon region. In one embodiment, a viral genome may comprise two filler sequences, the first filler sequence may be located between the 5′ ITR and intron region, and the second filler sequence may be located between the promoter region and 3′ ITR. In one embodiment, a viral genome may comprise two filler sequences, the first filler sequence may be located between the 5′ ITR and intron region, and the second filler sequence may be located between the payload region and intron region. In one embodiment, a viral genome may comprise two filler sequences, the first filler sequence may be located between the 5′ ITR and intron region, and the second filler sequence may be located between the payload region and enhancer region. In one embodiment, a viral genome may comprise two filler sequences, the first filler sequence may be located between the 5′ ITR and intron region, and the second filler sequence may be located between the payload region and polyadenylation signal sequence region. In one embodiment, a viral genome may comprise two filler sequences, the first filler sequence may be located between the 5′ ITR and intron region, and the second filler sequence may be located between the payload region and MCS region. In one embodiment, a viral genome may comprise two filler sequences, the first filler sequence may be located between the 5′ ITR and intron region, and the second filler sequence may be located between the payload region and exon region. In one embodiment, a viral genome may comprise two filler sequences, the first filler sequence may be located between the 5′ ITR and intron region, and the second filler sequence may be located between the payload region and 3′ ITR. In one embodiment, a viral genome may comprise two filler sequences, the first filler sequence may be located between the 5′ ITR and intron region, and the second filler sequence may be located between the intron region and enhancer region. In one embodiment, a viral genome may comprise two filler sequences, the first filler sequence may be located between the 5′ ITR and intron region, and the second filler sequence may be located between the intron region and polyadenylation signal sequence region. In one embodiment, a viral genome may comprise two filler sequences, the first filler sequence may be located between the 5′ ITR and intron region, and the second filler sequence may be located between the intron region and MCS region. In one embodiment, a viral genome may comprise two filler sequences, the first filler sequence may be located between the 5′ ITR and intron region, and the second filler sequence may be located between the intron region and exon region. In one embodiment, a viral genome may comprise two filler sequences, the first filler sequence may be located between the 5′ ITR and intron region, and the second filler sequence may be located between the intron region and 3′ ITR. In one embodiment, a viral genome may comprise two filler sequences, the first filler sequence may be located between the 5′ ITR and intron region, and the second filler sequence may be located between the enhancer region and polyadenylation signal sequence region. In one embodiment, a viral genome may comprise two filler sequences, the first filler sequence may be located between the 5′ ITR and intron region, and the second filler sequence may be located between the enhancer region and MCS region. In one embodiment, a viral genome may comprise two filler sequences, the first filler sequence may be located between the 5′ ITR and intron region, and the second filler sequence may be located between the enhancer region and exon region. In one embodiment, a viral genome may comprise two filler sequences, the first filler sequence may be located between the 5′ ITR and intron region, and the second filler sequence may be located between the enhancer region and 3′ ITR. In one embodiment, a viral genome may comprise two filler sequences, the first filler sequence may be located between the 5′ ITR and intron region, and the second filler sequence may be located between the polyadenylation signal sequence region and MCS region. In one embodiment, a viral genome may comprise two filler sequences, the first filler sequence may be located between the 5′ ITR and intron region, and the second filler sequence may be located between the polyadenylation signal sequence region and exon region. In one embodiment, a viral genome may comprise two filler sequences, the first filler sequence may be located between the 5′ ITR and intron region, and the second filler sequence may be located between the polyadenylation signal sequence region and 3′ ITR. In one embodiment, a viral genome may comprise two filler sequences, the first filler sequence may be located between the 5′ ITR and intron region, and the second filler sequence may be located between the MCS region and exon region. In one embodiment, a viral genome may comprise two filler sequences, the first filler sequence may be located between the 5′ ITR and intron region, and the second filler sequence may be located between the MCS region and 3′ ITR. In one embodiment, a viral genome may comprise two filler sequences, the first filler sequence may be located between the 5′ ITR and intron region, and the second filler sequence may be located between the exon region and 3′ ITR.

[0249] In one embodiment, a viral genome may comprise two filler sequences, the first filler sequence may be located between the 5′ ITR and enhancer region, and the second filler sequence may be located between the promoter region and payload region. In one embodiment, a viral genome may comprise two filler sequences, the first filler sequence may be located between the 5′ ITR and enhancer region, and the second filler sequence may be located between the promoter region and intron region. In one embodiment, a viral genome may comprise two filler sequences, the first filler sequence may be located between the 5′ ITR and enhancer region, and the second filler sequence may be located between the promoter region and enhancer region. In one embodiment, a viral genome may comprise two filler sequences, the first filler sequence may be located between the 5′ ITR and enhancer region, and the second filler sequence may be located between the promoter region and polyadenylation signal sequence region. In one embodiment, a viral genome may comprise two filler sequences, the first filler sequence may be located between the 5′ ITR and enhancer region, and the second filler sequence may be located between the promoter region and MCS region. In one embodiment, a viral genome may comprise two filler sequences, the first filler sequence may be located between the 5′ ITR and enhancer region, and the second filler sequence may be located between the promoter region and exon region. In one embodiment, a viral genome may comprise two filler sequences, the first filler sequence may be located between the 5′ ITR and enhancer region, and the second filler sequence may be located between the promoter region and 3′ ITR. In one embodiment, a viral genome may comprise two filler sequences, the first filler sequence may be located between the 5′ ITR and enhancer region, and the second filler sequence may be located between the payload region and intron region. In one embodiment, a viral genome may comprise two filler sequences, the first filler sequence may be located between the 5′ ITR and enhancer region, and the second filler sequence may be located between the payload region and enhancer region. In one embodiment, a viral genome may comprise two filler sequences, the first filler sequence may be located between the 5′ ITR and enhancer region, and the second filler sequence may be located between the payload region and polyadenylation signal sequence region. In one embodiment, a viral genome may comprise two filler sequences, the first filler sequence may be located between the 5′ ITR and enhancer region, and the second filler sequence may be located between the payload region and MCS region. In one embodiment, a viral genome may comprise two filler sequences, the first filler sequence may be located between the 5′ ITR and enhancer region, and the second filler sequence may be located between the payload region and exon region. In one embodiment, a viral genome may comprise two filler sequences, the first filler sequence may be located between the 5′ ITR and enhancer region, and the second filler sequence may be located between the payload region and 3′ ITR. In one embodiment, a viral genome may comprise two filler sequences, the first filler sequence may be located between the 5′ ITR and enhancer region, and the second filler sequence may be located between the intron region and enhancer region. In one embodiment, a viral genome may comprise two filler sequences, the first filler sequence may be located between the 5′ ITR and enhancer region, and the second filler sequence may be located between the intron region and polyadenylation signal sequence region. In one embodiment, a viral genome may comprise two filler sequences, the first filler sequence may be located between the 5′ ITR and enhancer region, and the second filler sequence may be located between the intron region and MCS region. In one embodiment, a viral genome may comprise two filler sequences, the first filler sequence may be located between the 5′ ITR and enhancer region, and the second filler sequence may be located between the intron region and exon region. In one embodiment, a viral genome may comprise two filler sequences, the first filler sequence may be located between the 5′ ITR and enhancer region, and the second filler sequence may be located between the intron region and 3′ ITR. In one embodiment, a viral genome may comprise two filler sequences, the first filler sequence may be located between the 5′ ITR and enhancer region, and the second filler sequence may be located between the enhancer region and polyadenylation signal sequence region. In one embodiment, a viral genome may comprise two filler sequences, the first filler sequence may be located between the 5′ ITR and enhancer region, and the second filler sequence may be located between the enhancer region and MCS region. In one embodiment, a viral genome may comprise two filler sequences, the first filler sequence may be located between the 5′ ITR and enhancer region, and the second filler sequence may be located between the enhancer region and exon region. In one embodiment, a viral genome may comprise two filler sequences, the first filler sequence may be located between the 5′ ITR and enhancer region, and the second filler sequence may be located between the enhancer region and 3′ ITR. In one embodiment, a viral genome may comprise two filler sequences, the first filler sequence may be located between the 5′ ITR and enhancer region, and the second filler sequence may be located between the polyadenylation signal sequence region and MCS region. In one embodiment, a viral genome may comprise two filler sequences, the first filler sequence may be located between the 5′ ITR and enhancer region, and the second filler sequence may be located between the polyadenylation signal sequence region and exon region. In one embodiment, a viral genome may comprise two filler sequences, the first filler sequence may be located between the 5′ ITR and enhancer region, and the second filler sequence may be located between the polyadenylation signal sequence region and 3′ ITR. In one embodiment, a viral genome may comprise two filler sequences, the first filler sequence may be located between the 5′ ITR and enhancer region, and the second filler sequence may be located between the MCS region and exon region. In one embodiment, a viral genome may comprise two filler sequences, the first filler sequence may be located between the 5′ ITR and enhancer region, and the second filler sequence may be located between the MCS region and 3′ ITR. In one embodiment, a viral genome may comprise two filler sequences, the first filler sequence may be located between the 5′ ITR and enhancer region, and the second filler sequence may be located between the exon region and 3′ ITR.

[0250] In one embodiment, a viral genome may comprise two filler sequences, the first filler sequence may be located between the 5′ ITR and polyadenylation signal sequence region, and the second filler sequence may be located between the promoter region and payload region. In one embodiment, a viral genome may comprise two filler sequences, the first filler sequence may be located between the 5′ ITR and polyadenylation signal sequence region, and the second filler sequence may be located between the promoter region and intron region. In one embodiment, a viral genome may comprise two filler sequences, the first filler sequence may be located between the 5′ ITR and polyadenylation signal sequence region, and the second filler sequence may be located between the promoter region and enhancer region. In one embodiment, a viral genome may comprise two filler sequences, the first filler sequence may be located between the 5′ ITR and polyadenylation signal sequence region, and the second filler sequence may be located between the promoter region and polyadenylation signal sequence region. In one embodiment, a viral genome may comprise two filler sequences, the first filler sequence may be located between the 5′ ITR and polyadenylation signal sequence region, and the second filler sequence may be located between the promoter region and MCS region. In one embodiment, a viral genome may comprise two filler sequences, the first filler sequence may be located between the 5′ ITR and polyadenylation signal sequence region, and the second filler sequence may be located between the promoter region and exon region. In one embodiment, a viral genome may comprise two filler sequences, the first filler sequence may be located between the 5′ ITR and polyadenylation signal sequence region, and the second filler sequence may be located between the promoter region and 3′ ITR. In one embodiment, a viral genome may comprise two filler sequences, the first filler sequence may be located between the 5′ ITR and polyadenylation signal sequence region, and the second filler sequence may be located between the payload region and intron region. In one embodiment, a viral genome may comprise two filler sequences, the first filler sequence may be located between the 5′ ITR and polyadenylation signal sequence region, and the second filler sequence may be located between the payload region and enhancer region. In one embodiment, a viral genome may comprise two filler sequences, the first filler sequence may be located between the 5′ ITR and polyadenylation signal sequence region, and the second filler sequence may be located between the payload region and polyadenylation signal sequence region. In one embodiment, a viral genome may comprise two filler sequences, the first filler sequence may be located between the 5′ ITR and polyadenylation signal sequence region, and the second filler sequence may be located between the payload region and MCS region. In one embodiment, a viral genome may comprise two filler sequences, the first filler sequence may be located between the 5′ ITR and polyadenylation signal sequence region, and the second filler sequence may be located between the payload region and exon region. In one embodiment, a viral genome may comprise two filler sequences, the first filler sequence may be located between the 5′ ITR and polyadenylation signal sequence region, and the second filler sequence may be located between the payload region and 3′ ITR. In one embodiment, a viral genome may comprise two filler sequences, the first filler sequence may be located between the 5′ ITR and polyadenylation signal sequence region, and the second filler sequence may be located between the intron region and enhancer region. In one embodiment, a viral genome may comprise two filler sequences, the first filler sequence may be located between the 5′ ITR and polyadenylation signal sequence region, and the second filler sequence may be located between the intron region and polyadenylation signal sequence region. In one embodiment, a viral genome may comprise two filler sequences, the first filler sequence may be located between the 5′ ITR and polyadenylation signal sequence region, and the second filler sequence may be located between the intron region and MCS region. In one embodiment, a viral genome may comprise two filler sequences, the first filler sequence may be located between the 5′ ITR and polyadenylation signal sequence region, and the second filler sequence may be located between the intron region and exon region. In one embodiment, a viral genome may comprise two filler sequences, the first filler sequence may be located between the 5′ ITR and polyadenylation signal sequence region, and the second filler sequence may be located between the intron region and 3′ ITR. In one embodiment, a viral genome may comprise two filler sequences, the first filler sequence may be located between the 5′ ITR and polyadenylation signal sequence region, and the second filler sequence may be located between the enhancer region and polyadenylation signal sequence region. In one embodiment, a viral genome may comprise two filler sequences, the first filler sequence may be located between the 5′ ITR and polyadenylation signal sequence region, and the second filler sequence may be located between the enhancer region and MCS region. In one embodiment, a viral genome may comprise two filler sequences, the first filler sequence may be located between the 5′ ITR and polyadenylation signal sequence region, and the second filler sequence may be located between the enhancer region and exon region. In one embodiment, a viral genome may comprise two filler sequences, the first filler sequence may be located between the 5′ ITR and polyadenylation signal sequence region, and the second filler sequence may be located between the enhancer region and 3′ ITR. In one embodiment, a viral genome may comprise two filler sequences, the first filler sequence may be located between the 5′ ITR and polyadenylation signal sequence region, and the second filler sequence may be located between the polyadenylation signal sequence region and MCS region. In one embodiment, a viral genome may comprise two filler sequences, the first filler sequence may be located between the 5′ ITR and polyadenylation signal sequence region, and the second filler sequence may be located between the polyadenylation signal sequence region and exon region. In one embodiment, a viral genome may comprise two filler sequences, the first filler sequence may be located between the 5′ ITR and polyadenylation signal sequence region, and the second filler sequence may be located between the polyadenylation signal sequence region and 3′ ITR. In one embodiment, a viral genome may comprise two filler sequences, the first filler sequence may be located between the 5′ ITR and polyadenylation signal sequence region, and the second filler sequence may be located between the MCS region and exon region. In one embodiment, a viral genome may comprise two filler sequences, the first filler sequence may be located between the 5′ ITR and polyadenylation signal sequence region, and the second filler sequence may be located between the MCS region and 3′ ITR. In one embodiment, a viral genome may comprise two filler sequences, the first filler sequence may be located between the 5′ ITR and polyadenylation signal sequence region, and the second filler sequence may be located between the exon region and 3′ ITR.

[0251] In one embodiment, a viral genome may comprise two filler sequences, the first filler sequence may be located between the 5′ ITR and MCS region, and the second filler sequence may be located between the promoter region and payload region. In one embodiment, a viral genome may comprise two filler sequences, the first filler sequence may be located between the 5′ ITR and MCS region, and the second filler sequence may be located between the promoter region and intron region. In one embodiment, a viral genome may comprise two filler sequences, the first filler sequence may be located between the 5′ ITR and MCS region, and the second filler sequence may be located between the promoter region and enhancer region. In one embodiment, a viral genome may comprise two filler sequences, the first filler sequence may be located between the 5′ ITR and MCS region, and the second filler sequence may be located between the promoter region and polyadenylation signal sequence region. In one embodiment, a viral genome may comprise two filler sequences, the first filler sequence may be located between the 5′ ITR and MCS region, and the second filler sequence may be located between the promoter region and MCS region. In one embodiment, a viral genome may comprise two filler sequences, the first filler sequence may be located between the 5′ ITR and MCS region, and the second filler sequence may be located between the promoter region and exon region. In one embodiment, a viral genome may comprise two filler sequences, the first filler sequence may be located between the 5′ ITR and MCS region, and the second filler sequence may be located between the promoter region and 3′ ITR. In one embodiment, a viral genome may comprise two filler sequences, the first filler sequence may be located between the 5′ ITR and MCS region, and the second filler sequence may be located between the payload region and intron region. In one embodiment, a viral genome may comprise two filler sequences, the first filler sequence may be located between the 5′ ITR and MCS region, and the second filler sequence may be located between the payload region and enhancer region. In one embodiment, a viral genome may comprise two filler sequences, the first filler sequence may be located between the 5′ ITR and MCS region, and the second filler sequence may be located between the payload region and polyadenylation signal sequence region. In one embodiment, a viral genome may comprise two filler sequences, the first filler sequence may be located between the 5′ ITR and MCS region, and the second filler sequence may be located between the payload region and MCS region. In one embodiment, a viral genome may comprise two filler sequences, the first filler sequence may be located between the 5′ ITR and MCS region, and the second filler sequence may be located between the payload region and exon region. In one embodiment, a viral genome may comprise two filler sequences, the first filler sequence may be located between the 5′ ITR and MCS region, and the second filler sequence may be located between the payload region and 3′ ITR. In one embodiment, a viral genome may comprise two filler sequences, the first filler sequence may be located between the 5′ ITR and MCS region, and the second filler sequence may be located between the intron region and enhancer region. In one embodiment, a viral genome may comprise two filler sequences, the first filler sequence may be located between the 5′ ITR and MCS region, and the second filler sequence may be located between the intron region and polyadenylation signal sequence region. In one embodiment, a viral genome may comprise two filler sequences, the first filler sequence may be located between the 5′ ITR and MCS region, and the second filler sequence may be located between the intron region and MCS region. In one embodiment, a viral genome may comprise two filler sequences, the first filler sequence may be located between the 5′ ITR and MCS region, and the second filler sequence may be located between the intron region and exon region. In one embodiment, a viral genome may comprise two filler sequences, the first filler sequence may be located between the 5′ ITR and MCS region, and the second filler sequence may be located between the intron region and 3′ ITR. In one embodiment, a viral genome may comprise two filler sequences, the first filler sequence may be located between the 5′ ITR and MCS region, and the second filler sequence may be located between the enhancer region and polyadenylation signal sequence region. In one embodiment, a viral genome may comprise two filler sequences, the first filler sequence may be located between the 5′ ITR and MCS region, and the second filler sequence may be located between the enhancer region and MCS region. In one embodiment, a viral genome may comprise two filler sequences, the first filler sequence may be located between the 5′ ITR and MCS region, and the second filler sequence may be located between the enhancer region and exon region. In one embodiment, a viral genome may comprise two filler sequences, the first filler sequence may be located between the 5′ ITR and MCS region, and the second filler sequence may be located between the enhancer region and 3′ ITR. In one embodiment, a viral genome may comprise two filler sequences, the first filler sequence may be located between the 5′ ITR and MCS region, and the second filler sequence may be located between the polyadenylation signal sequence region and MCS region. In one embodiment, a viral genome may comprise two filler sequences, the first filler sequence may be located between the 5′ ITR and MCS region, and the second filler sequence may be located between the polyadenylation signal sequence region and exon region. In one embodiment, a viral genome may comprise two filler sequences, the first filler sequence may be located between the 5′ ITR and MCS region, and the second filler sequence may be located between the polyadenylation signal sequence region and 3′ ITR. In one embodiment, a viral genome may comprise two filler sequences, the first filler sequence may be located between the 5′ ITR and MCS region, and the second filler sequence may be located between the MCS region and exon region. In one embodiment, a viral genome may comprise two filler sequences, the first filler sequence may be located between the 5′ ITR and MCS region, and the second filler sequence may be located between the MCS region and 3′ ITR. In one embodiment, a viral genome may comprise two filler sequences, the first filler sequence may be located between the 5′ ITR and MCS region, and the second filler sequence may be located between the exon region and 3′ ITR.

[0252] In one embodiment, a viral genome may comprise two filler sequences, the first filler sequence may be located between the 5′ ITR and exon region, and the second filler sequence may be located between the promoter region and payload region. In one embodiment, a viral genome may comprise two filler sequences, the first filler sequence may be located between the 5′ ITR and exon region, and the second filler sequence may be located between the promoter region and intron region. In one embodiment, a viral genome may comprise two filler sequences, the first filler sequence may be located between the 5′ ITR and exon region, and the second filler sequence may be located between the promoter region and enhancer region. In one embodiment, a viral genome may comprise two filler sequences, the first filler sequence may be located between the 5′ ITR and exon region, and the second filler sequence may be located between the promoter region and polyadenylation signal sequence region. In one embodiment, a viral genome may comprise two filler sequences, the first filler sequence may be located between the 5′ ITR and exon region, and the second filler sequence may be located between the promoter region and MCS region. In one embodiment, a viral genome may comprise two filler sequences, the first filler sequence may be located between the 5′ ITR and exon region, and the second filler sequence may be located between the promoter region and exon region. In one embodiment, a viral genome may comprise two filler sequences, the first filler sequence may be located between the 5′ ITR and exon region, and the second filler sequence may be located between the promoter region and 3′ ITR. In one embodiment, a viral genome may comprise two filler sequences, the first filler sequence may be located between the 5′ ITR and exon region, and the second filler sequence may be located between the payload region and intron region. In one embodiment, a viral genome may comprise two filler sequences, the first filler sequence may be located between the 5′ ITR and exon region, and the second filler sequence may be located between the payload region and enhancer region. In one embodiment, a viral genome may comprise two filler sequences, the first filler sequence may be located between the 5′ ITR and exon region, and the second filler sequence may be located between the payload region and polyadenylation signal sequence region. In one embodiment, a viral genome may comprise two filler sequences, the first filler sequence may be located between the 5′ ITR and exon region, and the second filler sequence may be located between the payload region and MCS region. In one embodiment, a viral genome may comprise two filler sequences, the first filler sequence may be located between the 5′ ITR and exon region, and the second filler sequence may be located between the payload region and exon region. In one embodiment, a viral genome may comprise two filler sequences, the first filler sequence may be located between the 5′ ITR and exon region, and the second filler sequence may be located between the payload region and 3′ ITR. In one embodiment, a viral genome may comprise two filler sequences, the first filler sequence may be located between the 5′ ITR and exon region, and the second filler sequence may be located between the intron region and enhancer region. In one embodiment, a viral genome may comprise two filler sequences, the first filler sequence may be located between the 5′ ITR and exon region, and the second filler sequence may be located between the intron region and polyadenylation signal sequence region. In one embodiment, a viral genome may comprise two filler sequences, the first filler sequence may be located between the 5′ ITR and exon region, and the second filler sequence may be located between the intron region and MCS region. In one embodiment, a viral genome may comprise two filler sequences, the first filler sequence may be located between the 5′ ITR and exon region, and the second filler sequence may be located between the intron region and exon region. In one embodiment, a viral genome may comprise two filler sequences, the first filler sequence may be located between the 5′ ITR and exon region, and the second filler sequence may be located between the intron region and 3′ ITR. In one embodiment, a viral genome may comprise two filler sequences, the first filler sequence may be located between the 5′ ITR and exon region, and the second filler sequence may be located between the enhancer region and polyadenylation signal sequence region. In one embodiment, a viral genome may comprise two filler sequences, the first filler sequence may be located between the 5′ ITR and exon region, and the second filler sequence may be located between the enhancer region and MCS region. In one embodiment, a viral genome may comprise two filler sequences, the first filler sequence may be located between the 5′ ITR and exon region, and the second filler sequence may be located between the enhancer region and exon region. In one embodiment, a viral genome may comprise two filler sequences, the first filler sequence may be located between the 5′ ITR and exon region, and the second filler sequence may be located between the enhancer region and 3′ ITR. In one embodiment, a viral genome may comprise two filler sequences, the first filler sequence may be located between the 5′ ITR and exon region, and the second filler sequence may be located between the polyadenylation signal sequence region and MCS region. In one embodiment, a viral genome may comprise two filler sequences, the first filler sequence may be located between the 5′ ITR and exon region, and the second filler sequence may be located between the polyadenylation signal sequence region and exon region. In one embodiment, a viral genome may comprise two filler sequences, the first filler sequence may be located between the 5′ ITR and exon region, and the second filler sequence may be located between the polyadenylation signal sequence region and 3′ ITR. In one embodiment, a viral genome may comprise two filler sequences, the first filler sequence may be located between the 5′ ITR and exon region, and the second filler sequence may be located between the MCS region and exon region. In one embodiment, a viral genome may comprise two filler sequences, the first filler sequence may be located between the 5′ ITR and exon region, and the second filler sequence may be located between the MCS region and 3′ ITR. In one embodiment, a viral genome may comprise two filler sequences, the first filler sequence may be located between the 5′ ITR and exon region, and the second filler sequence may be located between the exon region and 3′ ITR.

[0253] In one embodiment, a viral genome may comprise two filler sequences, the first filler sequence may be located between the promoter region and payload region, and the second filler sequence may be located between the payload region and intron region. In one embodiment, a viral genome may comprise two filler sequences, the first filler sequence may be located between the promoter region and payload region, and the second filler sequence may be located between the payload region and enhancer region. In one embodiment, a viral genome may comprise two filler sequences, the first filler sequence may be located between the promoter region and payload region, and the second filler sequence may be located between the payload region and polyadenylation signal sequence region. In one embodiment, a viral genome may comprise two filler sequences, the first filler sequence may be located between the promoter region and payload region, and the second filler sequence may be located between the payload region and MCS region. In one embodiment, a viral genome may comprise two filler sequences, the first filler sequence may be located between the promoter region and payload region, and the second filler sequence may be located between the payload region and exon region. In one embodiment, a viral genome may comprise two filler sequences, the first filler sequence may be located between the promoter region and payload region, and the second filler sequence may be located between the payload region and 3′ ITR. In one embodiment, a viral genome may comprise two filler sequences, the first filler sequence may be located between the promoter region and payload region, and the second filler sequence may be located between the intron region and enhancer region. In one embodiment, a viral genome may comprise two filler sequences, the first filler sequence may be located between the promoter region and payload region, and the second filler sequence may be located between the intron region and polyadenylation signal sequence region. In one embodiment, a viral genome may comprise two filler sequences, the first filler sequence may be located between the promoter region and payload region, and the second filler sequence may be located between the intron region and MCS region. In one embodiment, a viral genome may comprise two filler sequences, the first filler sequence may be located between the promoter region and payload region, and the second filler sequence may be located between the intron region and exon region. In one embodiment, a viral genome may comprise two filler sequences, the first filler sequence may be located between the promoter region and payload region, and the second filler sequence may be located between the intron region and 3′ ITR. In one embodiment, a viral genome may comprise two filler sequences, the first filler sequence may be located between the promoter region and payload region, and the second filler sequence may be located between the enhancer region and polyadenylation signal sequence region. In one embodiment, a viral genome may comprise two filler sequences, the first filler sequence may be located between the promoter region and payload region, and the second filler sequence may be located between the enhancer region and MCS region. In one embodiment, a viral genome may comprise two filler sequences, the first filler sequence may be located between the promoter region and payload region, and the second filler sequence may be located between the enhancer region and exon region. In one embodiment, a viral genome may comprise two filler sequences, the first filler sequence may be located between the promoter region and payload region, and the second filler sequence may be located between the enhancer region and 3′ ITR. In one embodiment, a viral genome may comprise two filler sequences, the first filler sequence may be located between the promoter region and payload region, and the second filler sequence may be located between the polyadenylation signal sequence region and MCS region. In one embodiment, a viral genome may comprise two filler sequences, the first filler sequence may be located between the promoter region and payload region, and the second filler sequence may be located between the polyadenylation signal sequence region and exon region. In one embodiment, a viral genome may comprise two filler sequences, the first filler sequence may be located between the promoter region and payload region, and the second filler sequence may be located between the polyadenylation signal sequence region and 3′ ITR. In one embodiment, a viral genome may comprise two filler sequences, the first filler sequence may be located between the promoter region and payload region, and the second filler sequence may be located between the MCS region and exon region. In one embodiment, a viral genome may comprise two filler sequences, the first filler sequence may be located between the promoter region and payload region, and the second filler sequence may be located between the MCS region and 3′ ITR. In one embodiment, a viral genome may comprise two filler sequences, the first filler sequence may be located between the promoter region and payload region, and the second filler sequence may be located between the exon region and 3′ ITR.

[0254] In one embodiment, a viral genome may comprise two filler sequences, the first filler sequence may be located between the promoter region and intron region, and the second filler sequence may be located between the payload region and intron region. In one embodiment, a viral genome may comprise two filler sequences, the first filler sequence may be located between the promoter region and intron region, and the second filler sequence may be located between the payload region and enhancer region. In one embodiment, a viral genome may comprise two filler sequences, the first filler sequence may be located between the promoter region and intron region, and the second filler sequence may be located between the payload region and polyadenylation signal sequence region. In one embodiment, a viral genome may comprise two filler sequences, the first filler sequence may be located between the promoter region and intron region, and the second filler sequence may be located between the payload region and MCS region. In one embodiment, a viral genome may comprise two filler sequences, the first filler sequence may be located between the promoter region and intron region, and the second filler sequence may be located between the payload region and exon region. In one embodiment, a viral genome may comprise two filler sequences, the first filler sequence may be located between the promoter region and intron region, and the second filler sequence may be located between the payload region and 3′ ITR. In one embodiment, a viral genome may comprise two filler sequences, the first filler sequence may be located between the promoter region and intron region, and the second filler sequence may be located between the intron region and enhancer region. In one embodiment, a viral genome may comprise two filler sequences, the first filler sequence may be located between the promoter region and intron region, and the second filler sequence may be located between the intron region and polyadenylation signal sequence region. In one embodiment, a viral genome may comprise two filler sequences, the first filler sequence may be located between the promoter region and intron region, and the second filler sequence may be located between the intron region and MCS region. In one embodiment, a viral genome may comprise two filler sequences, the first filler sequence may be located between the promoter region and intron region, and the second filler sequence may be located between the intron region and exon region. In one embodiment, a viral genome may comprise two filler sequences, the first filler sequence may be located between the promoter region and intron region, and the second filler sequence may be located between the intron region and 3′ ITR. In one embodiment, a viral genome may comprise two filler sequences, the first filler sequence may be located between the promoter region and intron region, and the second filler sequence may be located between the enhancer region and polyadenylation signal sequence region. In one embodiment, a viral genome may comprise two filler sequences, the first filler sequence may be located between the promoter region and intron region, and the second filler sequence may be located between the enhancer region and MCS region. In one embodiment, a viral genome may comprise two filler sequences, the first filler sequence may be located between the promoter region and intron region, and the second filler sequence may be located between the enhancer region and exon region. In one embodiment, a viral genome may comprise two filler sequences, the first filler sequence may be located between the promoter region and intron region, and the second filler sequence may be located between the enhancer region and 3′ ITR. In one embodiment, a viral genome may comprise two filler sequences, the first filler sequence may be located between the promoter region and intron region, and the second filler sequence may be located between the polyadenylation signal sequence region and MCS region. In one embodiment, a viral genome may comprise two filler sequences, the first filler sequence may be located between the promoter region and intron region, and the second filler sequence may be located between the polyadenylation signal sequence region and exon region. In one embodiment, a viral genome may comprise two filler sequences, the first filler sequence may be located between the promoter region and intron region, and the second filler sequence may be located between the polyadenylation signal sequence region and 3′ ITR. In one embodiment, a viral genome may comprise two filler sequences, the first filler sequence may be located between the promoter region and intron region, and the second filler sequence may be located between the MCS region and exon region. In one embodiment, a viral genome may comprise two filler sequences, the first filler sequence may be located between the promoter region and intron region, and the second filler sequence may be located between the MCS region and 3′ ITR. In one embodiment, a viral genome may comprise two filler sequences, the first filler sequence may be located between the promoter region and intron region, and the second filler sequence may be located between the exon region and 3′ ITR.

[0255] In one embodiment, a viral genome may comprise two filler sequences, the first filler sequence may be located between the promoter region and enhancer region, and the second filler sequence may be located between the payload region and intron region. In one embodiment, a viral genome may comprise two filler sequences, the first filler sequence may be located between the promoter region and enhancer region, and the second filler sequence may be located between the payload region and enhancer region. In one embodiment, a viral genome may comprise two filler sequences, the first filler sequence may be located between the promoter region and enhancer region, and the second filler sequence may be located between the payload region and polyadenylation signal sequence region. In one embodiment, a viral genome may comprise two filler sequences, the first filler sequence may be located between the promoter region and enhancer region, and the second filler sequence may be located between the payload region and MCS region. In one embodiment, a viral genome may comprise two filler sequences, the first filler sequence may be located between the promoter region and enhancer region, and the second filler sequence may be located between the payload region and exon region. In one embodiment, a viral genome may comprise two filler sequences, the first filler sequence may be located between the promoter region and enhancer region, and the second filler sequence may be located between the payload region and 3′ ITR. In one embodiment, a viral genome may comprise two filler sequences, the first filler sequence may be located between the promoter region and enhancer region, and the second filler sequence may be located between the intron region and enhancer region. In one embodiment, a viral genome may comprise two filler sequences, the first filler sequence may be located between the promoter region and enhancer region, and the second filler sequence may be located between the intron region and polyadenylation signal sequence region. In one embodiment, a viral genome may comprise two filler sequences, the first filler sequence may be located between the promoter region and enhancer region, and the second filler sequence may be located between the intron region and MCS region. In one embodiment, a viral genome may comprise two filler sequences, the first filler sequence may be located between the promoter region and enhancer region, and the second filler sequence may be located between the intron region and exon region. In one embodiment, a viral genome may comprise two filler sequences, the first filler sequence may be located between the promoter region and enhancer region, and the second filler sequence may be located between the intron region and 3′ ITR. In one embodiment, a viral genome may comprise two filler sequences, the first filler sequence may be located between the promoter region and enhancer region, and the second filler sequence may be located between the enhancer region and polyadenylation signal sequence region. In one embodiment, a viral genome may comprise two filler sequences, the first filler sequence may be located between the promoter region and enhancer region, and the second filler sequence may be located between the enhancer region and MCS region. In one embodiment, a viral genome may comprise two filler sequences, the first filler sequence may be located between the promoter region and enhancer region, and the second filler sequence may be located between the enhancer region and exon region. In one embodiment, a viral genome may comprise two filler sequences, the first filler sequence may be located between the promoter region and enhancer region, and the second filler sequence may be located between the enhancer region and 3′ ITR. In one embodiment, a viral genome may comprise two filler sequences, the first filler sequence may be located between the promoter region and enhancer region, and the second filler sequence may be located between the polyadenylation signal sequence region and MCS region. In one embodiment, a viral genome may comprise two filler sequences, the first filler sequence may be located between the promoter region and enhancer region, and the second filler sequence may be located between the polyadenylation signal sequence region and exon region. In one embodiment, a viral genome may comprise two filler sequences, the first filler sequence may be located between the promoter region and enhancer region, and the second filler sequence may be located between the polyadenylation signal sequence region and 3′ ITR. In one embodiment, a viral genome may comprise two filler sequences, the first filler sequence may be located between the promoter region and enhancer region, and the second filler sequence may be located between the MCS region and exon region. In one embodiment, a viral genome may comprise two filler sequences, the first filler sequence may be located between the promoter region and enhancer region, and the second filler sequence may be located between the MCS region and 3′ ITR. In one embodiment, a viral genome may comprise two filler sequences, the first filler sequence may be located between the promoter region and enhancer region, and the second filler sequence may be located between the exon region and 3′ ITR.

[0256] In one embodiment, a viral genome may comprise two filler sequences, the first filler sequence may be located between the promoter region and polyadenylation signal sequence region, and the second filler sequence may be located between the payload region and intron region. In one embodiment, a viral genome may comprise two filler sequences, the first filler sequence may be located between the promoter region and polyadenylation signal sequence region, and the second filler sequence may be located between the payload region and enhancer region. In one embodiment, a viral genome may comprise two filler sequences, the first filler sequence may be located between the promoter region and polyadenylation signal sequence region, and the second filler sequence may be located between the payload region and polyadenylation signal sequence region. In one embodiment, a viral genome may comprise two filler sequences, the first filler sequence may be located between the promoter region and polyadenylation signal sequence region, and the second filler sequence may be located between the payload region and MCS region. In one embodiment, a viral genome may comprise two filler sequences, the first filler sequence may be located between the promoter region and polyadenylation signal sequence region, and the second filler sequence may be located between the payload region and exon region. In one embodiment, a viral genome may comprise two filler sequences, the first filler sequence may be located between the promoter region and polyadenylation signal sequence region, and the second filler sequence may be located between the payload region and 3′ ITR. In one embodiment, a viral genome may comprise two filler sequences, the first filler sequence may be located between the promoter region and polyadenylation signal sequence region, and the second filler sequence may be located between the intron region and enhancer region. In one embodiment, a viral genome may comprise two filler sequences, the first filler sequence may be located between the promoter region and polyadenylation signal sequence region, and the second filler sequence may be located between the intron region and polyadenylation signal sequence region. In one embodiment, a viral genome may comprise two filler sequences, the first filler sequence may be located between the promoter region and polyadenylation signal sequence region, and the second filler sequence may be located between the intron region and MCS region. In one embodiment, a viral genome may comprise two filler sequences, the first filler sequence may be located between the promoter region and polyadenylation signal sequence region, and the second filler sequence may be located between the intron region and exon region. In one embodiment, a viral genome may comprise two filler sequences, the first filler sequence may be located between the promoter region and polyadenylation signal sequence region, and the second filler sequence may be located between the intron region and 3′ ITR. In one embodiment, a viral genome may comprise two filler sequences, the first filler sequence may be located between the promoter region and polyadenylation signal sequence region, and the second filler sequence may be located between the enhancer region and polyadenylation signal sequence region. In one embodiment, a viral genome may comprise two filler sequences, the first filler sequence may be located between the promoter region and polyadenylation signal sequence region, and the second filler sequence may be located between the enhancer region and MCS region. In one embodiment, a viral genome may comprise two filler sequences, the first filler sequence may be located between the promoter region and polyadenylation signal sequence region, and the second filler sequence may be located between the enhancer region and exon region. In one embodiment, a viral genome may comprise two filler sequences, the first filler sequence may be located between the promoter region and polyadenylation signal sequence region, and the second filler sequence may be located between the enhancer region and 3′ ITR. In one embodiment, a viral genome may comprise two filler sequences, the first filler sequence may be located between the promoter region and polyadenylation signal sequence region, and the second filler sequence may be located between the polyadenylation signal sequence region and MCS region. In one embodiment, a viral genome may comprise two filler sequences, the first filler sequence may be located between the promoter region and polyadenylation signal sequence region, and the second filler sequence may be located between the polyadenylation signal sequence region and exon region. In one embodiment, a viral genome may comprise two filler sequences, the first filler sequence may be located between the promoter region and polyadenylation signal sequence region, and the second filler sequence may be located between the polyadenylation signal sequence region and 3′ ITR. In one embodiment, a viral genome may comprise two filler sequences, the first filler sequence may be located between the promoter region and polyadenylation signal sequence region, and the second filler sequence may be located between the MCS region and exon region. In one embodiment, a viral genome may comprise two filler sequences, the first filler sequence may be located between the promoter region and polyadenylation signal sequence region, and the second filler sequence may be located between the MCS region and 3′ ITR. In one embodiment, a viral genome may comprise two filler sequences, the first filler sequence may be located between the promoter region and polyadenylation signal sequence region, and the second filler sequence may be located between the exon region and 3′ ITR.

[0257] In one embodiment, a viral genome may comprise two filler sequences, the first filler sequence may be located between the promoter region and exon region, and the second filler sequence may be located between the payload region and intron region. In one embodiment, a viral genome may comprise two filler sequences, the first filler sequence may be located between the promoter region and exon region, and the second filler sequence may be located between the payload region and enhancer region. In one embodiment, a viral genome may comprise two filler sequences, the first filler sequence may be located between the promoter region and exon region, and the second filler sequence may be located between the payload region and polyadenylation signal sequence region. In one embodiment, a viral genome may comprise two filler sequences, the first filler sequence may be located between the promoter region and exon region, and the second filler sequence may be located between the payload region and MCS region. In one embodiment, a viral genome may comprise two filler sequences, the first filler sequence may be located between the promoter region and exon region, and the second filler sequence may be located between the payload region and exon region. In one embodiment, a viral genome may comprise two filler sequences, the first filler sequence may be located between the promoter region and exon region, and the second filler sequence may be located between the payload region and 3′ ITR. In one embodiment, a viral genome may comprise two filler sequences, the first filler sequence may be located between the promoter region and exon region, and the second filler sequence may be located between the intron region and enhancer region. In one embodiment, a viral genome may comprise two filler sequences, the first filler sequence may be located between the promoter region and exon region, and the second filler sequence may be located between the intron region and polyadenylation signal sequence region. In one embodiment, a viral genome may comprise two filler sequences, the first filler sequence may be located between the promoter region and exon region, and the second filler sequence may be located between the intron region and MCS region. In one embodiment, a viral genome may comprise two filler sequences, the first filler sequence may be located between the promoter region and exon region, and the second filler sequence may be located between the intron region and exon region. In one embodiment, a viral genome may comprise two filler sequences, the first filler sequence may be located between the promoter region and exon region, and the second filler sequence may be located between the intron region and 3′ ITR. In one embodiment, a viral genome may comprise two filler sequences, the first filler sequence may be located between the promoter region and exon region, and the second filler sequence may be located between the enhancer region and polyadenylation signal sequence region. In one embodiment, a viral genome may comprise two filler sequences, the first filler sequence may be located between the promoter region and exon region, and the second filler sequence may be located between the enhancer region and MCS region. In one embodiment, a viral genome may comprise two filler sequences, the first filler sequence may be located between the promoter region and exon region, and the second filler sequence may be located between the enhancer region and exon region. In one embodiment, a viral genome may comprise two filler sequences, the first filler sequence may be located between the promoter region and exon region, and the second filler sequence may be located between the enhancer region and 3′ ITR. In one embodiment, a viral genome may comprise two filler sequences, the first filler sequence may be located between the promoter region and exon region, and the second filler sequence may be located between the polyadenylation signal sequence region and MCS region. In one embodiment, a viral genome may comprise two filler sequences, the first filler sequence may be located between the promoter region and exon region, and the second filler sequence may be located between the polyadenylation signal sequence region and exon region. In one embodiment, a viral genome may comprise two filler sequences, the first filler sequence may be located between the promoter region and exon region, and the second filler sequence may be located between the polyadenylation signal sequence region and 3′ ITR. In one embodiment, a viral genome may comprise two filler sequences, the first filler sequence may be located between the promoter region and exon region, and the second filler sequence may be located between the MCS region and exon region. In one embodiment, a viral genome may comprise two filler sequences, the first filler sequence may be located between the promoter region and exon region, and the second filler sequence may be located between the MCS region and 3′ ITR. In one embodiment, a viral genome may comprise two filler sequences, the first filler sequence may be located between the promoter region and exon region, and the second filler sequence may be located between the exon region and 3′ ITR.

[0258] In one embodiment, a viral genome may comprise two filler sequences, the first filler sequence may be located between the promoter region and MCS region, and the second filler sequence may be located between the payload region and intron region. In one embodiment, a viral genome may comprise two filler sequences, the first filler sequence may be located between the promoter region and MCS region, and the second filler sequence may be located between the payload region and enhancer region. In one embodiment, a viral genome may comprise two filler sequences, the first filler sequence may be located between the promoter region and MCS region, and the second filler sequence may be located between the payload region and polyadenylation signal sequence region. In one embodiment, a viral genome may comprise two filler sequences, the first filler sequence may be located between the promoter region and MCS region, and the second filler sequence may be located between the payload region and MCS region. In one embodiment, a viral genome may comprise two filler sequences, the first filler sequence may be located between the promoter region and MCS region, and the second filler sequence may be located between the payload region and exon region. In one embodiment, a viral genome may comprise two filler sequences, the first filler sequence may be located between the promoter region and MCS region, and the second filler sequence may be located between the payload region and 3′ ITR. In one embodiment, a viral genome may comprise two filler sequences, the first filler sequence may be located between the promoter region and MCS region, and the second filler sequence may be located between the intron region and enhancer region. In one embodiment, a viral genome may comprise two filler sequences, the first filler sequence may be located between the promoter region and MCS region, and the second filler sequence may be located between the intron region and polyadenylation signal sequence region. In one embodiment, a viral genome may comprise two filler sequences, the first filler sequence may be located between the promoter region and MCS region, and the second filler sequence may be located between the intron region and MCS region. In one embodiment, a viral genome may comprise two filler sequences, the first filler sequence may be located between the promoter region and MCS region, and the second filler sequence may be located between the intron region and exon region. In one embodiment, a viral genome may comprise two filler sequences, the first filler sequence may be located between the promoter region and MCS region, and the second filler sequence may be located between the intron region and 3′ ITR. In one embodiment, a viral genome may comprise two filler sequences, the first filler sequence may be located between the promoter region and MCS region, and the second filler sequence may be located between the enhancer region and polyadenylation signal sequence region. In one embodiment, a viral genome may comprise two filler sequences, the first filler sequence may be located between the promoter region and MCS region, and the second filler sequence may be located between the enhancer region and MCS region. In one embodiment, a viral genome may comprise two filler sequences, the first filler sequence may be located between the promoter region and MCS region, and the second filler sequence may be located between the enhancer region and exon region. In one embodiment, a viral genome may comprise two filler sequences, the first filler sequence may be located between the promoter region and MCS region, and the second filler sequence may be located between the enhancer region and 3′ ITR. In one embodiment, a viral genome may comprise two filler sequences, the first filler sequence may be located between the promoter region and MCS region, and the second filler sequence may be located between the polyadenylation signal sequence region and MCS region. In one embodiment, a viral genome may comprise two filler sequences, the first filler sequence may be located between the promoter region and MCS region, and the second filler sequence may be located between the polyadenylation signal sequence region and exon region. In one embodiment, a viral genome may comprise two filler sequences, the first filler sequence may be located between the promoter region and MCS region, and the second filler sequence may be located between the polyadenylation signal sequence region and 3′ ITR. In one embodiment, a viral genome may comprise two filler sequences, the first filler sequence may be located between the promoter region and MCS region, and the second filler sequence may be located between the MCS region and exon region. In one embodiment, a viral genome may comprise two filler sequences, the first filler sequence may be located between the promoter region and MCS region, and the second filler sequence may be located between the MCS region and 3′ ITR. In one embodiment, a viral genome may comprise two filler sequences, the first filler sequence may be located between the promoter region and MCS region, and the second filler sequence may be located between the exon region and 3′ ITR.

[0259] In one embodiment, a viral genome may comprise two filler sequences, the first filler sequence may be located between the promoter region and 3′ITR, and the second filler sequence may be located between the payload region and intron region. In one embodiment, a viral genome may comprise two filler sequences, the first filler sequence may be located between the promoter region and 3′ITR, and the second filler sequence may be located between the payload region and enhancer region. In one embodiment, a viral genome may comprise two filler sequences, the first filler sequence may be located between the promoter region and 3′ITR, and the second filler sequence may be located between the payload region and polyadenylation signal sequence region. In one embodiment, a viral genome may comprise two filler sequences, the first filler sequence may be located between the promoter region and 3′ITR, and the second filler sequence may be located between the payload region and MCS region. In one embodiment, a viral genome may comprise two filler sequences, the first filler sequence may be located between the promoter region and 3′ITR, and the second filler sequence may be located between the payload region and exon region. In one embodiment, a viral genome may comprise two filler sequences, the first filler sequence may be located between the promoter region and 3′ITR, and the second filler sequence may be located between the payload region and 3′ ITR. In one embodiment, a viral genome may comprise two filler sequences, the first filler sequence may be located between the promoter region and 3′ITR, and the second filler sequence may be located between the intron region and enhancer region. In one embodiment, a viral genome may comprise two filler sequences, the first filler sequence may be located between the promoter region and 3′ITR, and the second filler sequence may be located between the intron region and polyadenylation signal sequence region. In one embodiment, a viral genome may comprise two filler sequences, the first filler sequence may be located between the promoter region and 3′ITR, and the second filler sequence may be located between the intron region and MCS region. In one embodiment, a viral genome may comprise two filler sequences, the first filler sequence may be located between the promoter region and 3′ITR, and the second filler sequence may be located between the intron region and exon region. In one embodiment, a viral genome may comprise two filler sequences, the first filler sequence may be located between the promoter region and 3′ITR, and the second filler sequence may be located between the intron region and 3′ ITR. In one embodiment, a viral genome may comprise two filler sequences, the first filler sequence may be located between the promoter region and 3′ITR, and the second filler sequence may be located between the enhancer region and polyadenylation signal sequence region. In one embodiment, a viral genome may comprise two filler sequences, the first filler sequence may be located between the promoter region and 3′ITR, and the second filler sequence may be located between the enhancer region and MCS region. In one embodiment, a viral genome may comprise two filler sequences, the first filler sequence may be located between the promoter region and 3′ITR, and the second filler sequence may be located between the enhancer region and exon region. In one embodiment, a viral genome may comprise two filler sequences, the first filler sequence may be located between the promoter region and 3′ITR, and the second filler sequence may be located between the enhancer region and 3′ ITR. In one embodiment, a viral genome may comprise two filler sequences, the first filler sequence may be located between the promoter region and 3′ITR, and the second filler sequence may be located between the polyadenylation signal sequence region and MCS region. In one embodiment, a viral genome may comprise two filler sequences, the first filler sequence may be located between the promoter region and 3′ITR, and the second filler sequence may be located between the polyadenylation signal sequence region and exon region. In one embodiment, a viral genome may comprise two filler sequences, the first filler sequence may be located between the promoter region and 3′ITR, and the second filler sequence may be located between the polyadenylation signal sequence region and 3′ ITR. In one embodiment, a viral genome may comprise two filler sequences, the first filler sequence may be located between the promoter region and 3′ITR, and the second filler sequence may be located between the MCS region and exon region. In one embodiment, a viral genome may comprise two filler sequences, the first filler sequence may be located between the promoter region and 3′ITR, and the second filler sequence may be located between the MCS region and 3′ ITR. In one embodiment, a viral genome may comprise two filler sequences, the first filler sequence may be located between the promoter region and 3′ITR, and the second filler sequence may be located between the exon region and 3′ ITR.

[0260] In one embodiment, a viral genome may comprise two filler sequences, the first filler sequence may be located between the payload region and intron region, and the second filler sequence may be located between the intron region and enhancer region. In one embodiment, a viral genome may comprise two filler sequences, the first filler sequence may be located between the payload region and intron region, and the second filler sequence may be located between the intron region and polyadenylation signal sequence region. In one embodiment, a viral genome may comprise two filler sequences, the first filler sequence may be located between the payload region and intron region, and the second filler sequence may be located between the intron region and MCS region. In one embodiment, a viral genome may comprise two filler sequences, the first filler sequence may be located between the payload region and intron region, and the second filler sequence may be located between the intron region and exon region. In one embodiment, a viral genome may comprise two filler sequences, the first filler sequence may be located between the payload region and intron region, and the second filler sequence may be located between the intron region and 3′ ITR. In one embodiment, a viral genome may comprise two filler sequences, the first filler sequence may be located between the payload region and intron region, and the second filler sequence may be located between the enhancer region and polyadenylation signal sequence region. In one embodiment, a viral genome may comprise two filler sequences, the first filler sequence may be located between the payload region and intron region, and the second filler sequence may be located between the enhancer region and MCS region. In one embodiment, a viral genome may comprise two filler sequences, the first filler sequence may be located between the payload region and intron region, and the second filler sequence may be located between the enhancer region and exon region. In one embodiment, a viral genome may comprise two filler sequences, the first filler sequence may be located between the payload region and intron region, and the second filler sequence may be located between the enhancer region and 3′ ITR. In one embodiment, a viral genome may comprise two filler sequences, the first filler sequence may be located between the payload region and intron region, and the second filler sequence may be located between the polyadenylation signal sequence region and MCS region. In one embodiment, a viral genome may comprise two filler sequences, the first filler sequence may be located between the payload region and intron region, and the second filler sequence may be located between the polyadenylation signal sequence region and exon region. In one embodiment, a viral genome may comprise two filler sequences, the first filler sequence may be located between the payload region and intron region, and the second filler sequence may be located between the polyadenylation signal sequence region and 3′ ITR. In one embodiment, a viral genome may comprise two filler sequences, the first filler sequence may be located between the payload region and intron region, and the second filler sequence may be located between the MCS region and exon region. In one embodiment, a viral genome may comprise two filler sequences, the first filler sequence may be located between the payload region and intron region, and the second filler sequence may be located between the MCS region and 3′ ITR. In one embodiment, a viral genome may comprise two filler sequences, the first filler sequence may be located between the payload region and intron region, and the second filler sequence may be located between the exon region and 3′ ITR.

[0261] In one embodiment, a viral genome may comprise two filler sequences, the first filler sequence may be located between the payload region and enhancer region, and the second filler sequence may be located between the intron region and enhancer region. In one embodiment, a viral genome may comprise two filler sequences, the first filler sequence may be located between the payload region and enhancer region, and the second filler sequence may be located between the intron region and polyadenylation signal sequence region. In one embodiment, a viral genome may comprise two filler sequences, the first filler sequence may be located between the payload region and enhancer region, and the second filler sequence may be located between the intron region and MCS region. In one embodiment, a viral genome may comprise two filler sequences, the first filler sequence may be located between the payload region and enhancer region, and the second filler sequence may be located between the intron region and exon region. In one embodiment, a viral genome may comprise two filler sequences, the first filler sequence may be located between the payload region and enhancer region, and the second filler sequence may be located between the intron region and 3′ ITR. In one embodiment, a viral genome may comprise two filler sequences, the first filler sequence may be located between the payload region and enhancer region, and the second filler sequence may be located between the enhancer region and polyadenylation signal sequence region. In one embodiment, a viral genome may comprise two filler sequences, the first filler sequence may be located between the payload region and enhancer region, and the second filler sequence may be located between the enhancer region and MCS region. In one embodiment, a viral genome may comprise two filler sequences, the first filler sequence may be located between the payload region and enhancer region, and the second filler sequence may be located between the enhancer region and exon region. In one embodiment, a viral genome may comprise two filler sequences, the first filler sequence may be located between the payload region and enhancer region, and the second filler sequence may be located between the enhancer region and 3′ ITR. In one embodiment, a viral genome may comprise two filler sequences, the first filler sequence may be located between the payload region and enhancer region, and the second filler sequence may be located between the polyadenylation signal sequence region and MCS region. In one embodiment, a viral genome may comprise two filler sequences, the first filler sequence may be located between the payload region and enhancer region, and the second filler sequence may be located between the polyadenylation signal sequence region and exon region. In one embodiment, a viral genome may comprise two filler sequences, the first filler sequence may be located between the payload region and enhancer region, and the second filler sequence may be located between the polyadenylation signal sequence region and 3′ ITR. In one embodiment, a viral genome may comprise two filler sequences, the first filler sequence may be located between the payload region and enhancer region, and the second filler sequence may be located between the MCS region and exon region. In one embodiment, a viral genome may comprise two filler sequences, the first filler sequence may be located between the payload region and enhancer region, and the second filler sequence may be located between the MCS region and 3′ ITR. In one embodiment, a viral genome may comprise two filler sequences, the first filler sequence may be located between the payload region and enhancer region, and the second filler sequence may be located between the exon region and 3′ ITR.

[0262] In one embodiment, a viral genome may comprise two filler sequences, the first filler sequence may be located between the payload region and polyadenylation signal sequence region, and the second filler sequence may be located between the intron region and enhancer region. In one embodiment, a viral genome may comprise two filler sequences, the first filler sequence may be located between the payload region and polyadenylation signal sequence region, and the second filler sequence may be located between the intron region and polyadenylation signal sequence region. In one embodiment, a viral genome may comprise two filler sequences, the first filler sequence may be located between the payload region and polyadenylation signal sequence region, and the second filler sequence may be located between the intron region and MCS region. In one embodiment, a viral genome may comprise two filler sequences, the first filler sequence may be located between the payload region and polyadenylation signal sequence region, and the second filler sequence may be located between the intron region and exon region. In one embodiment, a viral genome may comprise two filler sequences, the first filler sequence may be located between the payload region and polyadenylation signal sequence region, and the second filler sequence may be located between the intron region and 3′ ITR. In one embodiment, a viral genome may comprise two filler sequences, the first filler sequence may be located between the payload region and polyadenylation signal sequence region, and the second filler sequence may be located between the enhancer region and polyadenylation signal sequence region. In one embodiment, a viral genome may comprise two filler sequences, the first filler sequence may be located between the payload region and polyadenylation signal sequence region, and the second filler sequence may be located between the enhancer region and MCS region. In one embodiment, a viral genome may comprise two filler sequences, the first filler sequence may be located between the payload region and polyadenylation signal sequence region, and the second filler sequence may be located between the enhancer region and exon region. In one embodiment, a viral genome may comprise two filler sequences, the first filler sequence may be located between the payload region and polyadenylation signal sequence region, and the second filler sequence may be located between the enhancer region and 3′ ITR. In one embodiment, a viral genome may comprise two filler sequences, the first filler sequence may be located between the payload region and polyadenylation signal sequence region, and the second filler sequence may be located between the polyadenylation signal sequence region and MCS region. In one embodiment, a viral genome may comprise two filler sequences, the first filler sequence may be located between the payload region and polyadenylation signal sequence region, and the second filler sequence may be located between the polyadenylation signal sequence region and exon region. In one embodiment, a viral genome may comprise two filler sequences, the first filler sequence may be located between the payload region and polyadenylation signal sequence region, and the second filler sequence may be located between the polyadenylation signal sequence region and 3′ ITR. In one embodiment, a viral genome may comprise two filler sequences, the first filler sequence may be located between the payload region and polyadenylation signal sequence region, and the second filler sequence may be located between the MCS region and exon region. In one embodiment, a viral genome may comprise two filler sequences, the first filler sequence may be located between the payload region and polyadenylation signal sequence region, and the second filler sequence may be located between the MCS region and 3′ ITR. In one embodiment, a viral genome may comprise two filler sequences, the first filler sequence may be located between the payload region and polyadenylation signal sequence region, and the second filler sequence may be located between the exon region and 3′ ITR.

[0263] In one embodiment, a viral genome may comprise two filler sequences, the first filler sequence may be located between the payload region and MCS region, and the second filler sequence may be located between the intron region and enhancer region. In one embodiment, a viral genome may comprise two filler sequences, the first filler sequence may be located between the payload region and MCS region, and the second filler sequence may be located between the intron region and polyadenylation signal sequence region. In one embodiment, a viral genome may comprise two filler sequences, the first filler sequence may be located between the payload region and MCS region, and the second filler sequence may be located between the intron region and MCS region. In one embodiment, a viral genome may comprise two filler sequences, the first filler sequence may be located between the payload region and MCS region, and the second filler sequence may be located between the intron region and exon region. In one embodiment, a viral genome may comprise two filler sequences, the first filler sequence may be located between the payload region and MCS region, and the second filler sequence may be located between the intron region and 3′ ITR. In one embodiment, a viral genome may comprise two filler sequences, the first filler sequence may be located between the payload region and MCS region, and the second filler sequence may be located between the enhancer region and polyadenylation signal sequence region. In one embodiment, a viral genome may comprise two filler sequences, the first filler sequence may be located between the payload region and MCS region, and the second filler sequence may be located between the enhancer region and MCS region. In one embodiment, a viral genome may comprise two filler sequences, the first filler sequence may be located between the payload region and MCS region, and the second filler sequence may be located between the enhancer region and exon region. In one embodiment, a viral genome may comprise two filler sequences, the first filler sequence may be located between the payload region and MCS region, and the second filler sequence may be located between the enhancer region and 3′ ITR. In one embodiment, a viral genome may comprise two filler sequences, the first filler sequence may be located between the payload region and MCS region, and the second filler sequence may be located between the polyadenylation signal sequence region and MCS region. In one embodiment, a viral genome may comprise two filler sequences, the first filler sequence may be located between the payload region and MCS region, and the second filler sequence may be located between the polyadenylation signal sequence region and exon region. In one embodiment, a viral genome may comprise two filler sequences, the first filler sequence may be located between the payload region and MCS region, and the second filler sequence may be located between the polyadenylation signal sequence region and 3′ ITR. In one embodiment, a viral genome may comprise two filler sequences, the first filler sequence may be located between the payload region and MCS region, and the second filler sequence may be located between the MCS region and exon region. In one embodiment, a viral genome may comprise two filler sequences, the first filler sequence may be located between the payload region and MCS region, and the second filler sequence may be located between the MCS region and 3′ ITR. In one embodiment, a viral genome may comprise two filler sequences, the first filler sequence may be located between the payload region and MCS region, and the second filler sequence may be located between the exon region and 3′ ITR.

[0264] In one embodiment, a viral genome may comprise two filler sequences, the first filler sequence may be located between the payload region and exon region, and the second filler sequence may be located between the intron region and enhancer region. In one embodiment, a viral genome may comprise two filler sequences, the first filler sequence may be located between the payload region and exon region, and the second filler sequence may be located between the intron region and polyadenylation signal sequence region. In one embodiment, a viral genome may comprise two filler sequences, the first filler sequence may be located between the payload region and exon region, and the second filler sequence may be located between the intron region and MCS region. In one embodiment, a viral genome may comprise two filler sequences, the first filler sequence may be located between the payload region and exon region, and the second filler sequence may be located between the intron region and exon region. In one embodiment, a viral genome may comprise two filler sequences, the first filler sequence may be located between the payload region and exon region, and the second filler sequence may be located between the intron region and 3′ ITR. In one embodiment, a viral genome may comprise two filler sequences, the first filler sequence may be located between the payload region and exon region, and the second filler sequence may be located between the enhancer region and polyadenylation signal sequence region. In one embodiment, a viral genome may comprise two filler sequences, the first filler sequence may be located between the payload region and exon region, and the second filler sequence may be located between the enhancer region and MCS region. In one embodiment, a viral genome may comprise two filler sequences, the first filler sequence may be located between the payload region and exon region, and the second filler sequence may be located between the enhancer region and exon region. In one embodiment, a viral genome may comprise two filler sequences, the first filler sequence may be located between the payload region and exon region, and the second filler sequence may be located between the enhancer region and 3′ ITR. In one embodiment, a viral genome may comprise two filler sequences, the first filler sequence may be located between the payload region and exon region, and the second filler sequence may be located between the polyadenylation signal sequence region and MCS region. In one embodiment, a viral genome may comprise two filler sequences, the first filler sequence may be located between the payload region and exon region, and the second filler sequence may be located between the polyadenylation signal sequence region and exon region. In one embodiment, a viral genome may comprise two filler sequences, the first filler sequence may be located between the payload region and exon region, and the second filler sequence may be located between the polyadenylation signal sequence region and 3′ ITR. In one embodiment, a viral genome may comprise two filler sequences, the first filler sequence may be located between the payload region and exon region, and the second filler sequence may be located between the MCS region and exon region. In one embodiment, a viral genome may comprise two filler sequences, the first filler sequence may be located between the payload region and exon region, and the second filler sequence may be located between the MCS region and 3′ ITR. In one embodiment, a viral genome may comprise two filler sequences, the first filler sequence may be located between the payload region and exon region, and the second filler sequence may be located between the exon region and 3′ ITR.

[0265] In one embodiment, a viral genome may comprise two filler sequences, the first filler sequence may be located between the payload region and 3′ ITR region, and the second filler sequence may be located between the intron region and enhancer region. In one embodiment, a viral genome may comprise two filler sequences, the first filler sequence may be located between the payload region and 3′ ITR region, and the second filler sequence may be located between the intron region and polyadenylation signal sequence region. In one embodiment, a viral genome may comprise two filler sequences, the first filler sequence may be located between the payload region and 3′ ITR region, and the second filler sequence may be located between the intron region and MCS region. In one embodiment, a viral genome may comprise two filler sequences, the first filler sequence may be located between the payload region and 3′ ITR region, and the second filler sequence may be located between the intron region and exon region. In one embodiment, a viral genome may comprise two filler sequences, the first filler sequence may be located between the payload region and 3′ ITR region, and the second filler sequence may be located between the intron region and 3′ ITR. In one embodiment, a viral genome may comprise two filler sequences, the first filler sequence may be located between the payload region and 3′ ITR region, and the second filler sequence may be located between the enhancer region and polyadenylation signal sequence region. In one embodiment, a viral genome may comprise two filler sequences, the first filler sequence may be located between the payload region and 3′ ITR region, and the second filler sequence may be located between the enhancer region and MCS region. In one embodiment, a viral genome may comprise two filler sequences, the first filler sequence may be located between the payload region and 3′ ITR region, and the second filler sequence may be located between the enhancer region and exon region. In one embodiment, a viral genome may comprise two filler sequences, the first filler sequence may be located between the payload region and 3′ ITR region, and the second filler sequence may be located between the enhancer region and 3′ ITR. In one embodiment, a viral genome may comprise two filler sequences, the first filler sequence may be located between the payload region and 3′ ITR region, and the second filler sequence may be located between the polyadenylation signal sequence region and MCS region. In one embodiment, a viral genome may comprise two filler sequences, the first filler sequence may be located between the payload region and 3′ ITR region, and the second filler sequence may be located between the polyadenylation signal sequence region and exon region. In one embodiment, a viral genome may comprise two filler sequences, the first filler sequence may be located between the payload region and 3′ ITR region, and the second filler sequence may be located between the polyadenylation signal sequence region and 3′ ITR. In one embodiment, a viral genome may comprise two filler sequences, the first filler sequence may be located between the payload region and 3′ ITR region, and the second filler sequence may be located between the MCS region and exon region. In one embodiment, a viral genome may comprise two filler sequences, the first filler sequence may be located between the payload region and 3′ ITR region, and the second filler sequence may be located between the MCS region and 3′ ITR. In one embodiment, a viral genome may comprise two filler sequences, the first filler sequence may be located between the payload region and 3′ ITR region, and the second filler sequence may be located between the exon region and 3′ ITR.

[0266] In one embodiment, a viral genome may comprise two filler sequences, the first filler sequence may be located between the intron region and enhancer region, and the second filler sequence may be located between the enhancer region and polyadenylation signal sequence region. In one embodiment, a viral genome may comprise two filler sequences, the first filler sequence may be located between the intron region and enhancer region, and the second filler sequence may be located between the enhancer region and MCS region. In one embodiment, a viral genome may comprise two filler sequences, the first filler sequence may be located between the intron region and enhancer region, and the second filler sequence may be located between the enhancer region and exon region. In one embodiment, a viral genome may comprise two filler sequences, the first filler sequence may be located between the intron region and enhancer region, and the second filler sequence may be located between the enhancer region and 3′ ITR. In one embodiment, a viral genome may comprise two filler sequences, the first filler sequence may be located between the intron region and enhancer region, and the second filler sequence may be located between the polyadenylation signal sequence region and MCS region. In one embodiment, a viral genome may comprise two filler sequences, the first filler sequence may be located between the intron region and enhancer region, and the second filler sequence may be located between the polyadenylation signal sequence region and exon region. In one embodiment, a viral genome may comprise two filler sequences, the first filler sequence may be located between the intron region and enhancer region, and the second filler sequence may be located between the polyadenylation signal sequence region and 3′ ITR. In one embodiment, a viral genome may comprise two filler sequences, the first filler sequence may be located between the intron region and enhancer region, and the second filler sequence may be located between the MCS region and exon region. In one embodiment, a viral genome may comprise two filler sequences, the first filler sequence may be located between the intron region and enhancer region, and the second filler sequence may be located between the MCS region and 3′ ITR. In one embodiment, a viral genome may comprise two filler sequences, the first filler sequence may be located between the intron region and enhancer region, and the second filler sequence may be located between the exon region and 3′ ITR.

[0267] In one embodiment, a viral genome may comprise two filler sequences, the first filler sequence may be located between the intron region and polyadenylation signal sequence region, and the second filler sequence may be located between the enhancer region and polyadenylation signal sequence region. In one embodiment, a viral genome may comprise two filler sequences, the first filler sequence may be located between the intron region and polyadenylation signal sequence region, and the second filler sequence may be located between the enhancer region and MCS region. In one embodiment, a viral genome may comprise two filler sequences, the first filler sequence may be located between the intron region and polyadenylation signal sequence region, and the second filler sequence may be located between the enhancer region and exon region. In one embodiment, a viral genome may comprise two filler sequences, the first filler sequence may be located between the intron region and polyadenylation signal sequence region, and the second filler sequence may be located between the enhancer region and 3′ ITR. In one embodiment, a viral genome may comprise two filler sequences, the first filler sequence may be located between the intron region and polyadenylation signal sequence region, and the second filler sequence may be located between the polyadenylation signal sequence region and MCS region. In one embodiment, a viral genome may comprise two filler sequences, the first filler sequence may be located between the intron region and polyadenylation signal sequence region, and the second filler sequence may be located between the polyadenylation signal sequence region and exon region. In one embodiment, a viral genome may comprise two filler sequences, the first filler sequence may be located between the intron region and polyadenylation signal sequence region, and the second filler sequence may be located between the polyadenylation signal sequence region and 3′ ITR. In one embodiment, a viral genome may comprise two filler sequences, the first filler sequence may be located between the intron region and pol adenylation signal sequence region, and the second filler sequence may be located between the MCS region and exon region. In one embodiment, a viral genome may comprise two filler sequences, the first filler sequence may be located between the intron region and polyadenylation signal sequence region, and the second filler sequence may be located between the MCS region and 3′ ITR. In one embodiment, a viral genome may comprise two filler sequences, the first filler sequence may be located between the intron region and polyadenylation signal sequence region, and the second filler sequence may be located between the exon region and 3′ ITR.

[0268] In one embodiment, a viral genome may comprise two filler sequences, the first filler sequence may be located between the intron region and MCS region, and the second filler sequence may be located between the enhancer region and polyadenylation signal sequence region. In one embodiment, a viral genome may comprise two filler sequences, the first filler sequence may be located between the intron region and MCS region, and the second filler sequence may be located between the enhancer region and MCS region. In one embodiment, a viral genome may comprise two filler sequences, the first filler sequence may be located between the intron region and MCS region, and the second filler sequence may be located between the enhancer region and exon region. In one embodiment, a viral genome may comprise two filler sequences, the first filler sequence may be located between the intron region and MCS region, and the second filler sequence may be located between the enhancer region and 3′ ITR. In one embodiment, a viral genome may comprise two filler sequences, the first filler sequence may be located between the intron region and MCS region, and the second filler sequence may be located between the polyadenylation signal sequence region and MCS region. In one embodiment, a viral genome may comprise two filler sequences, the first filler sequence may be located between the intron region and MCS region, and the second filler sequence may be located between the polyadenylation signal sequence region and exon region. In one embodiment, a viral genome may comprise two filler sequences, the first filler sequence may be located between the intron region and MCS region, and the second filler sequence may be located between the polyadenylation signal sequence region and 3′ ITR. In one embodiment, a viral genome may comprise two filler sequences, the first filler sequence may be located between the intron region and MCS region, and the second filler sequence may be located between the MCS region and exon region. In one embodiment, a viral genome may comprise two filler sequences, the first filler sequence may be located between the intron region and MCS region, and the second filler sequence may be located between the MCS region and 3′ ITR. In one embodiment, a viral genome may comprise two filler sequences, the first filler sequence may be located between the intron region and MCS region, and the second filler sequence may be located between the exon region and 3′ ITR.

[0269] In one embodiment, a viral genome may comprise two filler sequences, the first filler sequence may be located between the intron region and exon region, and the second filler sequence may be located between the enhancer region and polyadenylation signal sequence region. In one embodiment, a viral genome may comprise two filler sequences, the first filler sequence may be located between the intron region and exon region, and the second filler sequence may be located between the enhancer region and MCS region. In one embodiment, a viral genome may comprise two filler sequences, the first filler sequence may be located between the intron region and exon region, and the second filler sequence may be located between the enhancer region and exon region. In one embodiment, a viral genome may comprise two filler sequences, the first filler sequence may be located between the intron region and exon region, and the second filler sequence may be located between the enhancer region and 3′ ITR. In one embodiment, a viral genome may comprise two filler sequences, the first filler sequence may be located between the intron region and exon region, and the second filler sequence may be located between the polyadenylation signal sequence region and MCS region. In one embodiment, a viral genome may comprise two filler sequences, the first filler sequence may be located between the intron region and exon region, and the second filler sequence may be located between the polyadenylation signal sequence region and exon region. In one embodiment, a viral genome may comprise two filler sequences, the first filler sequence may be located between the intron region and exon region, and the second filler sequence may be located between the polyadenylation signal sequence region and 3′ ITR. In one embodiment, a viral genome may comprise two filler sequences, the first filler sequence may be located between the intron region and exon region, and the second filler sequence may be located between the MCS region and exon region. In one embodiment, a viral genome may comprise two filler sequences, the first filler sequence may be located between the intron region and exon region, and the second filler sequence may be located between the MCS region and 3′ ITR. In one embodiment, a viral genome may comprise two filler sequences, the first filler sequence may be located between the intron region and exon region, and the second filler sequence may be located between the exon region and 3′ ITR.

[0270] In one embodiment, a viral genome may comprise two filler sequences, the first filler sequence may be located between the intron region and 3′ITR, and the second filler sequence may be located between the enhancer region and polyadenylation signal sequence region. In one embodiment, a viral genome may comprise two filler sequences, the first filler sequence may be located between the intron region and 3′ITR, and the second filler sequence may be located between the enhancer region and MCS region. In one embodiment, a viral genome may comprise two filler sequences, the first filler sequence may be located between the intron region and 3′ITR, and the second filler sequence may be located between the enhancer region and exon region. In one embodiment, a viral genome may comprise two filler sequences, the first filler sequence may be located between the intron region and 3′ITR, and the second filler sequence may be located between the enhancer region and 3′ ITR. In one embodiment, a viral genome may comprise two filler sequences, the first filler sequence may be located between the intron region and 3′ITR, and the second filler sequence may be located between the polyadenylation signal sequence region and MCS region. In one embodiment, a viral genome may comprise two filler sequences, the first filler sequence may be located between the intron region and 3′ITR, and the second filler sequence may be located between the polyadenylation signal sequence region and exon region. In one embodiment, a viral genome may comprise two filler sequences, the first filler sequence may be located between the intron region and 3′ITR, and the second filler sequence may be located between the polyadenylation signal sequence region and 3′ ITR. In one embodiment, a viral genome may comprise two filler sequences, the first filler sequence may be located between the intron region and 3′ITR, and the second filler sequence may be located between the MCS region and exon region. In one embodiment, a viral genome may comprise two filler sequences, the first filler sequence may be located between the intron region and 3′ITR, and the second filler sequence may be located between the MCS region and 3′ ITR. In one embodiment, a viral genome may comprise two filler sequences, the first filler sequence may be located between the intron region and 3′ITR, and the second filler sequence may be located between the exon region and 3′ ITR.

[0271] In one embodiment, a viral genome may comprise two filler sequences, the first filler sequence may be located between the enhancer region and polyadenylation signal sequence region, and the second filler sequence may be located between the polyadenylation signal sequence region and MCS region. In one embodiment, a viral genome may comprise two filler sequences, the first filler sequence may be located between the enhancer region and polyadenylation signal sequence region, and the second filler sequence may be located between the polyadenylation signal sequence region and exon region. In one embodiment, a viral genome may comprise two filler sequences, the first filler sequence may be located between the enhancer region and polyadenylation signal sequence region, and the second filler sequence may be located between the polyadenylation signal sequence region and 3′ ITR. In one embodiment, a viral genome may comprise two filler sequences, the first filler sequence may be located between the enhancer region and polyadenylation signal sequence region, and the second filler sequence may be located between the MCS region and exon region. In one embodiment, a viral genome may comprise two filler sequences, the first filler sequence may be located between the enhancer region and polyadenylation signal sequence region, and the second filler sequence may be located between the MCS region and 3′ ITR. In one embodiment, a viral genome may comprise two filler sequences, the first filler sequence may be located between the enhancer region and polyadenylation signal sequence region, and the second filler sequence may be located between the exon region and 3′ ITR.

[0272] In one embodiment, a viral genome may comprise two filler sequences, the first filler sequence may be located between the enhancer region and MCS region, and the second filler sequence may be located between the polyadenylation signal sequence region and MCS region. In one embodiment, a viral genome may comprise two filler sequences, the first filler sequence may be located between the enhancer region and MCS region, and the second filler sequence may be located between the polyadenylation signal sequence region and exon region. In one embodiment, a viral genome may comprise two filler sequences, the first filler sequence may be located between the enhancer region and MCS region, and the second filler sequence may be located between the polyadenylation signal sequence region and 3′ ITR. In one embodiment, a viral genome may comprise two filler sequences, the first filler sequence may be located between the enhancer region and MCS region, and the second filler sequence may be located between the MCS region and exon region. In one embodiment, a viral genome may comprise two filler sequences, the first filler sequence may be located between the enhancer region and MCS region, and the second filler sequence may be located between the MCS region and 3′ ITR. In one embodiment, a viral genome may comprise two filler sequences, the first filler sequence may be located between the enhancer region and MCS region, and the second filler sequence may be located between the exon region and 3′ ITR.

[0273] In one embodiment, a viral genome may comprise two filler sequences, the first filler sequence may be located between the enhancer region and exon region, and the second filler sequence may be located between the polyadenylation signal sequence region and MCS region. In one embodiment, a viral genome may comprise two filler sequences, the first filler sequence may be located between the enhancer region and exon region, and the second filler sequence may be located between the polyadenylation signal sequence region and exon region. In one embodiment, a viral genome may comprise two filler sequences, the first filler sequence may be located between the enhancer region and exon region, and the second filler sequence may be located between the polyadenylation signal sequence region and 3′ ITR. In one embodiment, a viral genome may comprise two filler sequences, the first filler sequence may be located between the enhancer region and exon region, and the second filler sequence may be located between the MCS region and exon region. In one embodiment, a viral genome may comprise two filler sequences, the first filler sequence may be located between the enhancer region and exon region, and the second filler sequence may be located between the MCS region and 3′ ITR. In one embodiment, a viral genome may comprise two filler sequences, the first filler sequence may be located between the enhancer region and exon region, and the second filler sequence may be located between the exon region and 3′ ITR.

[0274] In one embodiment, a viral genome may comprise two filler sequences, the first filler sequence may be located between the enhancer region and 3′ ITR, and the second filler sequence may be located between the polyadenylation signal sequence region and MCS region. In one embodiment, a viral genome may comprise two filler sequences, the first filler sequence may be located between the enhancer region and 3′ ITR, and the second filler sequence may be located between the polyadenylation signal sequence region and exon region. In one embodiment, a viral genome may comprise two filler sequences, the first filler sequence may be located between the enhancer region and 3′ ITR, and the second filler sequence may be located between the polyadenylation signal sequence region and 3′ ITR. In one embodiment, a viral genome may comprise two filler sequences, the first filler sequence may be located between the enhancer region and 3′ ITR, and the second filler sequence may be located between the MCS region and exon region. In one embodiment, a viral genome may comprise two filler sequences, the first filler sequence may be located between the enhancer region and 3′ ITR, and the second filler sequence may be located between the MCS region and 3′ ITR. In one embodiment, a viral genome may comprise two filler sequences, the first filler sequence may be located between the enhancer region and 3′ ITR, and the second filler sequence may be located between the exon region and 3′ ITR.

[0275] In one embodiment, a viral genome may comprise two filler sequences, the first filler sequence may be located between the polyadenylation signal sequence region and MCS region, and the second filler sequence may be located between the MCS region and exon region. In one embodiment, a viral genome may comprise two filler sequences, the first filler sequence may be located between the polyadenylation signal sequence region and MCS region, and the second filler sequence may be located between the MCS region and 3′ ITR. In one embodiment, a viral genome may comprise two filler sequences, the first filler sequence may be located between the polyadenylation signal sequence region and MCS region, and the second filler sequence may be located between the exon region and 3′ ITR.

[0276] In one embodiment, a viral genome may comprise two filler sequences, the first filler sequence may be located between the polyadenylation signal sequence region and exon region, and the second filler sequence may be located between the MCS region and exon region. In one embodiment, a viral genome may comprise two filler sequences, the first filler sequence may be located between the polyadenylation signal sequence region and exon region, and the second filler sequence may be located between the MCS region and 3′ ITR. In one embodiment, a viral genome may comprise two filler sequences, the first filler sequence may be located between the polyadenylation signal sequence region and exon region, and the second filler sequence may be located between the exon region and 3′ ITR.

[0277] In one embodiment, a viral genome may comprise two filler sequences, the first filler sequence may be located between the polyadenylation signal sequence region and 3′ ITR, and the second filler sequence may be located between the MCS region and exon region. In one embodiment, a viral genome may comprise two filler sequences, the first filler sequence may be located between the polyadenylation signal sequence region and 3′ ITR, and the second filler sequence may be located between the MCS region and 3′ ITR. In one embodiment, a viral genome may comprise two filler sequences, the first filler sequence may be located between the polyadenylation signal sequence region and 3′ ITR, and the second filler sequence may be located between the exon region and 3′ ITR.

[0278] In one embodiment, a viral genome may comprise two filler sequences, the first filler sequence may be located between the MCS region and exon region, and the second filler sequence may be located between the exon region and 3′ ITR.

### Payloads of the Invention

[0279] The AAV particles of the present disclosure comprise at least one payload region. As used herein, “payload” or “payload region” refers to one or more polynucleotides or polynucleotide regions encoded by or within a viral genome or an expression product of such polynucleotide or polynucleotide region, e.g., a transgene, a polynucleotide encoding a polypeptide or multi-polypeptide or a modulatory nucleic acid or regulatory nucleic acid. Payloads of the present invention typically encode modulatory polynucleotides or fragments or variants thereof.

[0280] The payload region may be constructed in such a way as to reflect a region similar to or mirroring the natural organization of an mRNA.

[0281] The payload region may comprise a combination of coding and non-coding nucleic acid sequences.

[0282] In some embodiments, the AAV payload region may encode a coding or non-coding RNA.

[0283] In one embodiment, the AAV particle comprises a viral genome with a payload region comprising nucleic acid sequences encoding a siRNA, miRNA or other RNAi agent. In such an embodiment, a viral genome encoding more than one polypeptide may be replicated and packaged into a viral particle. A target cell transduced with a viral particle may express the encoded siRNA, miRNA or other RNAi agent inside a single cell.

### Modulatory Polynucleotides

[0284] In one embodiment, modulatory polynucleotides, e.g., RNA or DNA molecules, may be used to treat neurodegenerative disease, in particular, Huntington's Disease (HD). As used herein, a “modulatory polynucleotide” is any nucleic acid sequence(s) which functions to modulate (either increase or decrease) the level or amount of a target gene, e.g., mRNA or protein levels.

[0285] In one embodiment, the modulatory polynucleotides may comprise at least one nucleic acid sequence encoding at least one siRNA molecule. The nucleic acids may, independently if there is more than one, encode 1, 2, 3, 4, 5, 6, 7, 8, 9, or more than 9 siRNA molecules.

[0286] In one embodiment, the molecular scaffold may be located downstream of a CMV promoter, fragment or variant thereof.

[0287] In one embodiment, the molecular scaffold may be located downstream of a CBA promoter, fragment or variant thereof.

[0288] In one embodiment, the molecular scaffold may be a natural pri-miRNA scaffold located downstream of a CMV promoter. As a non-limiting example, the natural pri-miRNA scaffold is derived from the human miR155 scaffold.

[0289] In one embodiment, the molecular scaffold may be a natural pri-miRNA scaffold located downstream of a CBA promoter.

[0290] In one embodiment, the selection of a molecular scaffold and modulatory polynucleotide is determined by a method of comparing modulatory polynucleotides in pri-miRNA (see e.g., the method described by Miniarikova et al. Design, Characterization, and Lead Selection of Therapeutic miRN4s Targeting Huntingtin for Development of Gene Therapy for Huntington's Disease. Molecular Therapy-Nucleic Acids (2016) 5, e297 and International Publication No. WO2016102664, the contents of each of which are herein incorporated by reference in their entireties). The modulatory polynucleotide may, but it not limited to, targeting exon 1, CAG repeats, SNP rs362331 in exon 50 and/or SNP rs362307 in exon 67. To evaluate the activities of the modulatory polynucleotides, the molecular scaffold used which may be used is a human pri-miRNA scaffold (e.g., miR1155 scaffold) and the promoter may be CMV. The activity may be determined in vitro using HEK293T cells and a reporter (e.g., Luciferase). For exon 1 targeting, the modulatory polynucleotide is determined to be efficient at HTT knockdown if the knockdown is 80% or greater. For CAG targeting, the modulatory polynucleotide is determined to be efficient at HTT knockdown if the knockdown is at least 60%. For SNP targeting, the modulatory polynucleotide is determined to be efficient at HTT knockdown if the knockdown is at least 60%. For allele selectivity for CAG repeats or SNP targeting the modulatory polynucleotides may comprise at least 1 substitution in order to improve allele selectivity. As a non-limiting example, substitution may be a G or C replaced with a T or corresponding U and A or T/U replaced by a C.

[0291] In order to evaluate the optimal molecular scaffold for the modulatory polynucleotide, the modulatory polynucleotide is used in pri-miRNA scaffolds with a CAG promoter. The constructs are co-transfected with a reporter (e.g., luciferase reporter) at 50 ng. Constructs with greater than 80% knockdown at 50 ng co-transfection are considered efficient. In one aspect, the constructs with strong guide-strand activity are preferred. The molecular scaffolds can be processed in HEK293T cells by NGS to determine guide-passenger ratios, and processing variability.

[0292] To evaluate the molecular scaffolds and modulatory polynucleotides in vivo the molecular scaffolds comprising the modulatory polynucleotides are packaged in AAV (e.g., the serotype may be AAV5 (see e.g., the method and constructs described in WO2015060722, the contents of which are herein incorporated by reference in their entirety)) and administered to an in vivo model (e.g., Hu128/21 HD mouse) and the guide-passenger ratios, 5′ and 3′ end processing, reversal of guide and passenger strands, and knockdown can be determined in different areas of the model.

[0293] In one embodiment, the selection of a molecular scaffold and modulatory polynucleotide is determined by a method of comparing modulatory polynucleotides in natural pri-miRNA and synthetic pri-miRNA. The modulatory polynucleotide may, but it not limited to, targeting an exon other than exon 1. To evaluate the activities of the modulatory polynucleotides, the molecular scaffold is used with a CBA promoter. In one aspect, the activity may be determined in vitro using HEK293T cells, HeLa cell and a reporter (e.g., Luciferase) and knockdown efficient modulatory polynucleotides showed HTT knockdown of at least 80% in the cell tested. Additionally, the modulatory polynucleotides which are considered most efficient showed low to no significant passenger strand (p-strand) activity. In another aspect, the endogenous HTT knockdown efficacy is evaluated by transfection in vitro using HEK293T cells, HeLa cell and a reporter. Efficient modulatory polynucleotides show greater than 50% endogenous HTT knockdown. In yet another aspect, the endogenous HTT knockdown efficacy is evaluated in different cell types (e.g., HEK293, HeLa, primary astrocytes. U251 astrocytes, SH-SY5Y neuron cells and fibroblasts from HD patients) by infection (e.g., AAV2). Efficient modulatory polynucleotides show greater than 60% endogenous HTT knockdown.

[0294] To evaluate the molecular scaffolds and modulatory polynucleotides in vivo the molecular scaffolds comprising the modulatory polynucleotides are packaged in AAV and administered to an in vivo model (e.g., YAC128 HD mouse) and the guide-passenger ratios, 5′ and 3′ end processing, ratio of guide to passenger strands, and knockdown can be determined in different areas of the model (e.g., tissue regions). The molecular scaffolds can be processed from in vivo samples by NGS to determine guide-passenger ratios, and processing variability.

[0295] In one embodiment, the modulatory polynucleotide is designed using at least one of the following properties: loop variant, seed mismatch/bulge/wobble variant, stem mismatch, loop variant and vassal stem mismatch variant, seed mismatch and basal stem mismatch variant, stem mismatch and basal stem mismatch variant, seed wobble and basal stem wobble variant, or a stem sequence variant.

siRNA Molecules

[0296] The present invention relates to RNA interference (RNAi) induced inhibition of gene expression for treating neurodegenerative disorders. Provided herein are siRNA duplexes or encoded dsRNA that target the HTT gene (referred to herein collectively as “siRNA molecules”). Such siRNA duplexes or encoded dsRNA can reduce or silence HTT gene expression in cells, for example, medium spiny neurons, cortical neurons and/or astrocytes, thereby, ameliorating symptoms of Huntington's Disease (HD).

[0297] RNAi (also known as post-transcriptional gene silencing (PTGS), quelling, or co-suppression) is a post-transcriptional gene silencing process in which RNA molecules, in a sequence specific manner, inhibit gene expression, typically by causing the destruction of specific mRNA molecules. The active components of RNAi are short/small double stranded RNAs (dsRNAs), called small interfering RNAs (siRNAs), that typically contain 15-30 nucleotides (e.g., 19 to 25, 19 to 24 or 19-21 nucleotides) and 2 nucleotide 3′ overhangs and that match the nucleic acid sequence of the target gene. These short RNA species may be naturally produced in vivo by Dicer-mediated cleavage of larger dsRNAs and they are functional in mammalian cells.

[0298] Naturally expressed small RNA molecules, named microRNAs (miRNAs), elicit gene silencing by regulating the expression of mRNAs. The miRNAs containing RNA Induced Silencing Complex (RISC) targets mRNAs presenting a perfect sequence complementarity with nucleotides 2-7 in the 5′ region of the miRNA which is called the seed region, and other base pairs with its 3′ region, miRNA mediated down regulation of gene expression may be caused by cleavage of the target mRNAs, translational inhibition of the target mRNAs, or mRNA decay. miRNA targeting sequences are usually located in the 3′-UTR of the target mRNAs. A single miRNA may target more than 100 transcripts from various genes, and one mRNA may be targeted by different miRNAs.

[0299] siRNA duplexes or dsRNA targeting a specific mRNA may be designed and synthesized in vitro and introduced into cells for activating RNAi processes. Elbashir et al. demonstrated that 21-nucleotide siRNA duplexes (termed small interfering RNAs) were capable of effecting potent and specific gene knockdown without inducing immune response in mammalian cells (Elbashir S M et al., Nature, 2001, 411, 494-498). Since this initial report, post-transcriptional gene silencing by siRNAs quickly emerged as a powerful tool for genetic analysis in mammalian cells and has the potential to produce novel therapeutics.

[0300] RNAi molecules which were designed to target against a nucleic acid sequence that encodes poly-glutamine repeat proteins which cause poly-glutamine expansion diseases such as Huntington's Disease, are described in U.S. Pat. Nos. 9,169,483 and 9,181,544 and International Patent Publication No. WO2015179525, the content of each of which is herein incorporated by reference in their entirety. U.S. Pat. Nos. 9,169,483 and 9,181,544 and International Patent Publication No. WO2015179525 each provide isolated RNA duplexes comprising a first strand of RNA (e.g., 15 contiguous nucleotides) and second strand of RNA (e.g., complementary to at least 12 contiguous nucleotides of the first strand) where the RNA duplex is about 15 to 30 base pairs in length. The first strand of RNA and second strand of RNA may be operably linked by an RNA loop (˜4 to 50 nucleotides) to form a hairpin structure which may be inserted into an expression cassette. Non-limiting examples of loop portions include SEQ ID NO: 9-14 of U.S. Pat. No. 9,169,483, the content of which is herein incorporated by reference in its entirety. Non-limiting examples of strands of RNA which may be used, either full sequence or part of the sequence, to form RNA duplexes include SEQ ID NO: 1-8 of U.S. Pat. No. 9,169,483 and SEQ ID NO: 1-11, 33-59, 208-210, 213-215 and 218-221 of U.S. Pat. No. 9,181,544, the contents of each of which is herein incorporated by reference in its entirety. Non-limiting examples of RNAi molecules include SEQ ID NOs: 1-8 of U.S. Pat. No. 9,169,483, SEQ ID NOs: 1-11, 33-59, 208-210, 213-215 and 218-221 of U.S. Pat. No. 9,181,544 and SEQ ID NOs: 1, 6, 7, and 35-38 of International Patent Publication No. WO2015179525, the contents of each of which is herein incorporated by reference in their entirety.

[0301] In vitro synthesized siRNA molecules may be introduced into cells in order to activate RNAi. An exogenous siRNA duplex, when it is introduced into cells, similar to the endogenous dsRNAs, can be assembled to form the RNA Induced Silencing Complex (RISC), a multiunit complex that interacts with RNA sequences that are complementary to one of the two strands of the siRNA duplex (i.e., the antisense strand). During the process, the sense strand (or passenger strand) of the siRNA is lost from the complex, while the antisense strand (or guide strand) of the siRNA is matched with its complementary RNA. In particular, the targets of siRNA containing RISC complexes are mRNAs presenting a perfect sequence complementarity. Then, siRNA mediated gene silencing occurs by cleaving, releasing and degrading the target.

[0302] The siRNA duplex comprised of a sense strand homologous to the target mRNA and an antisense strand that is complementary to the target mRNA offers much more advantage in terms of efficiency for target RNA destruction compared to the use of the single strand (ss)-siRNAs (e.g. antisense strand RNA or antisense oligonucleotides). In many cases, it requires higher concentration of the ss-siRNA to achieve the effective gene silencing potency of the corresponding duplex.

[0303] Any of the foregoing molecules may be encoded by a viral genome.

Design and Sequences of siRNA Duplexes Targeting HTT Gene

[0304] The present invention provides small interfering RNA (siRNA) duplexes (and modulatory polynucleotides encoding them) that target HTT mRNA to interfere with HTT gene expression and/or HTT protein production.

[0305] The encoded siRNA duplex of the present invention contains an antisense strand and a sense strand hybridized together forming a duplex structure, wherein the antisense strand is complementary to the nucleic acid sequence of the targeted HTT gene, and wherein the sense strand is homologous to the nucleic acid sequence of the targeted HTT gene. In some aspects, the 5′ end of the antisense strand has a 5′ phosphate group and the 3′ end of the sense strand contains a 3′hydroxyl group. In other aspects, there are none, one or 2 nucleotide overhangs at the 3′end of each strand.

[0306] Some guidelines for designing siRNAs have been proposed in the art. These guidelines generally recommend generating a 19-nucleotide duplexed region, symmetric 2-3 nucleotide 3′overhangs, 5′-phosphate and 3′-hydroxyl groups targeting a region in the gene to be silenced. Other rules that may govern siRNA sequence preference include, but are not limited to, (i) A/U at the 5′ end of the antisense strand; (ii) G/C at the 5′ end of the sense strand; (iii) at least five A/U residues in the 5′ terminal one-third of the antisense strand; and (iv) the absence of any GC stretch of more than 9 nucleotides in length. In accordance with such consideration, together with the specific sequence of a target gene, highly effective siRNA molecules essential for suppressing mammalian target gene expression may be readily designed.

[0307] According to the present invention, siRNA molecules (e.g., siRNA duplexes or encoded dsRNA) that target the HTT gene are designed. Such siRNA molecules can specifically, suppress HTT gene expression and protein production. In some aspects, the siRNA molecules are designed and used to selectively “knock out” HTT gene variants in cells, i.e., mutated HTT transcripts that are identified in patients with HD disease. In some aspects, the siRNA molecules are designed and used to selectively “knock down” HTT gene variants in cells. In other aspects, the siRNA molecules are able to inhibit or suppress both the wild type and mutated HTT gene.

[0308] In one embodiment, an siRNA molecule of the present invention comprises a sense strand and a complementary antisense strand in which both strands are hybridized together to form a duplex structure. The antisense strand has sufficient complementarity to the HTT mRNA sequence to direct target-specific RNAi, i.e., the siRNA molecule has a sequence sufficient to trigger the destruction of the target mRNA by the RNAi machinery or process.

[0309] In one embodiment, an siRNA molecule of the present invention comprises a sense strand and a complementary antisense strand in which both strands are hybridized together to form a duplex structure and where the start site of the hybridization to the HTT mRNA is between nucleotide 100 and 7000 on the HTT mRNA sequence. As a non-limiting example, the start site may be between nucleotide 100-150, 150-200, 200-250, 250-300, 300-350, 350-400, 400-450, 450-500, 500-550, 550-600, 600-650, 650-700, 700-70, 750-800, 800-850, 850-900, 900-950, 950-1000, 1000-1050, 1050-1100, 1100-1150, 1150-1200, 1200-1250, 1250-1300, 1300-1350, 1350-1400, 1400-1450, 1450-1500, 1500-1550, 1550-1600, 1600-1650, 1650-1700, 1700-1750, 1750-1800, 1800-1850, 1850-1900, 1900-1950, 1950-2000, 2000-2050, 2050-2100, 2100-2150, 2150-2200, 2200-2250, 2250-2300, 2300-2350, 2350-2400, 2400-2450, 2450-2500, 2500-2550, 2550-2600, 2600-2650, 2650-2700, 2700-2750, 2750-2800, 2800-2850, 2850-2900, 2900-2950, 2950-3000, 3000-3050, 3050-3100, 3100-3150, 3150-3200, 3200-3250, 3250-3300, 3300-3350, 3350-3400, 3400-3450, 3450-3500, 3500-3550, 3550-3600, 3600-3650, 3650-3700, 3700-3750, 3750-3800, 3800-3850, 3850-3900, 3900-3950, 3950-4000, 4000-4050, 4050-4100, 4100-4150, 4150-4200, 4200-4250, 4250-4300, 4300-4350, 4350-4400, 4400-4450, 4450-4500, 4500-4550, 4550-4600, 4600-4650, 4650-4700, 4700-4750, 4750-4800, 4800-4850, 4850-4900, 4900-4950, 4950-5000, 5000-5050, 5050-5100, 5100-5150, 5150-5200, 5200-5250, 5250-5300, 5300-5350, 5350-5400, 5400-5450, 5450-5500, 5500-5550, 5550-5600, 5600-5650, 5650-5700, 5700-5750, 5750-5800, 5800-5850, 5850-5900, 5900-5950, 5950-6000, 6000-6050, 6050-6100, 6100-6150, 6150-6200, 6200-6250, 6250-6300, 6300-6350, 6350-6400, 6400-6450, 6450-6500, 6500-6550, 6550-6600, 6600-6650, 6650-6700, 6700-6750, 6750-6800, 6800-6850, 6850-6900, 6900-6950, 6950-7000, 7000-7050, 7050-7100, 7100-7150, 7150-7200, 7200-7250, 7250-7300, 7300-7350, 7350-7400, 7400-7450, 7450-7500, 7500-7550, 7550-7600, 7600-7650, 7650-7700, 7700-7750, 7750-7800, 7800-7850, 7850-7900, 7900-7950, 7950-8000, 8000-8050, 8050-8100, 8100-8150, 8150-8200, 8200-8250, 8250-8300, 8300-8350, 8350-8400, 8400-8450, 8450-8500, 8500-8550, 8550-8600, 8600-8650, 8650-8700, 8700-8750, 8750-8800, 8800-8850, 8850-8900, 8900-8950, 8950-9000, 9000-9050, 9050-9100, 9100-9150, 9150-9200, 9200-9250, 9250-9300, 9300-9350, 9350-9400, 9400-9450, 9450-9500, 9500-9550, 9550-9600, 9600-9650, 9650-9700, 9700-9750, 9750-9800, 9800-9850, 9850-9900, 9900-9950, 9950-10000, 10000-10050, 10050-10100, 10100-10150, 10150-10200, 10200-10250, 10250-10300, 10300-10350, 10350-10400, 10400-10450, 10450-10500, 10500-10550, 10550-10600, 10600-10650, 10650-10700, 10700-10750, 10750-10800, 10800-10850, 10850-10900, 10900-10950, 10950-11000, 11050-11100, 11100-11150, 11150-11200, 11200-11250, 11250-11300, 11300-11350, 11350-11400, 11400-11450, 11450-11500, 11500-11550, 11550-11600, 11600-11650, 11650-11700, 11700-11750, 11750-11800, 11800-11850, 11850-11900, 11900-11950, 11950-12000, 12000-12050, 12050-12100, 12100-12150, 12150-12200, 12200-12250, 12250-12300, 12300-12350, 12350-12400, 12400-12450, 12450-12500, 12500-12550, 12550-12600, 12600-12650, 12650-12700, 12700-12750, 12750-12800, 12800-12850, 12850-12900, 12900-12950, 12950-13000, 13050-13100, 13100-13150, 13150-13200, 13200-13250, 13250-13300, 13300-13350, 13350-13400, 13400-13450, and 13450-13500 on the HTT mRNA sequence. As yet another non-limiting example, the start site may be nucleotide 315, 316, 317, 318, 319, 320, 321, 322, 323, 324, 325, 326, 327, 328, 329, 330, 331, 332, 333, 334, 335, 336, 337, 338, 339, 340, 341, 342, 343, 344, 345, 346, 347, 348, 349, 350, 595, 596, 597, 598, 599, 600, 601, 602, 603, 604, 605, 606, 607, 608, 609, 610, 611, 612, 613, 614, 615, 616, 617, 618, 619, 620, 621, 622, 623, 624, 625, 715, 716, 717, 718, 719, 720, 721, 722, 723, 724, 725, 875, 876, 877, 878, 879, 880, 881, 882, 883, 884, 885, 886, 887, 888, 889, 890, 891, 892, 893, 894, 895, 896, 897, 898, 899, 900, 1375, 1376, 1377, 1378, 1379, 1380, 1381, 1382, 1383, 1384, 1385, 1386, 1387, 1388, 1389, 1390, 1391, 1392, 1393, 1394, 1395, 1396, 1397, 1398, 1399, 1400, 1401, 1402, 1403, 1404, 1405, 1406, 1407, 1408, 1409, 1410, 1411, 1412, 1413, 1414, 1415, 1416, 1417, 1418, 1419, 1420, 1421, 1422, 1423, 1424, 1425, 1426, 1427, 1428, 1429, 1430, 1431, 1432, 1433, 1434, 1435, 1436, 1437, 1438, 1439, 1440, 1441, 1442, 1443, 1444, 1445, 1446, 1447, 1448, 1449, 1450, 1660, 1661, 1662, 1663, 1664, 1665, 1666, 1667, 1668, 1669, 1670, 1671, 1672, 1673, 1674, 1675, 2050, 2051, 2052, 2053, 2054, 2055, 2056, 2057, 2058, 2059, 2060, 2061, 2062, 2063, 2064, 2065, 2066, 2067, 2068, 2069, 2070, 2071, 2072, 2073, 2074, 2075, 2076, 2077, 2078, 2079, 2080, 2081, 2082, 2083, 2084, 2085, 2086, 2087, 2088, 2089, 2090, 2091, 2092, 2093, 2094, 2095, 2096, 2097, 2098, 2099, 2100, 2580, 2581, 2582, 2583, 2584, 2585, 2586, 2587, 2588, 2589, 2590, 2591, 2592, 2593, 2594, 2595, 2596, 2597, 2598, 2599, 2600, 2601, 2602, 2603, 2604, 2605, 4525, 4526, 4527, 4528, 4529, 4530, 4531, 4532, 4533, 4534, 4535, 4536, 4537, 4538, 4539, 4540, 4541, 4542, 4543, 4544, 4545, 4546, 4547, 4548, 4549, 4550, 4575, 4576, 4577, 4578, 4579, 4580, 4581, 4582, 4583, 4584, 4585, 4586, 4587, 4588, 4589, 4590, 4591, 4592, 4593, 4594, 4595, 4596, 4597, 4598, 4599, 4600, 4850, 4851, 4852, 4853, 4854, 4855, 4856, 4857, 4858, 4859, 4860, 4861, 4862, 4863, 4864, 4865, 4866, 4867, 4868, 4869, 4870, 4871, 4872, 4873, 4874, 4875, 4876, 4877, 4878, 4879, 4880, 4881, 4882, 4883, 4884, 4885, 4886, 4887, 4888, 4889, 4890, 4891, 4892, 4893, 4894, 4895, 4896, 4897, 4898, 4899, 4900, 5460, 5461, 5462, 5463, 5464, 5465, 5466, 5467, 5468, 5469, 5470, 5471, 5472, 5473, 5474, 5475, 5476, 5477, 5478, 5479, 5480, 6175, 6176, 6177, 6178, 6179, 6180, 6181, 6182, 6183, 6184, 6185, 6186, 6187, 6188, 6189, 6190, 6191, 6192, 6193, 6194, 6195, 6196, 6197, 6198, 6199, 6200, 6315, 6316, 6317, 6318, 6319, 6320, 6321, 6322, 6323, 6324, 6325, 6326, 6327, 6328, 6329, 6330, 6331, 6332, 6333, 6334, 6335, 6336, 6337, 6338, 6339, 6340, 6341, 6342, 6343, 6344, 6345, 6600, 6601, 6602, 6603, 6604, 6605, 6606, 6607, 6608, 6609, 6610, 6611, 6612, 6613, 6614, 6615, 6725, 6726, 6727, 6728, 6729, 6730, 6731, 6732, 6733, 6734, 6735, 6736, 6737, 6738, 6739, 6740, 6741, 6742, 6743, 6744, 6745, 6746, 6747, 6748, 6749, 6750, 6751, 6752, 6753, 6754, 6755, 6756, 6757, 6758, 6759, 6760, 6761, 6762, 6763, 6764, 6765, 6766, 6767, 6768, 6769, 6770, 6771, 6772, 6773, 6774, 6775, 7655, 7656, 7657, 7658, 7659, 7660, 7661, 7662, 7663, 7664, 7665, 7666, 7667, 7668, 7669, 7670, 7671, 7672, 8510, 8511, 8512, 8513, 8514, 8515, 8516, 8715, 8716, 8717, 8718, 8719, 8720, 8721, 8722, 8723, 8724, 8725, 8726, 8727, 8728, 8729, 8730, 8731, 8732, 8733, 8734, 8735, 8736, 8737, 8738, 8739, 8740, 8741, 8742, 8743, 8744, 8745, 9250, 9251, 9252, 9253, 9254, 9255, 9256, 9257, 9258, 9259, 9260, 9261, 9262, 9263, 9264, 9265, 9266, 9267, 9268, 9269, 9270, 9480, 9481, 9482, 9483, 9484, 9485, 9486, 9487, 9488, 9489, 9490, 9491, 9492, 9493, 9494, 9495, 9496, 9497, 9498, 9499, 9500, 9575, 9576, 9577, 9578, 9579, 9580, 9581, 9582, 9583, 9584, 9585, 9586, 9587, 9588, 9589, 9590, 10525, 10526, 10527, 10528, 10529, 10530, 10531, 10532, 10533, 10534, 10535, 10536, 10537, 10538, 10539, 10540, 11545, 11546, 11547, 11548, 11549, 11550, 11551, 11552, 11553, 11554, 11555, 11556, 11557, 11558, 11559, 11560, 11875, 11876, 11877, 11878, 11879, 11880, 11881, 11882, 11883, 11884, 11885, 11886, 11887, 11888, 11889, 11890, 11891, 11892, 11893, 11894, 11895, 11896, 11897, 11898, 11899, 11900, 11915, 11916, 11917, 11918, 11919, 11920, 11921, 11922, 11923, 11924, 11925, 11926, 11927, 11928, 11929, 11930, 11931, 11932, 11933, 11934, 11935, 11936, 11937, 11938, 11939, 11940, 13375, 13376, 13377, 13378, 13379, 13380, 13381, 13382, 13383, 13384, 13385, 13386, 13387, 13388, 13389 and 13390 on the HTT mRNA sequence.

[0310] In some embodiments, the antisense strand and target mRNA sequences have 100% complementarity. The antisense strand may be complementary to any part of the target mRNA sequence.

[0311] In other embodiments, the antisense strand and target mRNA sequences comprise at least one mismatch. As a non-limiting example, the antisense strand and the target mRNA sequence have at least 30%, 40%, 50%, 60%, 70%, 80%, 81%, 82%, 83%, 84%, 85%, 86%, 87%, 88%, 89%, 90%, 91%, 92%, 93%, 94%, 95%, 96%, 97%, 98% or 99% or at least 20-30%, 20-40%, 20-50%, 20-60%, 20-70%, 20-80%, 20-90%, 20-95%, 20-99%, 30-40%, 30-50%, 30-60%, 30-70%, 30-80%, 30-90%, 30-95%, 30-99%, 40-50%, 40-60%, 40-70%, 40-80%, 40-90%, 40-95%, 40-99%, 50-60%, 50-70%, 50-80%, 50-90%, 50-95%, 50-99%, 60-70%, 60-80%, 60-90%, 60-95%, 60-99%, 70-80%, 70-90%, 70-95%, 70-99%, 80-90%, 80-95%, 80-99%, 90-95%, 90-99% or 95-99% complementarity.

[0312] In one embodiment, an siRNA or dsRNA includes at least two sequences that are complementary to each other.

[0313] According to the present invention, the siRNA molecule has a length from about 10-50 or more nucleotides, i.e., each strand comprising 10-50 nucleotides (or nucleotide analogs). Preferably, the siRNA molecule has a length from about 15-30. e.g., 15, 16, 17, 18, 19, 20, 21, 22, 23, 24, 25, 26, 27, 28, 29, or 30 nucleotides in each strand, wherein one of the strands is sufficiently complementarity to a target region. In one embodiment, each strand of the siRNA molecule has a length from about 19 to 25, 19 to 24 or 19 to 21 nucleotides. In one embodiment, at least one strand of the siRNA molecule is 19 nucleotides in length. In one embodiment, at least one strand of the siRNA molecule is 20 nucleotides in length. In one embodiment, at least one strand of the siRNA molecule is 21 nucleotides in length. In one embodiment, at least one strand of the siRNA molecule is 22 nucleotides in length. In one embodiment, at least one strand of the siRNA molecule is 23 nucleotides in length. In one embodiment, at least one strand of the siRNA molecule is 24 nucleotides in length. In one embodiment, at least one strand of the siRNA molecule is 25 nucleotides in length.

[0314] In some embodiments, the siRNA molecules of the present invention can be synthetic RNA duplexes comprising about 19 nucleotides to about 25 nucleotides, and two overhanging nucleotides at the 3′-end. In some aspects, the siRNA molecules may be unmodified RNA molecules. In other aspects, the siRNA molecules may contain at least one modified nucleotide, such as base, sugar or backbone modifications.

[0315] In one embodiment, the siRNA molecules of the present invention may comprise a nucleotide sequence such as, but not limited to, the antisense (guide) sequences in Table 2 or a fragment or variant thereof. As a non-limiting example, the antisense sequence used in the siRNA molecule of the present invention is at least 30%, 40%, 50%, 60%, 70%, 80%, 81%, 82%, 83%, 84%, 85%, 86%, 87%, 88%, 89%, 90%, 91%, 92%, 93%, 94%, 95%, 96%, 97%, 98% or 99% or at least 20-30%, 20-40%, 20-50%, 20-60%, 20-70%, 20-80%, 20-90%, 20-95%, 20-99%, 30-40%, 30-50%, 30-60%, 30-70%, 30-80%, 30-90%, 30-95%, 30-99%, 40-50%, 40-60%, 40-70%, 40-80%, 40-90%, 40-95%, 40-99%, 50-60%, 50-70%, 50-80%, 50-90%, 50-95%, 50-99%, 60-70%, 60-80%, 60-90%, 60-95%, 60-99%, 70-80%, 70-90%, 70-95%, 70-99%, 80-90%, 80-95%, 80-99%, 90-95%, 90-99% or 95-99% of a nucleotide sequence in Table 2. As another non-limiting example, the antisense sequence used in the siRNA molecule of the present invention comprises at least 3, 4, 5, 6, 7, 8, 9, 10, 11, 12, 13, 14, 15, 16, 17, 18, 19, 20, 21 or more than 21 consecutive nucleotides of a nucleotide sequence in Table 2. As yet another non-limiting example, the antisense sequence used in the siRNA molecule of the present invention comprises nucleotides 1 to 22, 1 to 21, 1 to 20, 1 to 19, 1 to 18, 1 to 17, 1 to 16, 1 to 15, 1 to 14, 1 to 13, 1 to 12, 1 to 11, 1 to 10, 1 to 9, 1 to 8, 2 to 22, 2 to 21, 2 to 20, 2 to 19, 2 to 18, 2 to 17, 2 to 16, 2 to 15, 2 to 14, 2 to 13, 2 to 12, 2 to 11, 2 to 10, 2 to 9, 2 to 8, 3 to 22, 3 to 21, 3 to 20, 3 to 19, 3 to 18, 3 to 17, 3 to 16, 3 to 15, 3 to 14, 3 to 13, 3 to 12, 3 to 11, 3 to 10, 3 to 9, 3 to 8, 4 to 22, 4 to 21, 4 to 20, 4 to 19, 4 to 18, 4 to 17, 4 to 16, 4 to 15, 4 to 14, 4 to 13, 4 to 12, 4 to 11, 4 to 10, 4 to 9, 4 to 8, 5 to 22, 5 to 21, 5 to 20, 5 to 19, 5 to 18, 5 to 17, 5 to 16, 5 to 15, 5 to 14, 5 to 13, 5 to 12, 5 to 11, 5 to 10, 5 to 9, 5 to 8, 6 to 22, 6 to 21, 6 to 20, 6 to 19, 6 to 18, 6 to 17, 6 to 16, 6 to 15, 6 to 14, 6 to 13, 6 to 12, 6 to 11, 6 to 10, 7 to 22, 7 to 21, 7 to 20, 7 to 19, 7 to 18, 7 to 17, 7 to 16, 7 to 15, 7 to 14, 7 to 13, 7 to 12, 8 to 22, 8 to 21, 8 to 20, 8 to 19, 8 to 18, 8 to 17, 8 to 16, 8 to 15, 8 to 14, 8 to 13, 8 to 12, 9 to 22, 9 to 21, 9 to 20, 9 to 19, 9 to 18, 9 to 17, 9 to 16, 9 to 15, 9 to 14, 10 to 22, 10 to 21, 10 to 20, 10 to 19, 10 to 18, 10 to 17, 10 to 16, 10 to 15, 10 to 14, 11 to 22, 11 to 21, 11 to 20, 11 to 19, 11 to 18, 11 to 17, 11 to 16, 11 to 15, 11 to 14, 12 to 22, 12 to 21, 12 to 20, 12 to 19, 12 to 18, 12 to 17, 12 to 16, 13 to 22, 13 to 21, 13 to 20, 13 to 19, 13 to 18, 13 to 17, 13 to 16, 14 to 22, 14 to 21, 14 to 20, 14 to 19, 14 to 18, 14 to 17, 15 to 22, 15 to 21, 15 to 20, 15 to 19, 15 to 18, 16 to 22, 16 to 21, 16 to 20, 17 to 22, 17 to 21, or 18 to 22 of the sequences in Table 2.

TABLE 2
Antisense Sequences

| | | SEQ |
|---|---|---|
| Antisense | | ID |
| ID | Sequence | NO |
| A-2000 | UUAACGUCAGUUCAUAAACUU | 914 |
| A-2000dt | UUAACGUCAGUUCAUAAACdTdT | 915 |
| A-2001 | UGUCGGUACCGUCUAACACUU | 916 |
| A-2001dt | UGUCGGUACCGUCUAACACdTdT | 917 |
| A-2002 | UAAGCAUGGAGCUAGCAGGUU | 918 |
| A-2002dt | UAAGCAUGGAGCUAGCAGGdTdT | 919 |
| A-2003 | UACAACGAGACUGAAUUGCUU | 920 |
| A-2003dt | UACAACGAGACUGAAUUGCdTdT | 921 |
| A-2004 | UUCAGUUCAUAAACCUGGAUU | 922 |
| A-2004dt | UUCAGUUCAUAAACCUGGAdTdT | 923 |
| A-2005 | UAACGUCAGUUCAUAAACCUU | 924 |
| A-2005dt | UAACGUCAGUUCAUAAACCdTdT | 925 |
| A-2006 | UCCGGUCACAACAUUGUGGUU | 926 |
| A-2006dt | UCCGGUCACAACAUUGUGGdTdT | 927 |
| A-2007 | UUGCACGGUUCUUUGUGACUU | 928 |
| A-2007dt | UUGCACGGUUCUUUGUGACdTdT | 929 |
| A-2008 | UUUUAUAACAAGAGGUUCAUU | 930 |
| A-2008dt | UUUUAUAACAAGAGGUUCAdTdT | 931 |
| A-2009 | UCCAAAUACUGGUUGUCGGUU | 932 |
| A-2009dt | UCCAAAUACUGGUUGUCGGdTdT | 933 |
| A-2010 | UAUUUUAGGAAUUCCAAUGUU | 934 |
| A-2010dt | UAUUUUAGGAAUUCCAAUGdTdT | 935 |
| A-2011 | UUUAGGAAUUCCAAUGAUCUU | 936 |
| A-2011dt | UUUAGGAAUUCCAAUGAUCdTdT | 937 |
| A-2012dt | UUAAUCUCUUUACUGAUAUdTdT | 938 |
| A-2013dt | GAUUUUAGGAAUUCCAAUGdTdT | 939 |
| A-2014 | UAAGCAUGGAGCUAGCAGGCUU | 940 |
| A-2015 | UAAGCAUGGAGCUAGCAGGGU | 941 |
| A-2016 | AAGGACUUGAGGGACUCGAAGU | 942 |
| A-2017 | AAGGACUUGAGGGACUCGAAG | 943 |
| A-2018 | AAGGACUUGAGGGACUCGA | 944 |
| A-2019 | AGGACUUGAGGGACUCGAAGU | 945 |
| A-2020 | GAGGACUUGAGGGACUCGAAGU | 946 |
| A-2021 | AAGGACUUGAGGGACUCGAAGU | 947 |
| A-2022 | AAGGACUUGAGGGACUCGAAGUU | 948 |
| A-2023 | AAGGACUUGAGGGACUCGAAG | 949 |
| A-2024 | AAGGACUUGAGGGACUCGA | 950 |
| A-2025 | AAGGACUUGAGGGACUCGAAGG | 951 |
| A-2026 | AAGGACUUGAGGGACUCGAAU | 952 |
| A-2027 | AAGGACUUGAGGGACUCGAAGA | 953 |
| A-2028 | AAGGACUUGAGGGACUCGAAGG | 954 |
| A-2029 | AAGGACUUGAGGGACUCGAAGGU | 955 |
| A-2030 | AAGGACUUGAGGGACUCGAAGGA | 956 |
| A-2031 | AAGGACUUGAGGGACUCGAAG | 957 |
| A-2032 | AAGGACUUGAGGGACUCGAAGU | 958 |
| A-2033 | AAGGACUUGAGGGACUCGA | 959 |
| A-2034 | AAGGACUUGAGGGACUCGAAGGA | 960 |
| A-2035 | AAGGACUUGAGGGACUCGAAGG | 961 |
| A-2036 | AAGGACUUGAGGGACUCGAAGGAU | 962 |
| A-2037 | AAGGACUUGAGGGACUCGAAGGAUU | 963 |
| A-2038 | AAGGACUUGAGGGACUCGAAG | 964 |
| A-2039 | AAGGACUUGAGGGACUCGAAGGAA | 965 |
| A-2040 | GAUGAAGUGCACACAUUGGAUGA | 966 |
| A-2041 | GAUGAACUGACACAUUGGAUG | 967 |
| A-2042 | GAUGAAUUGCACACAGUAGAUGA | 968 |
| A-2043 | AAGGACUUGAGGGACUCGAAGGUU | 969 |
| A-2044 | AAGGACUUGAGGGACUCGAAGGUUU | 970 |
| A-2045 | AAGGACUUGAGGGACUCGAAGGU | 971 |
| A-2046 | AAGGACUUGAGGGACUCGAAGGUUUU | 972 |
| A-2047 | AAGGACUUGAGGGACUCGAAGGUUUUU | 973 |
| A-2048 | AAGGACUUGAGGGACUCGAAGG | 974 |
| A-2049 | UAAGGACUUGAGGGACUCGAAG | 975 |
| A-2050 | AAGGACUUGAGGGACUCGAAG | 976 |
| A-2051 | AAGGACUUGAGGGACUCGAAGU | 977 |
| A-2052 | AAGGACUUGAGGGACUCGAAGACGAGUCCC | 978 |
| A-2053 | AAGGACUUGAGGGACUCGAAGACGAGUCCCA | 979 |
| A-2054 | AAGGACUUGAGGGACUCGAAGACGAGUCCCU | 980 |
| A-2055 | GAUGAAGUGCACACAUUGGAUAC | 981 |
| A-2056 | GAUGAAGUGCACACAUUGGAUACA | 982 |
| A-2057 | GAUGAAGUGCACACAUUGGAUACAAUGUGU | 983 |
| A-2058 | GAUGAAGUGCACACAUUGGAU | 984 |
| A-2059 | GAUGAAGUGCACACAUUGGAUA | 985 |
| A-2060 | GAUGAAUUGCACACAGUAGAUAU | 986 |
| A-2061 | GAUGAAUUGCACACAGUAGAUAUAC | 987 |
| A-2062 | GAUGAAUUGCACACAGUAGAUAUACUGUGU | 988 |
| A-2063 | GAUGAAUUGCACACAGUAGAUAUA | 989 |
| A-2064 | AUGAAUUGCACACAGUAGAUAUAC | 990 |
| A-2065 | GAUGAAUUGCACACAGUAGAUA | 991 |
| A-2066 | GAUGAAUUGCACACAGUAGAUAUACUGUGU | 992 |
| A-2067 | UACAACGAGACUGAAUUGCU | 993 |
| A-2068 | ACAACGAGACUGAAUUGCUU | 994 |
| A-2069 | UCCGGUCACAACAUUGUGGUUC | 995 |
| A-2070 | UCCGGUCACAACAUUGUGGU | 996 |
| A-2071 | UCCGGUCACAACAUUGUG | 997 |
| A-2072 | CCGGUCACAACAUUGUGGUU | 998 |
| A-2073 | UUUUAUAACAAGAGGUUCAU | 999 |
| A-2074 | UUUAUAACAAGAGGUUCAUU | 1000 |
| A-2075 | UAAGCAUGGAGCUAGCAGGU | 1001 |
| A-2076 | AAGCAUGGAGCUAGCAGGUU | 1002 |
| A-2077 | CCAAAUACUGGUUGUCGGUU | 1003 |
| A-2078 | UACAACGAGACUGAAUUGCUUU | 1004 |
| A-2079 | UAACGUCAGUUCAUAAACCUUU | 1005 |
| A-2080 | GUCCGGUCACAACAUUGUGGUU | 1006 |
| A-2081 | UCCGGUCACAACAUUGUGGUUUG | 1007 |
| A-2082 | UCCGGUCACAACAUUGUGGUUU | 1008 |
| A-2083 | UCCGGUCACAACAUUGUGG | 1009 |
| A-2084 | UAAGCAUGGAGCUAGCAGGUUU | 1010 |
| A-2085 | AAGCAUGGAGCUAGCAGGUUU | 1011 |
| A-2086 | UCCAAAUACUGGUUGUCGGUUU | 1012 |
| A-2087 | CCAAAUACUGGUUGUCGGUUU | 1013 |

[0316] In one embodiment, the siRNA molecules of the present invention may compromise a nucleotide sequence such as, but not limited to, the sense (passenger) sequences in Table 3 or a fragment or variant thereof. As a non-limiting example, the sense sequence used in the siRNA molecule of the present invention is at least 30%, 40%, 50%, 60%, 70%, 80%, 81%, 82%, 83%, 84%, 85%, 86%, 87%, 88%, 89%, 90%, 91%, 92%, 93%, 94%, 95%, 96%, 97%, 98% or 99% or at least 20-30%, 20-40%, 20-50%, 20-60%, 20-70%, 20-80%, 20-90%, 20-95%, 20-99%, 30-40%, 30-50%, 30-60%, 30-70%, 30-80%, 30-90%, 30-95%, 30-99%, 40-50%, 40-60%, 40-70%, 40-80%, 40-90%, 40-95%, 40-99%, 50-60%, 50-70%, 50-80%, 50-90%, 50-95%, 50-99%, 60-70%, 60-80%, 60-90%, 60-95%, 60-99%, 70-80%, 70-90%, 70-95%, 70-99%, 80-90%, 80-95%, 80-99%, 90-95%, 90-99% or 95-99% of a nucleotide sequence in Table 3. As another non-limiting example, the sense sequence used in the siRNA molecule of the present invention comprises at least 3, 4, 5, 6, 7, 8, 9, 10, 11, 12, 13, 14, 15, 16, 17, 18, 19, 20, 21 or more than 21 consecutive nucleotides of a nucleotide sequence in Table 3. As yet another non-limiting example, the sense sequence used in the siRNA molecule of the present invention comprises nucleotides 1 to 22, 1 to 21, 1 to 20, 1 to 19, 1 to 18, 1 to 17, 1 to 16, 1 to 15, 1 to 14, 1 to 13, 1 to 12, 1 to 11, 1 to 10, 1 to 9, 1 to 8, 2 to 22, 2 to 21, 2 to 20, 2 to 19, 2 to 18, 2 to 17, 2 to 16, 2 to 15, 2 to 14, 2 to 13, 2 to 12, 2 to 11, 2 to 10, 2 to 9, 2 to 8, 3 to 22, 3 to 21, 3 to 20, 3 to 19, 3 to 18, 3 to 17, 3 to 16, 3 to 15, 3 to 14, 3 to 13, 3 to 12, 3 to 11, 3 to 10, 3 to 9, 3 to 8, 4 to 22, 4 to 21, 4 to 20, 4 to 19, 4 to 18, 4 to 17, 4 to 16, 4 to 15, 4 to 14, 4 to 13, 4 to 12, 4 to 11, 4 to 10, 4 to 9, 4 to 8, 5 to 22, 5 to 21, 5 to 20, 5 to 19, 5 to 18, 5 to 17, 5 to 16, 5 to 15, 5 to 14, 5 to 13, 5 to 12, 5 to 11, 5 to 10, 5 to 9, 5 to 8, 6 to 22, 6 to 21, 6 to 20, 6 to 19, 6 to 18, 6 to 17, 6 to 16, 6 to 15, 6 to 14, 6 to 13, 6 to 12, 6 to 11, 6 to 10, 7 to 22, 7 to 21, 7 to 20, 7 to 19, 7 to 18, 7 to 17, 7 to 16, 7 to 15, 7 to 14, 7 to 13, 7 to 12, 8 to 22, 8 to 21, 8 to 20, 8 to 19, 8 to 18, 8 to 17, 8 to 16, 8 to 15, 8 to 14, 8 to 13, 8 to 12, 9 to 22, 9 to 21, 9 to 20, 9 to 19, 9 to 18, 9 to 17, 9 to 16, 9 to 15, 9 to 14, 10 to 22, 10 to 21, 10 to 20, 10 to 19, 10 to 18, 10 to 17, 10 to 16, 10 to 15, 10 to 14, 11 to 22, 11 to 21, 11 to 20, 11 to 19, 11 to 18, 11 to 17, 11 to 16, 11 to 15, 11 to 14, 12 to 22, 12 to 21, 12 to 20, 12 to 19, 12 to 18, 12 to 17, 12 to 16, 13 to 22, 13 to 21, 13 to 20, 13 to 19, 13 to 18, 13 to 17, 13 to 16, 14 to 22, 14 to 21, 14 to 20, 14 to 19, 14 to 18, 14 to 17, 15 to 22, 15 to 21, 15 to 20, 15 to 19, 15 to 18, 16 to 22, 16 to 21, 16 to 20, 17 to 22, 17 to 21, or 18 to 22 of the sequences in Table 3.

TABLE 3
Sense Sequences

| | | SEQ |
|---|---|---|
| | | ID |
| Sense ID | Sequence | NO |
| S-1000 | GUUUAUGAACUGAUCUUACCC | 1014 |
| S-1001 | GUGUUAGACGGUACUGAUCCC | 1015 |
| S-1002 | CCUGCUAGCUCCAUGCUUCCC | 1016 |
| S-1003 | GUUUAUGAACUGAUCUUAGCC | 1017 |
| S-1004 | GUGUUAGACGGUACUGAUGCC | 1018 |
| S-1005 | CCUGCUAGCUCCAUGCUUGCC | 1019 |
| S-1006 | GUUUAUGAAGUGAUCUUAACC | 1020 |
| S-1007 | GUGUUAGACCGUACUGAUACC | 1021 |
| S-1008 | CCUGCUAGCACCAUGCUUACC | 1022 |
| S-1009 | GUUUAUGAACUGAUCUUAACC | 1023 |
| S-1010 | GUGUUAGACGGUACUGAUACC | 1024 |
| S-1011 | CCUGCUAGCUCCAUGCUUACC | 1025 |
| S-1011dt | CCUGCUAGCUCCAUGCUUAdTdT | 1026 |
| S-1012 | GUUUAUGAACUGAUCUUGCCC | 1027 |
| S-1013 | GUUUAUGAACUGAUCUUGGCC | 1028 |
| S-1014 | GUUUAUGAACUGAUCUUGACC | 1029 |
| S-1015 | GCAAUUCAGUCUCGUUGUCCC | 1030 |
| S-1016 | UCCAGGUUUAUGAACUGACCC | 1031 |
| S-1017 | GGUUUAUGAACUGACGUUCCC | 1032 |
| S-1018 | CCACAAUGUUGUGACUGGCCC | 1033 |
| S-1019 | GUCACAAAGAACCGUGUACCC | 1034 |
| S-1020 | UGAACCUCUUGUUAUAAACCC | 1035 |
| S-1021 | CCGACAACCAGUAUUUGGCCC | 1036 |
| S-1022 | GCAAUUCAGUCUCGUUGUGCC | 1037 |
| S-1023 | UCCAGGUUUAUGAACUGAGCC | 1038 |
| S-1024 | GGUUUAUGAACUGACGUUGCC | 1039 |
| S-1025 | CCACAAUGUUGUGACUGGGCC | 1040 |
| S-1026 | GUCACAAAGAACCGUGUAGCC | 1041 |
| S-1027 | UGAACCUCUUGUUAUAAAGCC | 1042 |
| S-1028 | CCGACAACCAGUAUUUGGGCC | 1043 |
| S-1029 | GCAAUUCAGUCUCGUUGUACC | 1044 |
| S-1029dt | GCAAUUCAGUCUCGUUGUAdTdT | 1045 |
| S-1030 | UCCAGGUUUAUGAACUGAACC | 1046 |
| S-1030dt | UCCAGGUUUAUGAACUGAAdTdT | 1047 |
| S-1031 | GGUUUAUGAACUGACGUUACC | 1048 |
| S-1032 | CCACAAUGUUGUGACUGGACC | 1049 |
| S-1033 | GUCACAAAGAACCGUGUAACC | 1050 |
| S-1034 | UGAACCUCUUGUUAUAAAACC | 1051 |
| S-1034dt | UGAACCUCUUGUUAUAAAAdTdT | 1052 |
| S-1035 | CCGACAACCAGUAUUUGGACC | 1053 |
| S-1035dt | CCGACAACCAGUAUUUGGAdTdT | 1054 |
| S-1036 | GCAAUUCAGACUCGUUGUACC | 1055 |
| S-1037 | UCCAGGUUUUUGAACUGAACC | 1056 |
| S-1038 | GGUUUAUGAUCUGACGUUACC | 1057 |
| S-1039 | CCACAAUGUAGUGACUGGACC | 1058 |
| S-1040 | GUCACAAAGUACCGUGUAACC | 1059 |
| S-1041 | UGAACCUCUAGUUAUAAAACC | 1060 |
| S-1042 | CCGACAACCUGUAUUUGGACC | 1061 |
| S-1043 | CAUUGGAAUUCCUAAAAUUCC | 1062 |
| S-1044 | GAUCAUUGGAAUUCCUAAUCC | 1063 |
| S-1045 | CAUUGGAAUUCCUAAAAUGCC | 1064 |
| S-1046 | GAUCAUUGGAAUUCCUAAGCC | 1065 |
| S-1047 | CAUUGGAAUUCCUAAAAUACC | 1066 |
| S-1047dt | CAUUGGAAUUCCUAAAAUAdTdT | 1067 |
| S-1048 | GAUCAUUGGAAUUCCUAAACC | 1068 |
| S-1048dt | GAUCAUUGGAAUUCCUAAAdTdT | 1069 |
| S-1049 | CAUUGGAAUACCUAAAAUACC | 1070 |
| S-1050 | GAUCAUUGGUAUUCCUAAACC | 1071 |
| S-1051dt | GUUUAUGAACUGACGUUAAdTdT | 1072 |
| S-1052dt | GUGUUAGACGGUACCGACAdTdT | 1073 |
| S-1053dt | AUAUCAGUAAAGAGAUUAAdTdT | 1074 |
| S-1054dt | GGUUUAUGAACUGACGUUAdTdT | 1075 |
| S-1055dt | CCACAAUGUUGUGACCGGAdTdT | 1076 |
| S-1056dt | GUCACAAAGAACCGUGCAAdTdT | 1077 |
| S-1057dt | CAUUGGAAUUCCUAAAAUCdTdT | 1078 |
| S-1058 | CCUGCUAGCUCCAUGCUUGCU | 1079 |
| S-1059 | CCUGCUAGCUCCAUGCUUGAU | 1080 |
| S-1060 | CCUGCUAGCUCCAUGCUUAUU | 1081 |
| S-1061 | CCUGCUAGCUCCAUGCUUGUU | 1082 |
| S-1062 | UUCGAGUCCCUCAAGUAGCU | 1083 |
| S-1063 | UUCGAGUCCCUCAAGUAGCUUU | 1084 |
| S-1064 | UCGAGUCCCUCAAGUCCAUUCU | 1085 |
| S-1065 | UUCCAGUCCAUCAAGUCAAUU | 1086 |
| S-1066 | UUCCGAGUCUAAAAGUCCUUGG | 1087 |
| S-1067 | UUCCGAGUCUAAAAGUCCUUGGC | 1088 |
| S-1068 | CUUCCGAGUCUAAAAGUCCUUGG | 1089 |
| S-1069 | UUCCGAGUCUAAAAGUCCUUGGU | 1090 |
| S-1070 | UUCCGAGUCUAAAAGUCCUUGGCU | 1091 |
| S-1071 | UCCAAUGUGAAACUUCAUCGGCU | 1092 |
| S-1072 | UCCAAUGUGAAACUUCAUCGGC | 1093 |
| S-1073 | AUCCAAUGUGAAACUUCAUCGU | 1094 |
| S-1074 | AUCCAAUGUGAAACUUCAUCGGU | 1095 |
| S-1075 | UCCAAUGUGAAACUUCAUCGGU | 1096 |
| S-1076 | UCCAAUGUGAAACUUCAUCGGCUU | 1097 |
| S-1077 | AUCUACUGUGAAAAUUCAUCGG | 1098 |
| S-1078 | UCUACUGUGAAAAUUCAUCGG | 1099 |
| S-1079 | UCUACUGUGAAAAUUCAUCGGC | 1100 |
| S-1080 | AUCUACUGUGAAAAUUCAUCGGU | 1101 |
| S-1081 | UCUACUGUGAAAAUUCAUCGGU | 1102 |
| S-1082 | UCUACUGUGAAAAUUCAUCGGCU | 1103 |
| S-1083 | CCUUCGGUCCUCAAGUCCUUCA | 1104 |
| S-1084 | UUCGAGUCCAUCAAAUCCUAUAGU | 1105 |
| S-1085 | UACAAUGUGUGCACUUAUAU | 1106 |
| S-1086 | UAUACUGUGUGCAAUUCAUUUCU | 1107 |
| S-1087 | GCAAUUCAGUCUCGUUGUCC | 1108 |
| S-1088 | GCAAUUCAGUCUCGUUGUC | 1109 |
| S-1089 | CAAUUCAGUCUCGUUGUCCC | 1110 |
| S-1090 | CAAUUCAGUCUCGUUGUCC | 1111 |
| S-1091 | GCAAUUCAGUCUCGUUGUGC | 1112 |
| S-1092 | CAAUUCAGUCUCGUUGUGCC | 1113 |
| S-1093 | CCACAAUGUUGUGACUGGGCCU | 1114 |
| S-1094 | CCACAAUGUUGUGACUGGGC | 1115 |
| S-1095 | CACAAUGUUGUGACUGGGCC | 1116 |
| S-1096 | UGAACCUCUUGUUAUAAAGCCU | 1117 |
| S-1097 | UGAACCUCUUGUUAUAAAGC | 1118 |
| S-1098 | GAACCUCUUGUUAUAAAGCC | 1119 |
| S-1099 | CCUGCUAGCUCCAUGCUUGCCU | 1120 |
| S-1100 | CCUGCUAGCUCCAUGCUUGC | 1121 |
| S-1101 | CCUGCUAGCUCCAUGCUUG | 1122 |
| S-1102 | CUGCUAGCUCCAUGCUUGCC | 1123 |
| S-1103 | CCGACAACCAGUAUUUGGGCCU | 1124 |
| S-1104 | CCGACAACCAGUAUUUGGGC | 1125 |
| S-1105 | CCGACAACCAGUAUUUGGG | 1126 |
| S-1106 | CGACAACCAGUAUUUGGGCC | 1127 |
| S-1107 | CGACAACCAGUAUUUGGGC | 1128 |
| S-1108 | GCAAUUCAGUCUCGUUGUACCU | 1129 |
| S-1109 | GCAAUUCAGUCUCGUUGUAC | 1130 |
| S-1110 | GCAAUUCAGUCUCGUUGUA | 1131 |
| S-1111 | CAAUUCAGUCUCGUUGUACC | 1132 |
| S-1112 | GCAAUUCAGACUCGUUGUACCU | 1133 |
| S-1113 | GCAAUUCAGACUCGUUGUAC | 1134 |
| S-1114 | GCAAUUCAGACUCGUUGUA | 1135 |
| S-1115 | CAAUUCAGACUCGUUGUACC | 1136 |
| S-1116 | AGCAAUUCAGUCUCGUUGUACC | 1137 |
| S-1117 | AGCAAUUCAGUCUCGUUGUAC | 1138 |
| S-1118 | AGGUUUAUGAACUGACGUUAC | 1139 |
| S-1119 | AGGUUUAUGAACUGACGUUACC | 1140 |
| S-1120 | ACCACAAUGUUGUGACUGGAC | 1141 |
| S-1121 | ACCACAAUGUUGUGACUGGACC | 1142 |
| S-1122 | CCACAAUGUUGUGACUGGACCGU | 1143 |
| S-1123 | CCACAAUGUUGUGACUGGACCG | 1144 |
| S-1124 | CCACAAUGUUGUGACUGGAC | 1145 |
| S-1125 | CACAAUGUUGUGACUGGACC | 1146 |
| S-1126 | ACCUGCUAGCUCCAUGCUUCCC | 1147 |
| S-1127 | ACCUGCUAGCUCCAUGCUUCC | 1148 |
| S-1128 | ACCUGCUAGCUCCAUGCUUC | 1149 |
| S-1129 | CCUGCUAGCUCCAUGCUUCC | 1150 |
| S-1130 | CCUGCUAGCUCCAUGCUUC | 1151 |
| S-1131 | CUGCUAGCUCCAUGCUUCCC | 1152 |
| S-1132 | CUGCUAGCUCCAUGCUUCC | 1153 |
| S-1133 | ACCGACAACCAGUAUUUGGACC | 1154 |
| S-1134 | ACCGACAACCAGUAUUUGGAC | 1155 |
| S-1135 | CCGACAACCAGUAUUUGGACCGU | 1156 |
| S-1136 | CCGACAACCAGUAUUUGGACCGU | 1157 |
| S-1137 | CCGACAACCAGUAUUUGGAC | 1158 |
| S-1138 | CGACAACCAGUAUUUGGACC | 1159 |
| S-1139 | CCUGCUAGCACCGUGCUUACC | 1160 |

[0317] In one embodiment, the siRNA molecules of the present invention may comprise an antisense sequence from Table 2 and a sense sequence from Table 3, or a fragment or variant thereof. As a non-limiting example, the antisense sequence and the sense sequence have at least 30%, 40%, 50%, 60%, 70%, 80%, 81%, 82%, 83%, 84%, 85%, 86%, 87%, 88%, 89%, 90%, 91%, 92%, 93%, 94%, 95%, 96%, 97%, 98% or 99% or at least 20-30%, 20-40%, 20-50%, 20-60%, 20-70%, 20-80%, 20-90%, 20-95%, 20-99%, 30-40%, 30-50%, 30-60%, 30-70%, 30-80%, 30-90%, 30-95%, 30-99%, 40-50%, 40-60%, 40-70%, 40-80%, 40-90%, 40-95%, 40-99%, 50-60%, 50-70%, 50-80%, 50-90%, 50-95%, 50-99%, 60-70%, 60-80%, 60-90%, 60-95%, 60-99%, 70-80%, 70-900%, 70-950%, 70-990%, 80-90%, 80-95%, 80-99%, 90-95%, 90-99% or 95-99% complementarity.

[0318] In one embodiment, the siRNA molecules of the present invention may comprise the sense and antisense siRNA duplex as described in Tables 4-6. As a non-limiting example, these siRNA duplexes may be tested for in vitro inhibitory activity on endogenous HTT gene expression. The start site for the sense and antisense sequence is compared to HTT gene sequence known as NM 002111.7 (SEQ ID NO: 1425) from NCBI.

TABLE 4
Sense and antisense strand sequences of HTT dsRNA

| | | | Sense | | | | Antisense | |
|---|---|---|---|---|---|---|---|---|
| siRNA | | | Strand | SS | | | Strand | AS |
| Duplex | | Start | Sequence | SEQ | | Start | Sequence | SEQ |
| ID | SS ID | SS | (5′-3′) | ID | AS ID | AS | (5′-3′) | ID |
| D-3566 | S-1058 | 6751 | CCUGCUAGCUC | 1079 | A-2002 | 6751 | UAACCAUGGAG | 918 |
| | | | CAUGCUUGCU | | | | CUAGCAGGUU | |
| D-3567 | S-1058 | 6751 | CCUGCUAGCUC | 1079 | A-2014 | 6748 | UAAGCAUGGAG | 940 |
| | | | CAUGCUUGCU | | | | CUAGCAGGCUU | |
| D-3568 | S-1059 | 6751 | CCUGCUAGCUC | 1080 | A-2002 | 6751 | UAAGCAUGGAG | 918 |
| | | | CAUGCUUGAU | | | | CUAGCAGGUU | |
| D-3569 | S-1060 | 6751 | CCUGCUAGCUC | 1081 | A-2015 | 6751 | UAAGCAUGGAG | 941 |
| | | | CAUGCUUAUU | | | | CUAGCAGGGU | |
| D-3570 | S-1061 | 6751 | CCUGCUAGCUC | 1082 | A-2002 | 6751 | UAAGCAUGGAG | 918 |
| | | | CAUGCUUGUU | | | | CUAGCAGGUU | |
| D-3500 | S-1016 | 1386 | UCCAGGUUUAU | 1031 | A-2004 | 1386 | UUCAGUUCAUA | 922 |
| | | | GAACUGACCC | | | | AACCUGGAUU | |
| D-3501 | S-1023 | 1386 | UCCAGGUUUAU | 1038 | A-2004 | 1386 | UUCAGUUCAUA | 922 |
| | | | GAACUGAGCC | | | | AACCUGGAUU | |
| D-3502 | S-1030 | 1386 | UCCAGGUUUAU | 1046 | A-2004 | 1386 | UUCAGUUCAUA | 922 |
| | | | GAACUGAACC | | | | AACCUGGAUU | |
| D-3503 | S-1037 | 1386 | UCCAGGUUUUU | 1056 | A-2004 | 1386 | UUCAGUUCAUA | 922 |
| | | | GAACUGAACC | | | | AACCUGGAUU | |
| D-3504 | S-1030 | 1386 | UCCAGGUUUAU | 1046 | A-2001 | 2066 | UGUCGGUACCG | 916 |
| | | | GAACUGAACC | | | | UCUAACACUU | |
| D-3505 | S-1017 | 1390 | GGUUUAUGAAC | 1032 | A-2005 | 1389 | UAACGUCAGUU | 924 |
| | | | UGACGUUCCC | | | | CAUAAACCUU | |
| D-3506 | S-1024 | 1390 | GGUUUAUGAAC | 1039 | A-2005 | 1389 | UAACGUCAGUU | 924 |
| | | | UGACGUUGCC | | | | CAUAAACCUU | |
| D-3507 | S-1031 | 1390 | GGUUUAUGAAC | 1048 | A-2005 | 1389 | UAACGUCAGUU | 924 |
| | | | UGACGUUACC | | | | CAUAAACCUU | |
| D-3508 | S-1038 | 1390 | GGUUUAUGAUC | 1057 | A-2005 | 1389 | UAACGUCAGUU | 924 |
| | | | UGACGUUACC | | | | CAUAAACCUU | |
| D-3509 | S-1000 | 1391 | GUUUAUGAACU | 1014 | A-2000 | 1391 | UUAACGUCAGU | 914 |
| | | | GAUCUUACCC | | | | UCAUAAACUU | |
| D-3510 | S-1003 | 1391 | GUUUAUGAACU | 1017 | A-2000 | 1391 | UUAACGUCAGU | 914 |
| | | | GAUCUUAGCC | | | | UCAUAAACUU | |
| D-3511 | S-1006 | 1391 | GUUUAUGAAG | 1020 | A-2000 | 1391 | UUAACGUCAGU | 914 |
| | | | UGAUCUUAACC | | | | UCAUAAACUU | |
| D-3512 | S-1009 | 1391 | GUUUAUGAACU | 1023 | A-2000 | 1391 | UUAACGUCAGU | 914 |
| | | | GAUCUUAACC | | | | UCAUAAACUU | |
| D-3513 | S-1012 | 1391 | GUUUAUGAACU | 1027 | A-2000 | 1391 | UUAACGUCAGU | 914 |
| | | | GAUCUUGCCC | | | | UCAUAAACUU | |
| D-3514 | S-1013 | 1391 | GUUUAUGAACU | 1028 | A-2000 | 1391 | UUAACGUCAGU | 914 |
| | | | GAUCUUGGCC | | | | UCAUAAACUU | |
| D-3515 | S-1014 | 1391 | GUUUAUGAACU | 1029 | A-2000 | 1391 | UUAACGUCAGU | 914 |
| | | | GAUCUUGACC | | | | UCAUAAACUU | |
| D-3516 | S-1018 | 1429 | CCACAAUGUUG | 1033 | A-2006 | 1428 | UCCGGUCACAA | 926 |
| | | | UGACUGGCCC | | | | CAUUGUGGUU | |
| D-3517 | S-1025 | 1429 | CCACAAUGUUG | 1040 | A-2006 | 1428 | UCCGGUCACAA | 926 |
| | | | UGACUGGGCC | | | | CAUUGUGGUU | |
| D-3518 | S-1032 | 1429 | CCACAAUGUUG | 1049 | A-2006 | 1428 | UCCGGUCACAA | 926 |
| | | | UGACUGGACC | | | | CAUUGUGGUU | |
| D-3519 | S-1039 | 1429 | CCACAAUGUAG | 1058 | A-2006 | 1428 | UCCGGUCACAA | 926 |
| | | | UGACUGGACC | | | | CAUUGUGGUU | |
| D-3520 | S-1001 | 2066 | GUGUUAGACGG | 1015 | A-2001 | 2066 | UGUCGGUACCG | 916 |
| | | | UACUGAUCCC | | | | UCUAACACUU | |
| D-3521 | S-1004 | 2066 | GUGUUAGACGG | 1018 | A-2001 | 2066 | UGUCGGUACCG | 916 |
| | | | UACUGAUGCC | | | | UCUAACACUU | |
| D-3522 | S-1007 | 2066 | GUGUUAGACCG | 1021 | A-2001 | 2066 | UGUCGGUACCG | 916 |
| | | | UACUGAUACC | | | | UCUAACACUU | |
| D-3523 | S-1010 | 2066 | GUGUUAGACGG | 1024 | A-2001 | 2066 | UGUCGGUACCG | 916 |
| | | | UACUGAUACC | | | | UCUAACACUU | |
| D-3524 | S-1021 | 2079 | CCGACAACCAG | 1036 | A-2009 | 2078 | UCCAAAUACUG | 932 |
| | | | UAUUUGGCCC | | | | GUUGUCGGUU | |
| D-3525 | S-1028 | 2079 | CCGACAACCAG | 1043 | A-2009 | 2078 | UCCAAAUACUG | 932 |
| | | | UAUUUGGGCC | | | | GUUGUCGGUU | |
| D-3526 | S-1035 | 2079 | CCGACAACCAG | 1053 | A-2009 | 2078 | UCCAAAUACUG | 932 |
| | | | UAUUUGGACC | | | | GUUGUCGGUU | |
| D-3527 | S-1042 | 2079 | CCGACAACCUG | 1061 | A-2009 | 2078 | UCCAAAUACUG | 932 |
| | | | UAUUUGGACC | | | | GUUGUCGGUU | |
| D-3528 | S-1019 | 4544 | GUCACAAAGAA | 1034 | A-2007 | 4544 | UUGCACGGUUC | 928 |
| | | | CCGUGUACCC | | | | UUUGUGACUU | |
| D-3529 | S-1026 | 4544 | GUCACAAAGAA | 1041 | A-2007 | 4544 | UUGCACGGUUC | 928 |
| | | | CCGUGUAGCC | | | | UUUGUGACUU | |
| D-3530 | S-1033 | 4544 | GUCACAAAGAA | 1050 | A-2007 | 4544 | UUGCACGGUUC | 928 |
| | | | CCGUGUAACC | | | | UUUGUGACUU | |
| D-3531 | S-1040 | 4544 | GUCACAAAGUA | 1059 | A-2007 | 4544 | UUGCACGGUUC | 928 |
| | | | CCGUGUAACC | | | | UUUGUGACUU | |
| D-3532 | S-1020 | 4597 | UGAACCUCUUG | 1035 | A-2008 | 4597 | UUUUAUAACAA | 930 |
| | | | UUAUAAACCC | | | | GAGGUUCAUU | |
| D-3533 | S-1027 | 4597 | UGAACCUCUUG | 1042 | A-2008 | 4597 | UUUUAUAACAA | 930 |
| | | | UUAUAAAGCC | | | | GAGGUUCAUU | |
| D-3534 | S-1034 | 4597 | UGAACCUCUUG | 1051 | A-2008 | 4597 | UUUUAUAACAA | 930 |
| | | | UUAUAAAACC | | | | GAGGUUCAUU | |
| D-3535 | S-1041 | 4597 | UGAACCUCUAG | 1060 | A-2008 | 4597 | UUUUAUAACAA | 930 |
| | | | UUAUAAAACC | | | | GAGGUUCAUU | |
| D-3536 | S-1044 | 4861 | GAUCAUUGGAA | 1063 | A-2011 | 4860 | UUUAGGAAUUC | 936 |
| | | | UUCCUAAUCC | | | | CAAUGAUCUU | |
| D-3537 | S-1046 | 4861 | GAUCAUUGGAA | 1065 | A-2011 | 4860 | UUUAGGAAUUC | 936 |
| | | | UUCCUAAGCC | | | | CAAUGAUCUU | |
| D-3538 | S-1048 | 4861 | GAUCAUUGGAA | 1068 | A-2011 | 4860 | UUUAGGAAUUC | 936 |
| | | | UUCCUAAACC | | | | CAAUGAUCUU | |
| D-3539 | S-1050 | 4861 | GAUCAUUGGUA | 1071 | A-2011 | 4860 | UUUAGGAAUUC | 936 |
| | | | UUCCUAAACC | | | | CAAUGAUCUU | |
| D-3540 | S-1043 | 4864 | CAUUGGAAUUC | 1062 | A-2010 | 4864 | UAUUUUAGGA | 934 |
| | | | CUAAAAUUCC | | | | AUUCCAAUGUU | |
| D-3541 | S-1045 | 4864 | CAUUGGAAUUC | 1064 | A-2010 | 4864 | UAUUUUAGGA | 934 |
| | | | CUAAAAUGCC | | | | AUUCCAAUGUU | |
| D-3542 | S-1047 | 4864 | CAUUGGAAUUC | 1066 | A-2010 | 4864 | UAUUUUAGGA | 934 |
| | | | CUAAAAUACC | | | | AUUCCAAUGUU | |
| D-3543 | S-1049 | 4864 | CAUUGGAAUAC | 1070 | A-2010 | 4864 | UAUUUUAGGA | 934 |
| | | | CUAAAAUACC | | | | AUUCCAAUGUU | |
| D-3544 | S-1015 | 6188 | GCAAUUCAGUC | 1030 | A-2003 | 6188 | UACAACGAGAC | 920 |
| | | | UCGUUGUCCC | | | | UGAAUUGCUU | |
| D-3545 | S-1022 | 6188 | GCAAUUCAGUC | 1037 | A-2003 | 6188 | UACAACGAGAC | 920 |
| | | | UCGUUGUGCC | | | | UGAAUUGCUU | |
| D-3546 | S-1029 | 6188 | GCAAUUCAGUC | 1044 | A-2003 | 6188 | UACAACGAGAC | 920 |
| | | | UCGUUGUACC | | | | UGAAUUGCUU | |
| D-3547 | S-1036 | 6188 | GCAAUUCAGAC | 1055 | A-2003 | 6188 | UACAACGAGAC | 920 |
| | | | UCGUUGUACC | | | | UGAAUUGCUU | |
| D-3548 | S-1002 | 6751 | CCUGCUAGCUC | 1016 | A-2002 | 6751 | UAAGCAUGGAG | 918 |
| | | | CAUGCUUCCC | | | | CUAGCAGGUU | |
| D-3549 | S-1005 | 6751 | CCUGCUAGCUC | 1019 | A-2002 | 6751 | UAAGCAUGGAG | 918 |
| | | | CAUGCUUGCC | | | | CUAGCAGGUU | |
| D-3550 | S-1008 | 6751 | CCUGCUAGCAC | 1022 | A-2002 | 6751 | UAAGCAUGGAG | 918 |
| | | | CAUGCUUACC | | | | CUAGCAGGUU | |
| D-3551 | S-1011 | 6751 | CCUGCUAGCUC | 1025 | A-2002 | 6751 | UAAGCAUGGAG | 918 |
| | | | CAUGCUUACC | | | | CUAGCAGGUU | |

TABLE 5
Sense and antisense strand sequences of IITT dsRNA

| | | | Sense | | | | Antisense | |
|---|---|---|---|---|---|---|---|---|
| siRNA | | | Strand | SS | | | Strand | AS |
| Duplex | | Start | Sequence | SEQ | | Start | Sequence | SEQ |
| ID | SS ID | SS | (5′-3′) | ID | AS ID | AS | (5′-3′) | ID |
| D-3552 | S-1051dt | 1391 | GUUUAUGAACUG | 1072 | A-2000dt | 1391 | UUAACGUCAGUU | 915 |
| | | | ACGUUAAdTdT | | | | CAUAAACdTdT | |
| D-3553 | S-1052dt | 2066 | GUGUUAGACGGU | 1073 | A-2001dt | 2066 | UGUCGGUACCGU | 917 |
| | | | ACCGACAdTdT | | | | CUAACACdTdT | |
| D-3554 | S-1011dt | 6751 | CCUGCUAGCUCC | 1026 | A-2002dt | 6751 | UAAGCAUGGAGC | 919 |
| | | | AUGCUUAdTdT | | | | UAGCAGGdTdT | |
| D-3555 | S-1053dt | 10322 | AUAUCAGUAAAG | 1074 | A-2012dt | 10322 | UUAAUCUCUUUA | 938 |
| | | | AGAUUAAdTdT | | | | CUGAUAUdTdT | |
| D-3556 | S-1030dt | 1386 | UCCAGGUUUAUG | 1047 | A-2004dt | 1386 | UUCAGUUCAUAA | 923 |
| | | | AACUGAAdTdT | | | | ACCUGGAdTdT | |
| D-3557 | S-1054dt | 1390 | GGUUUAUGAACU | 1075 | A-2005dt | 1390 | UAACGUCAGUUC | 925 |
| | | | GACGUUAdTdT | | | | AUAAACCdTdT | |
| D-3558 | S-1055dt | 1429 | CCACAAUGUUGU | 1076 | A-2006dt | 1429 | UCCGGUCACAAC | 927 |
| | | | GACCGGAdTdT | | | | AUUGUGGdTdT | |
| D-3559 | S-1035dt | 2079 | CCGACAACCAGU | 1054 | A-2009dt | 2079 | UCCAAAUACUGG | 933 |
| | | | AUUUGGAdTdT | | | | UUGUCGGdTdT | |
| D-3560 | S-1056dt | 4544 | GUCACAAAGAAC | 1077 | A-2007dt | 4544 | UUGCACGGUUCU | 929 |
| | | | CGUGCAAdTdT | | | | UUGUGACdTdT | |
| D-3561 | S-1034dt | 4597 | UGAACCUCUUGU | 1052 | A-2008dt | 4597 | UUUUAUAACAAG | 931 |
| | | | UAUAAAAdTdT | | | | AGGUUCAdTdT | |
| D-3562 | S-1029dt | 6188 | GCAAUUCAGUCU | 1045 | A-2003dt | 6188 | UACAACGAGACU | 921 |
| | | | CGUUGUAdTdT | | | | GAAUUGCdTdT | |
| D-3563 | S-1047dt | 4864 | CAUUGGAAUUCC | 1067 | A-2010dt | 4864 | UAUUUUAGGAAU | 935 |
| | | | UAAAAUAdTdT | | | | UCCAAUGdTdT | |
| D-3564 | S-1048dt | 4861 | GAUCAUUGGAAU | 1069 | A-2011dt | 4861 | UUUAGGAAUUCC | 937 |
| | | | UCCUAAAdTdT | | | | AAUGAUCdTdT | |
| D-3565 | S-1057dt | 4864 | CAUUGGAAUUCC | 1078 | A-2013dt | 4864 | GAUUUUAGGAAU | 939 |
| | | | UAAAAUCdTdT | | | | UCCAAUGdTdT | |

TABLE 6
Antisense and Sense strand sequences of HIT dsRNA

| | | | Antisense | | | | Sense | |
|---|---|---|---|---|---|---|---|---|
| siRNA | | | Strand | AS | | | Strand | SS |
| Duplex | | Start | Sequence | SEQ | | Start | Sequence | SEQ |
| ID | AS ID | AS | (5′-3′) | ID | SS ID | SS | (5′-3′) | ID |
| D-3569 | S-1060 | 6751 | CCUGCUAGCUC | 1081 | A-2015 | 6751 | UAAGCAUGGAG | 941 |
| | | | CAUGCUUAUU | | | | CUAGCAGGGU | |
| D-3570 | S-1061 | 6751 | CCUGCUAGCUC | 1082 | A-2002 | 6751 | UAAGCAUGGAG | 918 |
| | | | CAUGCUUGUU | | | | CUAGCAGGUU | |

[0319] In other embodiments, the siRNA molecules of the present invention can be encoded in plasmid vectors, AAV particles, viral genome or other nucleic acid expression vectors for delivery to a cell.

[0320] DNA expression plasmids can be used to stably express the siRNA duplexes or dsRNA of the present invention in cells and achieve long-term inhibition of the target gene expression. In one aspect, the sense and antisense strands of a siRNA duplex are typically linked by a short spacer sequence leading to the expression of a stem-loop structure termed short hairpin RNA (shRNA). The hairpin is recognized and cleaved by Dicer, thus generating mature siRNA molecules.

[0321] According to the present invention, AAV particles comprising the nucleic acids encoding the siRNA molecules targeting HTT mRNA are produced, the AAV serotypes may be any of the serotypes listed in Table 1. Non-limiting examples of the AAV serotypes include, AAV1, AAV2, AAV3, AAV4, AAV5, AAV6, AAV7, AAV8, AAV9, AAV9.47, AAV9(hu14), AAV10, AAV11, AAV12, AAVrh8, AAVrh10, AAV-DJ8, AAV-DJ, AAV-PHP.A, and/or AAV-PHP.B, and variants thereof.

[0322] In some embodiments, the siRNA duplexes or encoded dsRNA of the present invention suppress (or degrade) target mRNA (e.g., HTT). Accordingly, the siRNA duplexes or encoded dsRNA can be used to substantially inhibit HTT gene expression in a cell, for example a neuron. In some aspects, the inhibition of HTT gene expression refers to an inhibition by at least about 20%, preferably by at least about 30%, 40%, 50%, 60%, 70%, 80%, 85%, 90%, 95% and 100%, or at least 20-30%, 20-40%, 20-50%, 20-600%, 20-70%, 20-80%, 20-90%, 20-95%, 20-100%, 30-40%, 30-50%, 30-60%, 30-70%, 30-80%, 30-90%, 30-95%, 30-100%, 40-50%, 40-60%, 40-70%, 40-80%, 40-90%, 40-95%, 40-100%, 50-60%, 50-70%, 50-80%, 50-90%, 50-95%, 50-100%, 60-70%, 60-80%, 60-90%, 60-95%, 60-100%, 70-80%, 70-90%, 70-95%, 70-100%, 80-90%, 80-95%, 80-100%, 90-95%, 90-100% or 95-100%. Accordingly, the protein product of the targeted gene may be inhibited by at least about 20%, preferably by at least about 30%, 40%, 50%, 60%, 70%, 80%, 85%, 90%, 95% and 100%, or at least 20-30%, 20-40%, 20-50%, 20-60%, 20-70%, 20-80%, 20-90%, 20-95%, 20-100%, 30-40%, 30-50%, 30-60%, 30-70%, 30-80%, 30-90%, 30-95%, 30-100%, 40-50%, 40-60%, 40-70%, 40-80%, 40-90%, 40-95%, 40-100%, 50-60%, 50-70%, 50-80%, 50-90%, 50-95%, 50-100%, 60-70%, 60-80%, 60-90%, 60-95%, 60-100%, 70-80%, 70-90%, 70-95%, 70-100%, 80-90%, 80-95%, 80-100%, 90-95%, 90-100% or 95-100%.

[0323] According to the present invention, the siRNA molecules are designed and tested for their ability in reducing HTT mRNA levels in cultured cells. Such siRNA molecules may form a duplex such as, but not limited to, include those listed in Table 4, Table 5 or Table 6. As a non-limiting example, the siRNA duplexes may be siRNA duplex IDs: D-3500 to D-3570.

[0324] In one embodiment, the siRNA molecules comprise a miRNA seed match for the target (e.g., HTT) located in the guide strand. In another embodiment, the siRNA molecules comprise a miRNA seed match for the target (e.g., HTT) located in the passenger strand. In yet another embodiment, the siRNA duplexes or encoded dsRNA targeting HTT gene do not comprise a seed match for the target (e.g., HTT) located in the guide or passenger strand.

[0325] In one embodiment, the siRNA duplexes or encoded dsRNA targeting HTT gene may have almost no significant full-length off target effects for the guide strand. In another embodiment, the siRNA duplexes or encoded dsRNA targeting HTT gene may have almost no significant full-length off target effects for the passenger strand. The siRNA duplexes or encoded dsRNA targeting HTT gene may have less than 1%, 2%, 3%, 4%, 5%, 6%, 7%, 8%, 9%, 10%,11%, 12%, 13%, 14%, 15%, 20%, 25%, 30%, 35%, 40%, 45%, 50%, 1-5%, 2-6%, 3-7%, 4-8%, 5-9%, 5-10%, 6-10%, 5-15%, 5-20%, 5-25%, 5-30%, 10-20%, 10-30%, 10-40%, 10-50%, 15-30%, 15-40%, 15-45%, 20-40%, 20-50%, 25-50%, 30-40%, 30-50%, 35-50%, 40-50%, 45-50% full-length off target effects for the passenger strand. In yet another embodiment, the siRNA duplexes or encoded dsRNA targeting HTT gene may have almost no significant full-length off target effects for the guide strand or the passenger strand. The siRNA duplexes or encoded dsRNA targeting HTT gene may have less than 1%, 2%, 3%, 4%, 5%, 6%, 7%, 8%, 9%, 10%, 11, 12%, 13%, 14%, 15%, 20%, 25%, 30%, 35%, 40%, 45%, 50%, 1-5%, 2-6%, 3-7%, 4-8%, 5-9%, 5-10%, 6-10%, 5-15%, 5-20%, 5-25%, 5-30%, 10-20%, 10-30%, 10-40%, 10-50%, 15-30%, 15-40%, 15-45%, 20-40%, 20-50%, 25-50%, 30-40%, 30-50%, 35-50%, 40-50%, 45-50% full-length off target effects for the guide or passenger strand.

[0326] In one embodiment, the siRNA duplexes or encoded dsRNA targeting HTT gene may have high activity in vitro. In another embodiment, the siRNA molecules may have low activity in vitro. In yet another embodiment, the siRNA duplexes or dsRNA targeting the HTT gene may have high guide strand activity and low passenger strand activity in vitro.

[0327] In one embodiment, the siRNA molecules have a high guide strand activity and low passenger strand activity in vitro. The target knock-down (KD) by the guide strand may be at least 40%, 50%, 60%, 65%, 70%, 75%, 80%, 85%, 90%, 95%, 99%, 99.5% or 100%. The target knock-down by the guide strand may be 40-50%, 45-50%, 50-55%, 50-60%, 60-65%, 60-70%, 60-75%, 60-80%, 60-85%, 60-90%, 60-95%, 60-99%, 60-99.5%, 60-100%, 65-70%, 65-75%, 65-80%, 65-85%, 65-90%, 65-95%, 65-99%, 65-99.5%, 65-100%, 70-75%, 70-80%, 70-85%, 70-90%, 70-95%, 70-99%, 70-99.5%, 70-100%, 75-80%, 75-85%, 75-90%, 75-95%, 75-99%, 75-99.5%, 75-100%, 80-85%, 80-90%, 80-95%, 80-99%, 80-99.5%, 80-100%, 85-90%, 85-95%, 85-99%, 85-99.5%, 85-100%, 90-95%, 90-99%, 90-99.5%, 90-100%, 95-99%, 95-99.5%, 95-1000%, 99-99.5%, 99-100% or 99.5-100%. As a non-limiting example, the target knock-down (KD) by the guide strand is greater than 70%. As a non-limiting example, the target knock-down (KD) by the guide strand is greater than 60%.

[0328] In one embodiment, the siRNA duplex is designed so there is no miRNA seed match for the sense or antisense sequence to non-Htt sequence.

[0329] In one embodiment, the IC₅₀ of the guide strand for the nearest off target is greater than 100 multiplied by the IC₅₀ of the guide strand for the on-target gene, Htt. As a non-limiting example, if the IC₅₀ of the guide strand for the nearest off target is greater than 100 multiplied by the IC₅₀ of the guide strand for the target then the siRNA molecule is said to have high guide strand selectivity for inhibiting Htt in vitro.

[0330] In one embodiment, the 5′ processing of the guide strand has a correct start (n) at the 5′ end at least 75%, 80%, 85%, 90%, 95%, 99% or 100% of the time in vitro or in vivo. As a non-limiting example, the 5′ processing of the guide strand is precise and has a correct start (n) at the 5′ end at least 99% of the time in vitro. As a non-limiting example, the 5′ processing of the guide strand is precise and has a correct start (n) at the 5′ end at least 99% of the time in vivo. As a non-limiting example, the 5′ processing of the guide strand is precise and has a correct start (n) at the 5′ end at least 90% of the time in vitro. As a non-limiting example, the 5′ processing of the guide strand is precise and has a correct start (n) at the 5′ end at least 90% of the time in vivo. As a non-limiting example, the 5′ processing of the guide strand is precise and has a correct start (n) at the 5′ end at least 85% of the time in vitro. As a non-limiting example, the 5′ processing of the guide strand is precise and has a correct start (n) at the 5′ end at least 85% of the time in vivo.

[0331] In one embodiment, the guide to passenger (G:P) (also referred to as the antisense to sense) strand ratio expressed is 1:10, 1:9, 1:8, 1:7, 1:6, 1:5, 1:4, 1:3, 1:2, 1.1, 2:10, 2:9, 2:8, 2:7, 2:6, 2:5, 2:4, 2:3, 2:2, 2:1, 3:10, 3:9, 3:8, 3:7, 3:6, 3:5, 3:4, 3:3, 3:2, 3:1, 4:10, 4:9, 4:8, 4:7, 4:6, 4:5, 4:4, 4:3, 4:2, 4:1, 5:10, 5:9, 5:8, 5:7, 5:6, 5:5, 5:4, 5:3, 5:2, 5:1, 6:10, 6:9, 6:8, 6:7, 6:6, 6:5, 6:4, 6:3, 6:2, 6:1, 7:10, 7:9, 7:8, 7:7, 7:6, 7:5, 7:4, 7:3, 7:2, 7:1, 8:10, 8:9, 8:8, 8:7, 8:6, 8:5, 8:4, 8:3, 8:2, 8:1, 9:10, 9:9, 9:8, 9:7, 9:6, 9:5, 9:4, 9:3, 9:2, 9:1, 10:10, 10:9, 10:8, 10:7, 10:6, 10:5, 10:4, 10:3, 10:2, 10:1, 1:99, 5:95, 10:90, 15:85, 20:80, 25:75, 30:70, 35:65, 40:60, 45:55, 50:50, 55:45, 60:40, 65:35, 70:30, 75:25, 80:20, 85:15, 90:10, 95:5, or 99:1 in vitro or m vivo. The guide to passenger ratio refers to the ratio of the guide strands to the passenger strands after intracellular processing of the pri-microRNA. For example, a 80:20 guide-to-passenger ratio would have 8 guide strands to every 2 passenger strands processed from the precursor. As a non-limiting example, the guide-to-passenger strand ratio is 8:2 in vitro. As a non-limiting example, the guide-to-passenger strand ratio is 8:2 in vivo. As a non-limiting example, the guide-to-passenger strand ratio is 9:1 in vitro. As a non-limiting example, the guide-to-passenger strand ratio is 9:1 in vivo.

[0332] In one embodiment, the guide to passenger (G:P) (also referred to as the antisense to sense) strand ratio expressed is greater than 1.

[0333] In one embodiment, the guide to passenger (G:P) (also referred to as the antisense to sense) strand ratio expressed is greater than 2.

[0334] In one embodiment, the guide to passenger (G:P) (also referred to as the antisense to sense) strand ratio expressed is greater than 5.

[0335] In one embodiment, the guide to passenger (G:P) (also referred to as the antisense to sense) strand ratio expressed is greater than 10.

[0336] In one embodiment, the guide to passenger (G:P) (also referred to as the antisense to sense) strand ratio expressed is greater than 20.

[0337] In one embodiment, the guide to passenger (G:P) (also referred to as the antisense to sense) strand ratio expressed is greater than 50.

[0338] In one embodiment, the guide to passenger (G:P) (also referred to as the antisense to sense) strand ratio expressed is at least 3:1.

[0339] In one embodiment, the guide to passenger (G:P) (also referred to as the antisense to sense) strand ratio expressed is at least 5:1.

[0340] In one embodiment, the guide to passenger (G:P) (also referred to as the antisense to sense) strand ratio expressed is at least 10:1.

[0341] In one embodiment, the guide to passenger (G:P) (also referred to as the antisense to sense) strand ratio expressed is at least 20:1.

[0342] In one embodiment, the guide to passenger (G:P) (also referred to as the antisense to sense) strand ratio expressed is at least 50:1.

[0343] In one embodiment, the passenger to guide (P:G) (also referred to as the sense to antisense) strand ratio expressed is 1:10, 1:9, 1:8, 1:7, 1:6, 1:5, 1:4, 1:3, 1:2, 1, 1, 2:10, 2:9, 2:8, 2:7, 2:6, 2:5, 2:4, 2:3, 2:2, 2:1, 3:10, 3:9, 3:8, 3:7, 3:6, 3:5, 3:4, 3:3, 3:2, 3:1, 4:10, 4:9, 4:8, 4:7, 4:6, 4:5, 4:4, 4:3, 4:2, 4:1, 5:10, 5:9, 5:8, 5:7, 5:6, 5:5, 5:4, 5:3, 5:2, 5:1, 6:10, 6:9, 6:8, 6:7, 6:6, 6:5, 6:4, 6:3, 6:2, 6:1, 7:10, 7:9, 7:8, 7:7, 7:6, 7:5, 7:4, 7:3, 7:2, 7:1, 8:10, 8:9, 8:8, 8:7, 8:6, 8:5, 8:4, 8:3, 8:2, 8:1, 9:10, 9:9, 9:8, 9:7, 9:6, 9:5, 9:4, 9:3, 9:2, 9:1, 10:10, 10:9, 10:8, 10:7, 10:6, 10:5, 10:4, 10:3, 10:2, 10:1, 1:99, 5:95, 10:90, 15:85, 20:80, 25:75, 30:70, 35:65, 40:60, 45:55, 50:50, 55:45, 60:40, 65:35, 70:30, 75:25, 80:20, 85:15, 90:10, 95:5, or 99:1 in vitro or in vivo. The passenger to guide ratio refers to the ratio of the passenger strands to the guide strands after the intracellular processing of the pri-microRNA. For example, a 80:20 of passenger-to-guide ratio would have 8 passenger strands to every 2 guide strands processed from the precursor. As a non-limiting example, the passenger-to-guide strand ratio is 80:20 in vitro. As a non-limiting example, the passenger-to-guide strand ratio is 80:20 in vivo. As a non-limiting example, the passenger-to-guide strand ratio is 8:2 in vitro. As a non-limiting example, the passenger-to-guide strand ratio is 8:2 in vivo. As a non-limiting example, the passenger-to-guide strand ratio is 9:1 m vitro. As a non-limiting example, the passenger-to-guide strand ratio is 9:1 in vivo.

[0344] In one embodiment, the passenger to guide (P:G) (also referred to as the sense to antisense) strand ratio expressed is greater than 1.

[0345] In one embodiment, the passenger to guide (P:G) (also referred to as the sense to antisense) strand ratio expressed is greater than 2.

[0346] In one embodiment, the passenger to guide (P:G) (also referred to as the sense to antisense) strand ratio expressed is greater than 5.

[0347] In one embodiment, the passenger to guide (P:G) (also referred to as the sense to antisense) strand ratio expressed is greater than 10.

[0348] In one embodiment, the passenger to guide (P:G) (also referred to as the sense to antisense) strand ratio expressed is greater than 20.

[0349] In one embodiment, the passenger to guide (P:G) (also referred to as the sense to antisense) strand ratio expressed is greater than 50.

[0350] In one embodiment, the passenger to guide (P:G) (also referred to as the sense to antisense) strand ratio expressed is at least 3:1.

[0351] In one embodiment, the passenger to guide (P:G) (also referred to as the sense to antisense) strand ratio expressed is at least 5:1.

[0352] In one embodiment, the passenger to guide (P:G) (also referred to as the sense to antisense) strand ratio expressed is at least 10:1.

[0353] In one embodiment, the passenger to guide (P:G) (also referred to as the sense to antisense) strand ratio expressed is at least 20:1.

[0354] In one embodiment, the passenger to guide (P:G) (also referred to as the sense to antisense) strand ratio expressed is at least 50:1.

[0355] In one embodiment, a passenger-guide strand duplex is considered effective when the pri- or pre-microRNAs demonstrate, but methods known in the art and described herein, greater than 2-fold guide to passenger strand ratio when processing is measured. As a non-limiting examples, the pri- or pre-microRNAs demonstrate great than 2-fold, 3-fold, 4-fold, 5-fold, 6-fold, 7-fold, 8-fold, 9-fold, 10-fold, 11-fold, 12-fold, 13-fold, 14-fold, 15-fold, or 2 to 5-fold, 2 to 10-fold, 2 to 15-fold, 3 to 5-fold, 3 to 10-fold, 3 to 15-fold, 4 to 5-fold, 4 to 10-fold, 4 to 15-fold, 5 to 10-fold, 5 to 15-fold, 6 to 10-fold, 6 to 15-fold, 7 to 10-fold, 7 to 15-fold, 8 to 10-fold, 8 to 15-fold, 9 to 10-fold, 9 to 15-fold, 10 to 15-fold, 11 to 15-fold, 12 to 15-fold, 13 to 15-fold, or 14 to 15-fold guide to passenger strand ratio when processing is measured.

[0356] In one embodiment, the vector genome encoding the dsRNA comprises a sequence which is at least 60%, 65%, 70%, 75%, 80%, 85%, 90%, 95%, 99% or more than 99% of the full length of the construct. As a non-limiting example, the vector genome comprises a sequence which is at least 80% of the full length sequence of the construct.

[0357] In one embodiment, the siRNA molecules may be used to silence wild type or mutant HTT by targeting at least one exon on the htt sequence. The exon may be exon 1, exon 2, exon 3, exon 4, exon 5, exon 6, exon 7, exon 8, exon 9, exon 10, exon 11, exon 12, exon 13, exon 14, exon 15, exon 16, exon 17, exon 18, exon 19, exon 20, exon 21, exon 22, exon 23, exon 24, exon 25, exon 26, exon 27, exon 28, exon 29, exon 30, exon 31, exon 32, exon 33, exon 34, exon 35, exon 36, exon 37, exon 38, exon 39, exon 40, exon 41, exon 42, exon 43, exon 44, exon 45, exon 46, exon 47, exon 48, exon 49, exon 50, exon 51, exon 52, exon 53, exon 54, exon 55, exon 56, exon 57, exon 58, exon 59, exon 60, exon 61, exon 62, exon 63, exon 64, exon 65, exon 66, and/or exon 67. As a non-limiting example, the siRNA molecules may be used to silence wild type or mutant HTT by targeting exon 1. As another non-limiting example, the siRNA molecules may be used to silence wild type or mutant HTT by targeting an exon other than exon 1. As another non-limiting example, the siRNA molecules may be used to silence wild type or mutant HTT by targeting exon 50. As another non-limiting example, the siRNA molecules may be used to silence wild type or mutant HTT by targeting exon 67.

[0358] In one embodiment, the siRNA molecules may be used to silence wild type and/or mutant HTT by targeting at least one exon on the htt sequence. The exon may be exon 1, exon 2, exon 3, exon 4, exon 5, exon 6, exon 7, exon 8, exon 9, exon 10, exon 11, exon 12, exon 13, exon 14, exon 15, exon 16, exon 17, exon 18, exon 19, exon 20, exon 21, exon 22, exon 23, exon 24, exon 25, exon 26, exon 27, exon 28, exon 29, exon 30, exon 31, exon 32, exon 33, exon 34, exon 35, exon 36, exon 37, exon 38, exon 39, exon 40, exon 41, exon 42, exon 43, exon 44, exon 45, exon 46, exon 47, exon 48, exon 49, exon 50, exon 51, exon 52, exon 53, exon 54, exon 55, exon 56, exon 57, exon 58, exon 59, exon 60, exon 61, exon 62, exon 63, exon 64, exon 65, exon 66, and/or exon 67. As a non-limiting example, the siRNA molecules may be used to silence wild type and/or mutant HTT by targeting exon 1. As another non-limiting example, the siRNA molecules may be used to silence wild type and/or mutant HTT by targeting an exon other than exon 1. As another non-limiting example, the siRNA molecules may be used to silence wild type and/or mutant HTT by targeting exon 50. As another non-limiting example, the siRNA molecules may be used to silence wild type and/or mutant HTT by targeting exon 67.

siRNA Modification

[0359] In some embodiments, the siRNA molecules of the present invention, when not delivered as a precursor or DNA, may be chemically modified to modulate some features of RNA molecules, such as, but not limited to, increasing the stability of siRNAs in vivo. The chemically modified siRNA molecules can be used in human therapeutic applications, and are improved without compromising the RNAi activity of the siRNA molecules. As a non-limiting example, the siRNA molecules modified at both the 3′ and the 5′ end of both the sense strand and the antisense strand.

[0360] In some aspects, the siRNA duplexes of the present invention may contain one or more modified nucleotides such as, but not limited to, sugar modified nucleotides, nucleobase modifications and/or backbone modifications. In some aspects, the siRNA molecule may contain combined modifications, for example, combined nucleobase and backbone modifications.

[0361] In one embodiment, the modified nucleotide may be a sugar-modified nucleotide. Sugar modified nucleotides include, but are not limited to 2′-fluoro, 2′-amino and 2′-thio modified ribonucleotides, e.g. 2′-fluoro modified ribonucleotides. Modified nucleotides may be modified on the sugar moiety, as well as nucleotides having sugars or analogs thereof that are not ribosyl. For example, the sugar moieties may be, or be based on, mannoses, arabinoses, glucopyranoses, galactopyranoses, 4′-thioribose, and other sugars, heterocycles, or carbocycles.

[0362] In one embodiment, the modified nucleotide may be a nucleobase-modified nucleotide.

[0363] In one embodiment, the modified nucleotide may be a backbone-modified nucleotide. In some embodiments, the siRNA duplexes of the present invention may further comprise other modifications on the backbone. A normal “backbone”, as used herein, refers to the repeating alternating sugar-phosphate sequences in a DNA or RNA molecule. The deoxyribose/ribose sugars are joined at both the 3′-hydroxyl and 5′-hydroxyl groups to phosphate groups in ester links, also known as “phosphodiester” bonds/linker (PO linkage). The PO backbones may be modified as “phosphorothioate backbone (PS linkage). In some cases, the natural phosphodiester bonds may be replaced by amide bonds but the four atoms between two sugar units are kept. Such amide modifications can facilitate the solid phase synthesis of oligonucleotides and increase the thermodynamic stability of a duplex formed with siRNA complement. See e.g. Mesmaeker et al., Pure & Appl. Chem., 1997, 3, 437-440; the content of which is incorporated herein by reference in its entirety.

[0364] Modified bases refer to nucleotide bases such as, for example, adenine, guanine, cytosine, thymine, uracil, xanthine, inosine, and queuosine that have been modified by the replacement or addition of one or more atoms or groups. Some examples of modifications on the nucleobase moieties include, but are not limited to, alkylated, halogenated, thiolated, aminated, amidated, or acetylated bases, individually or in combination. More specific examples include, for example, 5-propynyluridine, 5-propynylcytidine, 6-methyladenine, 6-methylguanine, N,N,-dimethyladenine, 2-propyladenine, 2-propylguanine, 2-aminoadenine, 1-methylinosine, 3-methyluridine, 5-methylcytidine, 5-methyluridine and other nucleotides having a modification at the 5 position, 5-(2-amino)propyl uridine, 5-halocytidine, 5-halouridine, 4-acetylcytidine, 1-methyladenosine, 2-methyladenosine, 3-methylcytidine, 6-methyluridine, 2-methylguanosine, 7-methylguanosine, 2,2-dimethylguanosine, 5-methylaminoethyluridine, 5-methyloxyuridine, deazanucleotides such as 7-deaza-adenosine, 6-azouridine, 6-azocytidine, 6-azothymidine, 5-methyl-2-thiouridine, other thio bases such as 2-thiouridine and 4-thiouridine and 2-thiocytidine, dihydrouridine, pseudouridine, queuosine, archaeosine, naphthyl and substituted naphthyl groups, any O- and N-alkylated purines and pyrimidines such as N6-methyladenosine, 5-methylcarbonylmethyluridine, uridine 5-oxyacetic acid, pyridine-4-one, pyridine-2-one, phenyl and modified phenyl groups such as aminophenol or 2,4,6-trimethoxy benzene, modified cytosines that act as G-clamp nucleotides, 8-substituted adenines and guanines, 5-substituted uracils and thymines, azapyrimidines, carboxyhydroxyalkyl nucleotides, carboxyalkylaminoalkyl nucleotides, and alkylcarbonylalkylated nucleotides.

[0365] In one embodiment, the modified nucleotides may be on just the sense strand.

[0366] In another embodiment, the modified nucleotides may be on just the antisense strand.

[0367] In some embodiments, the modified nucleotides may be in both the sense and antisense strands.

[0368] In some embodiments, the chemically modified nucleotide does not affect the ability of the antisense strand to pair with the target mRNA sequence, such as the HTT mRNA sequence.

[0369] In one embodiment, the AAV particle comprising a nucleic acid sequence encoding the siRNA molecules of the present invention may encode siRNA molecules which are polycistronic molecules. The siRNA molecules may additionally comprise one or more linkers between regions of the siRNA molecules.

### Molecular Scaffold

[0370] In one embodiment, the siRNA molecules may be encoded in a modulatory polynucleotide which also comprises a molecular scaffold. As used herein a “molecular scaffold” is a framework or starting molecule that forms the sequence or structural basis against which to design or make a subsequent molecule.

[0371] In one embodiment, the molecular scaffold comprises at least one 5′ flanking region. As a non-limiting example, the 5′ flanking region may comprise a 5′ flanking sequence which may be of any length and may be derived in whole or in part from wild type microRNA sequence or be a completely artificial sequence.

[0372] In one embodiment, the molecular scaffold comprises at least one 3′ flanking region. As a non-limiting example, the 3′ flanking region may comprise a 3′ flanking sequence which may be of any length and may be derived in whole or in part from wild type microRNA sequence or be a completely artificial sequence.

[0373] In one embodiment, the molecular scaffold comprises at least one loop motif region. As a non-limiting example, the loop motif region may comprise a sequence which may be of any length.

[0374] In one embodiment, the molecular scaffold comprises a 5′ flanking region, a loop motif region and/or a 3′ flanking region.

[0375] In one embodiment, at least one siRNA, miRNA or other RNAi agent described herein, may be encoded by a modulatory polynucleotide which may also comprise at least one molecular scaffold. The molecular scaffold may comprise a 5′ flanking sequence which may be of any length and may be derived in whole or in part from wild type microRNA sequence or be completely artificial. The 3′ flanking sequence may mirror the 5′ flanking sequence and/or a 3′ flanking sequence in size and origin. Either flanking sequence may be absent. The 3′ flanking sequence may optionally contain one or more CNNC motifs, where “N” represents any nucleotide.

[0376] Forming the stem of a stem loop structure is a minimum of the modulatory polynucleotide encoding at least one siRNA, miRNA or other RNAi agent described herein. In some embodiments, the siRNA, miRNA or other RNAi agent described herein comprises at least one nucleic acid sequence which is in part complementary or will hybridize to a target sequence. In some embodiments the payload is an siRNA molecule or fragment of an siRNA molecule.

[0377] In some embodiments, the 5′ arm of the stem loop structure of the modulatory polynucleotide comprises a nucleic acid sequence encoding a sense sequence. Non-limiting examples of sense sequences, or fragments or variants thereof, which may be encoded by the modulatory polynucleotide are described in Table 3.

[0378] In some embodiments, the 3′ arm of the stem loop of the modulatory polynucleotide comprises a nucleic acid sequence encoding an antisense sequence. The antisense sequence, in some instances, comprises a “G” nucleotide at the 5′ most end. Non-limiting examples of antisense sequences, or fragments or variants thereof, which may be encoded by the modulatory polynucleotide are described in Table 2.

[0379] In other embodiments, the sense sequence may reside on the 3′ arm while the antisense sequence resides on the 5′ arm of the stem of the stem loop structure of the modulatory polynucleotide. Non-limiting examples of sense and antisense sequences which may be encoded by the modulatory polynucleotide are described in Tables 2 and 3.

[0380] In one embodiment, the sense and antisense sequences may be completely complementary across a substantial portion of their length. In other embodiments the sense sequence and antisense sequence may be at least 70, 80, 90, 95 or 99% complementarity across independently at least 50, 60, 70, 80, 85, 90, 95, or 99% of the length of the strands.

[0381] Neither the identity of the sense sequence nor the homology of the antisense sequence need to be 100% complementarity to the target sequence.

[0382] In one embodiment, separating the sense and antisense sequence of the stem loop structure of the modulatory polynucleotide is a loop sequence (also known as a loop motif, linker or linker motif). The loop sequence may be of any length, between 4-30 nucleotides, between 4-20 nucleotides, between 4-15 nucleotides, between 5-15 nucleotides, between 6-12 nucleotides, 6 nucleotides, 7 nucleotides, 8 nucleotides, 9 nucleotides, 10 nucleotides, 11 nucleotides, 12 nucleotides, 13 nucleotides, 14 nucleotides, and/or 15 nucleotides.

[0383] In some embodiments, the loop sequence comprises a nucleic acid sequence encoding at least one UGUG motif. In some embodiments, the nucleic acid sequence encoding the UGUG motif is located at the 5′ terminus of the loop sequence.

[0384] In one embodiment, spacer regions may be present in the modulatory polynucleotide to separate one or more modules (e.g., 5′ flanking region, loop motif region, 3′ flanking region, sense sequence, antisense sequence) from one another. There may be one or more such spacer regions present.

[0385] In one embodiment, a spacer region of between 8-20, i.e., 8, 9, 10, 11, 12, 13, 14, 15, 16, 17, 18, 19, or 20 nucleotides may be present between the sense sequence and a flanking region sequence.

[0386] In one embodiment, the length of the spacer region is 13 nucleotides and is located between the 5′ terminus of the sense sequence and the 3′ terminus of the flanking sequence. In one embodiment, a spacer is of sufficient length to form approximately one helical turn of the sequence.

[0387] In one embodiment, a spacer region of between 8-20, i.e., 8, 9, 10, 11, 12, 13, 14, 15, 16, 17, 18, 19, or 20 nucleotides may be present between the antisense sequence and a flanking sequence.

[0388] In one embodiment, the spacer sequence is between 10-13, i.e., 10, 11, 12 or 13 nucleotides and is located between the 3′ terminus of the antisense sequence and the 5′ terminus of a flanking sequence. In one embodiment, a spacer is of sufficient length to form approximately one helical turn of the sequence.

[0389] In one embodiment, the molecular scaffold of the modulatory polynucleotide comprises in the 5′ to 3′ direction, a 5′ flanking sequence, a 5′ arm, a loop motif, a 3′ arm and a 3′ flanking sequence. As a non-limiting example, the 5′ arm may comprise a nucleic acid sequence encoding a sense sequence and the 3′ arm comprises a nucleic acid sequence encoding the antisense sequence. In another non-limiting example, the 5′ arm comprises a nucleic acid sequence encoding the antisense sequence and the 3′ arm comprises a nucleic acid sequence encoding the sense sequence.

[0390] In one embodiment, the 5′ arm, sense and/or antisense sequence, loop motif and/or 3′ arm sequence may be altered (e.g., substituting 1 or more nucleotides, adding nucleotides and/or deleting nucleotides). The alteration may cause a beneficial change in the function of the construct (e.g., increase knock-down of the target sequence, reduce degradation of the construct, reduce off target effect, increase efficiency of the payload, and reduce degradation of the payload).

[0391] In one embodiment, the molecular scaffold of the modulatory polynucleotides is aligned in order to have the rate of excision of the guide strand (also referred to herein as the antisense strand) be greater than the rate of excision of the passenger strand (also referred to herein as the sense strand). The rate of excision of the guide or passenger strand may be, independently, 1%, 2%, 3%, 4%, 5%, 10%, 15%, 20%, 25%, 30%, 35%, 40%, 45%, 50%, 55%, 60%, 65%, 70%, 75%, 80%, 85%, 90%, 95%, 99% or more than 99%. As a non-limiting example, the rate of excision of the guide strand is at least 80%. As another non-limiting example, the rate of excision of the guide strand is at least 90%.

[0392] In one embodiment, the rate of excision of the guide strand is greater than the rate of excision of the passenger strand. In one aspect, the rate of excision of the guide strand may be at least 1%, 2%, 3%, 4%, 5%, 10%, 15%, 20%, 25%, 30%, 35%, 40%, 45%, 50%, 55%, 60%, 65%, 70%, 75%, 80%, 85%, 90%, 95%, 99% or more than 99% greater than the passenger strand.

[0393] In one embodiment, the efficiency of excision of the guide strand is at least 60%, 65%, 70%, 75%, 80%, 85%, 90%, 95%, 99% or more than 99%. As a non-limiting example, the efficiency of the excision of the guide strand is greater than 80%.

[0394] In one embodiment, the efficiency of the excision of the guide strand is greater than the excision of the passenger strand from the molecular scaffold. The excision of the guide strand may be 2, 3, 4, 5, 6, 7, 8, 9, 10 or more than 10 times more efficient than the excision of the passenger strand from the molecular scaffold.

[0395] In one embodiment, the molecular scaffold comprises a dual-function targeting modulatory polynucleotide. As used herein, a “dual-function targeting” modulatory polynucleotide is a polynucleotide where both the guide and passenger strands knock down the same target or the guide and passenger strands knock down different targets.

[0396] In one embodiment, the molecular scaffold of the modulatory polynucleotides described herein may comprise a 5′ flanking region, a loop motif region and a 3′ flanking region. Non-limiting examples of the sequences for the 5′ flanking region, loop motif region (may also be referred to as a linker region) and the 3′ flanking region which may be used, or fragments thereof used, in the modulatory polynucleotides described herein are shown in Tables 7-9.

TABLE 7
5′ Flanking Regions for Molecular Scaffold

| 5′ | | 5′ |
|---|---|---|
| Flanking | | Flanking |
| Region | | Region |
| Name | 5′ Flanking Region Sequence | SEQ ID |
| 5F3 | GTGCTGGGCGGGGGGCGGCGGGCCCTC | 1163 |
| | CCGCAGAACACCATGCGCTCCACGGAA | |
| 5F1 | GTGCTGGGCGGGGGGCGGCGGGCCCTC | 1161 |
| | CCGCAGAACACCATGCGCTCTTCGGAA | |
| 5F2 | GAAGCAAAGAAGGGGCAGAGGGAGCCC | 1162 |
| | GTGAGCTGAGTGGGCCAGGGACTGGGA | |
| | GAAGGAGTGAGGAGGCAGGGCCGGCAT | |
| | GCCTCTGCTGCTGGCCAGA | |
| 5F4 | GGGCCCTCCCGCAGAACACCATGCGCT | 1164 |
| | CCACGGAA | |
| 5F5 | CTCCCGCAGAACACCATGCGCTCCACG | 1165 |
| | GAA | |
| 5F6 | GTGCTGGGCGGGGGGCGGCGGGCCCTC | 1166 |
| | CCGCAGAACACCATGCGCTCCACGGAA | |
| | G | |
| 5F7 | GTGCTGGGCGGGGGGCGGCGGGCCCTC | 1167 |
| | CCGCAGAACACCATGCGCTCCTCGGAA | |

TABLE 8
Loop Motif Regions for Molecular Scaffold

| Loop | | Loop |
|---|---|---|
| Motif | | Motif |
| Region | | Region |
| Name | Loop Motif Region Sequence | SEQ ID |
| L5 | GTGGCCACTGAGAAG | 1172 |
| L1 | TGTGACCTGG | 1168 |
| L2 | TGTGATTTGG | 1169 |
| L3 | GTCTGCACCTGTCACTAG | 1170 |
| L4 | GTGACCCAAG | 1171 |
| L6 | GTGACCCAAT | 1173 |
| L7 | GTGACCCAAC | 1174 |
| L8 | GTGGCCACTGAGAAA | 1175 |

TABLE 9
3′ Flanking Regions for Molecular Scaffold

| 3′ | | 3′ |
|---|---|---|
| Flanking | | Flanking |
| Region | | Region |
| Name | 3′ Flanking Region Sequence | SEQ ID |
| 3F1 | CTGAGGAGCGCCTTGACAGCAGCCAT | 1178 |
| | GGGAGGGCCGCCCCCTACCTCAGTGA | |
| 3F2 | CTGTGGAGCGCCTTGACAGCAGCCAT | 1179 |
| | GGGAGGGCCGCCCCCTACCTCAGTGA | |
| 3F3 | TGGCCGTGTAGTGCTACCCAGCGCTG | 1180 |
| | GCTGCCTCCTCAGCATTGCAATTCCT | |
| | CTCCCATCTGGGCACCAGTCAGCTAC | |
| | CCTGGTGGGAATCTGGGTAGCC | |
| 3F4 | CTGAGGAGCGCCTTGACAGCAGCCAT | 1181 |
| | GGGAGGGCC | |
| 3F5 | CTGCGGAGCGCCTTGACAGCAGCCAT | 1182 |
| | GGGAGGGCCGCCCCCTACCTCAGTGA | |

[0397] In one embodiment, the molecular scaffold may comprise at least one 5′ flanking region, fragment or variant thereof listed in Table 7. As a non-limiting example, the 5′ flanking region may be 5F1, 5F2, 5F3, 5F4, 5F5, 5F6, or 5F7.

[0398] In one embodiment, the molecular scaffold may comprise at least one 5F1 flanking region.

[0399] In one embodiment, the molecular scaffold may comprise at least one 5F2 flanking region.

[0400] In one embodiment, the molecular scaffold may comprise at least one 5F3 flanking region.

[0401] In one embodiment, the molecular scaffold may comprise at least one 5F4 flanking region.

[0402] In one embodiment, the molecular scaffold may comprise at least one 5F5 flanking region.

[0403] In one embodiment, the molecular scaffold may comprise at least one 5F6 flanking region.

[0404] In one embodiment, the molecular scaffold may comprise at least one 5F7 flanking region.

[0405] In one embodiment, the molecular scaffold may comprise at least one loop motif region, fragment or variant thereof listed in Table 8. As a non-limiting example, the loop motif region may be L1, L2, L3, LA, L5, L6, L7, or L8.

[0406] In one embodiment, the molecular scaffold may comprise at least one L1 loop motif region.

[0407] In one embodiment, the molecular scaffold may comprise at least one L2 loop motif region.

[0408] In one embodiment, the molecular scaffold may comprise at least one L3 loop motif region.

[0409] In one embodiment, the molecular scaffold may comprise at least one L4 loop motif region.

[0410] In one embodiment, the molecular scaffold may comprise at least one L5 loop motif region.

[0411] In one embodiment, the molecular scaffold may comprise at least one L6 loop motif region.

[0412] In one embodiment, the molecular scaffold may comprise at least one L7 loop motif region.

[0413] In one embodiment, the molecular scaffold may comprise at least one L8 loop motif region.

[0414] In one embodiment, the molecular scaffold may comprise at least one 3′ flanking region, fragment or variant thereof listed in Table 9. As a non-limiting example, the 3′ flanking region may be 3F1, 3F2, 3F3, 3F4, or 3F5.

[0415] In one embodiment, the molecular scaffold may comprise at least one 3F1 flanking region.

[0416] In one embodiment, the molecular scaffold may comprise at least one 3F2 flanking region.

[0417] In one embodiment, the molecular scaffold may comprise at least one 3F3 flanking region.

[0418] In one embodiment, the molecular scaffold may comprise at least one 3F4 flanking region.

[0419] In one embodiment, the molecular scaffold may comprise at least one 3F5 flanking region.

[0420] In one embodiment, the molecular scaffold may comprise at least one 5′ flanking region, fragment or variant thereof, and at least one loop motif region, fragment or variant thereof, as described in Tables 7 and 8. As a non-limiting example, the 5′ flanking region and the loop motif region may be 5F1 and L1, 5F1 and L2, 5F1 and L3, 5F1 and LA, 5F1 and L5. 5F1 and L6, 5F1 and L7, 5F1 and L8, 5F2 and L1, 5F2 and L2, 5F2 and L3, 5F2 and L4, 5F2 and L5, 5F2 and L6, 5F2 and L7, 5F2 and L5, 5F3 and L1, 5F3 and L2, 5F3 and L3, 5F3 and L4, 5F3 and L5, 5F3 and L6, 5F3 and L7, 5F3 and L8, 5F4 and L1, 5F4 and L2, 5F4 and L3, 5F4 and LA, 5F4 and L5, 5F4 and L6, 5F4 and L7, 5F4 and L8, 5F5 and L1, 5F5 and L2, 5F5 and L3, 5F5 and L4, 5F5 and L5, 5F5 and L6, 5F5 and L7, 5F5 and L8, 5F6 and L1, 5F6 and L2, 5F6 and L3, 5F6 and L4, 5F6 and L5, 5F6 and L6, 5F6 and L7, 5F6 and L8, 5F7 and L1, 5F7 and L2, 5F7 and L3, 5F7 and L4, 5F7 and L5, 5F7 and L6, 5F7 and L7, and 5F7 and L8.

[0421] In one embodiment, the molecular scaffold may comprise at least one 5F2 flanking region and at least one L1 loop motif region.

[0422] In one embodiment, the molecular scaffold may comprise at least one 5F1 flanking region and at least one L4 loop motif region.

[0423] In one embodiment, the molecular scaffold may comprise at least one 5F7 flanking region and at least one L8 loop motif region.

[0424] In one embodiment, the molecular scaffold may comprise at least one 5F3 flanking region and at least one L4 loop motif region.

[0425] In one embodiment, the molecular scaffold may comprise at least one 5F3 flanking region and at least one L5 loop motif region.

[0426] In one embodiment, the molecular scaffold may comprise at least one 5F4 flanking region and at least one L4 loop motif region.

[0427] In one embodiment, the molecular scaffold may comprise at least one 5F3 flanking region and at least one L7 loop motif region.

[0428] In one embodiment, the molecular scaffold may comprise at least one 5F5 flanking region and at least one L4 loop motif region.

[0429] In one embodiment, the molecular scaffold may comprise at least one 5F6 flanking region and at least one L4 loop motif region.

[0430] In one embodiment, the molecular scaffold may comprise at least one 5F3 flanking region and at least one L6 loop motif region.

[0431] In one embodiment, the molecular scaffold may comprise at least one 5F7 flanking region and at least one L4 loop motif region.

[0432] In one embodiment, the molecular scaffold may comprise at least one 5F2 flanking region and at least one L2 loop motif region.

[0433] In one embodiment, the molecular scaffold may comprise at least one 5F1 flanking region and at least one L1 loop motif region.

[0434] In one embodiment, the molecular scaffold may comprise at least one 5F1 flanking region and at least one L2 loop motif region.

[0435] In one embodiment, the molecular scaffold may comprise at least one 3′ flanking region, fragment or variant thereof, and at least one motif region, fragment or variant thereof, as described in Tables 8 and 9. As a non-limiting example, the 3′ flanking region and the loop motif region may be 3F1 and L1, 3F1 and L2, 3F1 and L3, 3F1 and L4, 3F1 and L5, 3F1 and L6, 3F1 and L7, 3F1 and L8, 3F2 and L1, 3F2 and L2, 3F2 and L3, 3F2 and L4, 3F2 and L5, 3F2 and L6, 3F2 and L7, 3F2 and L8, 3F3 and L1, 3F3 and L2, 3F3 and L3, 3F3 and L4A, 3F3 and L5, 3F3 and L6, 3F3 and L7, 3F3 and L8, 3F4 and L1, 3F4 and L2, 3F4 and L3, 3F4 and L4, 3F4 and L5, 3F4 and L6, 3F4 and L7, 3F4 and L8, 3F5 and L1, 3F5 and L2, 3F5 and L3, 3F5 and L4, 3F5 and L5, 3F5 and L6, 3F5 and L7, and 3F5 and L8.

[0436] In one embodiment, the molecular scaffold may comprise at least one L1 loop motif region and at least one 3F2 flanking region.

[0437] In one embodiment, the molecular scaffold may comprise at least one L4 loop motif region and at least one 3F1 flanking region.

[0438] In one embodiment, the molecular scaffold may comprise at least one L8 loop motif region and at least one 3F5 flanking region.

[0439] In one embodiment, the molecular scaffold may comprise at least one L5 loop motif region and at least 3F1 flanking region.

[0440] In one embodiment, the molecular scaffold may comprise at least one L4 loop motif region and at least one 3F4 flanking region.

[0441] In one embodiment, the molecular scaffold may comprise at least one L7 loop motif region and at least one 3F1 flanking region.

[0442] In one embodiment, the molecular scaffold may comprise at least one L6 loop motif region and at least one 3F1 flanking region.

[0443] In one embodiment, the molecular scaffold may comprise at least one L4 loop motif region and at least one 3F5 flanking region.

[0444] In one embodiment, the molecular scaffold may comprise at least one L2 loop motif region and at least one 3F2 flanking region.

[0445] In one embodiment, the molecular scaffold may comprise at least one L1 loop motif region and at least one 3F3 flanking region.

[0446] In one embodiment, the molecular scaffold may comprise at least one L5 loop motif region and at least one 3F4 flanking region.

[0447] In one embodiment, the molecular scaffold may comprise at least one L1 loop motif region and at least one 3F1 flanking region.

[0448] In one embodiment, the molecular scaffold may comprise at least one L2 loop motif region and at least one 3F1 flanking region.

[0449] In one embodiment, the molecular scaffold may comprise at least one 5′ flanking region, fragment or variant thereof, and at least one 3′ flanking region, fragment or variant thereof, as described in Tables 7 and 9. As a non-limiting example, the flanking regions may be 5F1 and 3F1, 5F1 and 3F2, 5F1 and 3F3, 5F1 and 3F4, 5F1 and 3F5, 5F2 and 3F1, 5F2 and 3F2, 5F2 and 3F3, 5F2 and 3F4, 5F2 and 3F5, 5F3 and 3F1, 5F3 and 3F2, 5F3 and 3F3, 5F3 and 3F4, 5F3 and 3F5, 5F4 and 3F1, 5F4 and 3F2, 5F4 and 3F3, 5F4 and 3F4, 5F4 and 3F5, 5F5 and 3F1, 5F5 and 3F2, 5F5 and 3F3, 5F5 and 3F4, 5F5 and 3F5, 5F6 and 3F1, 5F6 and 3F2, 5F6 and 3F3, 5F6 and 3F4, 5F6 and 3F5, 5F7 and 3F1, 5F7 and 3F2, 5F7 and 3F3, 5F7 and 3F4, and 5F7 and 3F5.

[0450] In one embodiment, the molecular scaffold may comprise at least one 5F2 5′ flanking region and at least one 3F2 3′ flanking region.

[0451] In one embodiment, the molecular scaffold may comprise at least one 5F1 5′ flanking region and at least one 3F1 3′ flanking region.

[0452] In one embodiment, the molecular scaffold may comprise at least one 5F7 5′ flanking region and at least one 3F5 3′ flanking region.

[0453] In one embodiment, the molecular scaffold may comprise at least one 5F3 5′ flanking region and at least one 3F1 3′ flanking region.

[0454] In one embodiment, the molecular scaffold may comprise at least one 5F4 5′ flanking region and at least one 3F4 3′ flanking region.

[0455] In one embodiment, the molecular scaffold may comprise at least one 5F5 5′ flanking region and at least one 3F4 3′ flanking region.

[0456] In one embodiment, the molecular scaffold may comprise at least one 5F6 5′ flanking region and at least one 3F1 3′ flanking region.

[0457] In one embodiment, the molecular scaffold may comprise at least one 5F2 5′ flanking region and at least one 3F3 3′ flanking region.

[0458] In one embodiment, the molecular scaffold may comprise at least one 5F3 5′ flanking region and at least one 3F4 3′ flanking region.

[0459] In one embodiment, the molecular scaffold may comprise at least one 5F1 5′ flanking region and at least one 3F2 3′ flanking region.

[0460] In one embodiment, the molecular scaffold may comprise at least one 5′ flanking region, fragment or variant thereof, at least one loop motif region, fragment or variant thereof, and at least one 3′ flanking region as described in Tables 7-9. As a non-limiting example, the flanking and loop motif regions may be 5F1, L1 and 3F1; 5F1, L1 and 3F2; 5F1, L1 and 3F3; 5F1, L1 and 3F4; 5F1, L1 and 3F5; 5F2, L1 and 3F1; 5F2, L1 and 3F2; 5F2, L1 and 3F3; 5F2, L1 and 3F4; 5F2, L1 and 3F5; 5F3, L1 and 3F3; 5F3, L1 and 3F2; 5F3, L1 and 3F3; 5F3, L1 and 3F4; 5F3, L1 and 3F5; 5F4, L1 and 3F4; 5F4, L1 and 3F2; 5F4, L1 and 3F3; 5F4, L1 and 3F4; 5F4, L1 and 3F5; 5F5, L1 and 3F1; 5F5, L1 and 3F2; 5F5, L1 and 3F3; 5F5, L1 and 3F4; 5F5, L1 and 3F5; 5F6, L1 and 3F1; 5F6, L1 and 3F2; 5F6, L1 and 3F3; 5F6, L1 and 3F4; 5F6, L1 and 3F5; 5F7, L1 and 3F1; 5F7, L1 and 3F2; 5F7, L1 and 3F3; 5F7, L1 and 3F4; 5F7, L1 and 3F5; 5F1, L2 and 3F1; 5F1, L2 and 3F2; 5F1, L2 and 3F3; 5F1, L2 and 3F4; 5F1, L2 and 3F5; 5F2, L2 and 3F1; 5F2, L2 and 3F2; 5F2, L2 and 3F3; 5F2, L2 and 3F4; 5F2, L2 and 3F5; 5F3, L2 and 3F1; 5F3, L2 and 3F2; 5F3, L2 and 3F3; 5F3, L2 and 3F4; 5F3, L2 and 3F5; 5F4, L2 and 3F1; 5F4, L2 and 3F2; 5F4, L2 and 3F3; 5F4, L2 and 3F4; 5F4, L2 and 3F5; 5F5, L2 and 3F1; 5F5, L2 and 3F2; 5F5, L2 and 3F3; 5F5, L2 and 3F4; 5F5, L2 and 3F5; 5F6, L2 and 3F1; 5F6, L2 and 3F2; 5F6, L2 and 3F3; 5F6, L2 and 3F4; 5F6, L2 and 3F5; 5F7, L2 and 3F1; 5F7, L2 and 3F2; 5F7, L2 and 3F3; 5F7, L2 and 3F4; 5F7, L2 and 3F5; 5F1, L3 and 3F1; 5F1, L3 and 3F2; 5F1, L3 and 3F3; 5F1, L3 and 3F4; 5F1, L3 and 3F5; 5F2, L3 and 3F1; 5F2, L3 and 3F2; 5F2, L3 and 3F3; 5F2, L3 and 3F4; 5F2, L3 and 3F5; 5F3, L3 and 3F1; 5F3, L3 and 3F2; 5F3, L3 and 3F3; 5F3, L3 and 3F4; 5F3, L3 and 3F5; 5F4, L3 and 3F1; 5F4, L3 and 3F2; 5F4, L3 and 3F3; 5F4, L3 and 3F4; 5F4, L3 and 3F5; 5F5, L3 and 3F1; 5F5, L3 and 3F2; 5F5, L3 and 3F3; 5F5, L3 and 3F4; 5F5, L3 and 3F5; 5F6, L3 and 3F1; 5F6, L3 and 3F2; 5F6, L3 and 3F3; 5F6, L3 and 3F4; 5F6, L3 and 3F5; 5F7, L3 and 3F1; 5F7, L3 and 3F2; 5F7, L3 and 3F3; 5F7, L3 and 3F4; 5F7, L3 and 3F5; 5F1, L4 and 3F1; 5F1, L4 and 3F2; 5F1, L4 and 3F3; 5F1, L4 and 3F4; 5F1, L4 and 3F5; 5F2, L4 and 3F1; 5F2, L4 and 3F2; 5F2, L4 and 3F3; 5F2, L4 and 3F4; 5F2, L4 and 3F5; 5F3, L4 and 3F4; 5F3, L4 and 3F2; 5F3, L4 and 3F3; 5F3, L4 and 3F4; 5F3, L4 and 3F5; 5F4, L4 and 3F1; 5F4, L4 and 3F2; 5F4, L4 and 3F3; 5F4, L4 and 3F4; 5F4, L4 and 3F5; 5F5, L4 and 3F1; 5F5, L4 and 3F2; 5F5, L4 and 3F3; 5F5, L4 and 3F4; 5F5, L4 and 3F5; 5F6, L4 and 3F1; 5F6, L4 and 3F2; 5F6, L4 and 3F3; 5F6, L4 and 3F4; 5F6, L4 and 3F5; 5F7, L4 and 3F1; 5F7, L4 and 3F2; 5F7, L4 and 3F3; 5F7, L4 and 3F4; 5F7, L4 and 3F5; 5F1, L5 and 3F1; 5F1, L5 and 3F2; 5F1, L5 and 3F3; 5F1, L5 and 3F4; 5F1, L5 and 3F5; 5F2, L5 and 3F1; 5F2, L5 and 3F2; 5F2, L5 and 3F3; 5F2, L5 and 3F4; 5F2, L5 and 3F5; 5F3, L5 and 3F1; 5F3, L5 and 3F2; 5F3, L5 and 3F3; 5F3, L5 and 3F4; 5F3, L5 and 3F5; 5F4, L5 and 3F1; 5F4, L5 and 3F2; 5F4, L5 and 3F3; 5F4, L5 and 3F4; 5F4, L5 and 3F5; 5F5, L5 and 3F1; 5F5, L5 and 3F2; 5F5, L5 and 3F3; 5F5, L5 and 3F4; 5F5, L5 and 3F5; 5F6, L5 and 3F1; 5F6, L5 and 3F2; 5F6, L5 and 3F3; 5F6, L5 and 3F4; 5F6, L5 and 3F5; 5F7, L5 and 3F1; 5F7, L5 and 3F2; 5F7, L5 and 3F3; 5F7, L5 and 3F4; 5F7, L5 and 3F5; 5F1, L6 and 3F1; 5F1, L6 and 3F2; 5F1, L6 and 3F3; 5F1, L6 and 3F4; 5F1, L6 and 3F5; 5F2, L6 and 3F1; 5F2, L6 and 3F2; 5F2, L6 and 3F3; 5F2, L6 and 3F4; 5F2, L6 and 3F5; 5F3, L6 and 3F1; 5F3, L6 and 3F2; 5F3, L6 and 3F3; 5F3, L6 and 3F4; 5F3, L6 and 3F5; 5F4, L6 and 3F1; 5F4, L6 and 3F2; 5F4, L6 and 3F3; 5F4, L6 and 3F4; 5F4, L6 and 3F5; 5F5, L6 and 3F1; 5F5, L6 and 3F2; 5F5, L6 and 3F3; 5F5, L6 and 3F4; 5F5, L6 and 3F5; 5F6, L6 and 3F1, 5F6, L6 and 3F2; 5F6, L6 and 3F3; 5F6, L6 and 3F4; 5F6, L6 and 3F5; 5F7, L6 and 3F1; 5F7, L6 and 3F2; 5F7, L6 and 3F3; 5F7, L6 and 3F4; 5F7, L6 and 3F5; 5F1, L7 and 3F3; 5F1, L7 and 3F2; 5F1, L7 and 3F3; 5F1, L7 and 3F4; 5F1, L7 and 3F5; 5F2, L7 and 3F1, 5F2, L7 and 3F2; 5F2, L7 and 3F3; 5F2, L7 and 3F4; 5F2, L7 and 3F5; 5F3, L7 and 3F1; 5F3, L7 and 3F2; 5F3, L7 and 3F3; 5F3, L7 and 3F4; 5F3, L7 and 3F5; 5F4, L7 and 3F1; 5F4, L7 and 3F2; 5F4, L7 and 3F3; 5F4, L7 and 3F4; 5F4, L7 and 3F5; 5F5, L7 and 3F1; 5F5, L7 and 3F2; 5F5, L7 and 3F3; 5F5, L7 and 3F4; 5F5, L7 and 3F5; 5F6, L7 and 3F1; 5F6, L7 and 3F2; 5F6, L7 and 3F3; 5F6, L7 and 3F4; 5F6, L7 and 3F5; 5F7, L7 and 3F1; 5F7, L7 and 3F2; 5F7, L7 and 3F3; 5F7, L7 and 3F4; 5F7, L7 and 3F5; 5F1, L8 and 3F1; 5F1, L8 and 3F2; 5F1, L8 and 3F3; 5F1, L8 and 3F4; 5F1, L8 and 3F5; 5F2, L8 and 3F1, 5F2, L8 and 3F2; 5F2, L8 and 3F3; 5F2, L8 and 3F4; 5F2, L8 and 3F5; 5F3, L8 and 3F1; 5F3, L8 and 3F2; 5F3, L8 and 3F3; 5F3, L8 and 3F4; 5F3, L8 and 3F5; 5F4, L8 and 3F1; 5F4, L8 and 3F2; 5F4, L8 and 3F3; 5F4, L8 and 3F4; 5F4, L8 and 3F5; 5F5, L8 and 3F1; 5F5, L8 and 3F2; 5F5, L8 and 3F3; 5F5, L8 and 3F4; 5F5, L8 and 3F5; 5F6, L8 and 3F1; 5F6, L8 and 3F2; 5F6, L8 and 3F3; 5F6, L8 and 3F4; 5F6, L8 and 3F5; 5F7, L8 and 3F1; 5F7, L8 and 3F2; 5F7, L8 and 3F3; 5F7, L8 and 3F4 and 5F7, L8 and 3F5.

[0461] In one embodiment, the molecular scaffold may comprise at least one 5F2 5′ flanking region, at least one L1 loop motif region, and at least one 3F2 3′ flanking region.

[0462] In one embodiment, the molecular scaffold may comprise at least one 5F1 5′ flanking region, at least one L4 loop motif region, and at least one 3F1 3′ flanking region.

[0463] In one embodiment, the molecular scaffold may comprise at least one 5F7 5′ flanking region, at least one L8 loop motif region, and at least one 3F5 3′ flanking region.

[0464] In one embodiment, the molecular scaffold may comprise at least one 5F3 5′ flanking region, at least one L4 loop motif region, and at least one 3F1 3′ flanking region.

[0465] In one embodiment, the molecular scaffold may comprise at least one 5F3 5′ flanking region, at least one L5 loop motif region, and at least one 3F1 3′ flanking region.

[0466] In one embodiment, the molecular scaffold may comprise at least one 5F4 5′ flanking region, at least one L4 loop motif region, and at least one 3F4 3′ flanking region.

[0467] In one embodiment, the molecular scaffold may comprise at least one 5F3 5′ flanking region, at least one L7 loop motif region, and at least one 3F1 3′ flanking region.

[0468] In one embodiment, the molecular scaffold may comprise at least one 5F5 5′ flanking region, at least one L4 loop motif region, and at least one 3F4 3′ flanking region.

[0469] In one embodiment, the molecular scaffold may comprise at least one 5F6 5′ flanking region, at least one L4 loop motif region, and at least one 3F1 3′ flanking region.

[0470] In one embodiment, the molecular scaffold may comprise at least one 5F3 5′ flanking region, at least one L6 loop motif region, and at least one 3F1 3′ flanking region.

[0471] In one embodiment, the molecular scaffold may comprise at least one 5F7 5′ flanking region, at least one L4 loop motif region, and at least one 3F5 3′ flanking region.

[0472] In one embodiment, the molecular scaffold may comprise at least one 5F2 5′ flanking region, at least one L2 loop motif region, and at least one 3F2 3′ flanking region.

[0473] In one embodiment, the molecular scaffold may comprise at least one 5F2 5′ flanking region, at least one L1 loop motif region, and at least one 3F3 3′ flanking region.

[0474] In one embodiment, the molecular scaffold may comprise at least one 5F3 5′ flanking region, at least one L5 loop motif region, and at least one 3F4 3′ flanking region.

[0475] In one embodiment, the molecular scaffold may comprise at least one 5F1 5′ flanking region, at least one L1 loop motif region, and at least one 3F1 3′ flanking region.

[0476] In one embodiment, the molecular scaffold may comprise at least one 5F1 5′ flanking region, at least one L2 loop motif region, and at least one 3F1 3′ flanking region.

[0477] In one embodiment, the molecular scaffold may comprise at least one 5F1 5′ flanking region, at least one L1 loop motif region, and at least one 3F2 3′ flanking region.

[0478] In one embodiment, the molecular scaffold may comprise at least one 5F2 5′ flanking region, at least one L3 loop motif region, and at least one 3F3 3′ flanking region.

[0479] In one embodiment, the molecular scaffold may be a natural pri-miRNA scaffold. As a non-limiting example, the molecular scaffold may be a scaffold derived from the human miR155 scaffold.

[0480] In one embodiment, the molecular scaffold may comprise one or more linkers known in the art. The linkers may separate regions or one molecular scaffold from another. As a non-limiting example, the molecular scaffold may be polycistronic.

Modulatory Polynucleotide Comprising Molecular Scaffold and siRNA Molecule

[0481] In one embodiment, the modulatory polynucleotide may comprise 5′ and 3′ flanking regions, loop motif region, and nucleic acid sequences encoding sense sequence and antisense sequence as described in Tables 10 and 11. In Tables 10 and 11, the DNA sequence identifier for the passenger and guide strands are described as well as the 5′ and 3′ Flanking Regions and the Loop region (also referred to as the linker region). In Tables 10 and 11, the “miR” component of the name of the sequence does not necessarily correspond to the sequence numbering of miRNA genes (e.g., VOYHTmiR-102 is the name of the sequence and does not necessarily mean that miR-102 is part of the sequence).

TABLE 10
Modulatory Polynucleotide Sequence Region (5′ to 3′)

| | 5′ Flanking | | | | | |
|---|---|---|---|---|---|---|
| Modulatory | to 3′ | | Passenger | | Guide | |
| Polynucleotide | Flanking | 5′ Flanking | SEQ ID | Loop SEQ | SEQ | 3′ Flanking |
| Construct Name | SEQ ID NO | SEQ ID NO | NO | ID NO | ID NO | SEQ ID NO |
| VOYHTmiR-102.214 | 1183 | 1161 | 1296 | 1168 | 1337 | 1178 |
| VOYHTmiR-104.214 | 1184 | 1161 | 1303 | 1168 | 1337 | 1178 |
| VOYHTmiR-109.214 | 1185 | 1161 | 1310 | 1169 | 1337 | 1178 |
| VOYHTmiR-114.214 | 1186 | 1161 | 1317 | 1168 | 1337 | 1179 |
| VOYHTmiR-116.214 | 1187 | 1161 | 1310 | 1168 | 1337 | 1179 |
| VOYHTmiR-127.214 | 1188 | 1162 | 1310 | 1170 | 1334 | 1180 |
| VOYHTmiR-102.218 | 1189 | 1161 | 1297 | 1168 | 1338 | 1178 |
| VOYHTmiR-104.218 | 1190 | 1161 | 1304 | 1168 | 1338 | 1178 |
| VOYHTmiR-109.218 | 1191 | 1161 | 1311 | 1169 | 1338 | 1178 |
| VOYHTmiR-114.218 | 1192 | 1161 | 1318 | 1168 | 1338 | 1179 |
| VOYHTmiR-116.218 | 1193 | 1161 | 1311 | 1168 | 1338 | 1179 |
| VOYHTmiR-127.218 | 1194 | 1162 | 1311 | 1170 | 1338 | 1180 |
| VOYHTmiR-102.219.o | 1195 | 1161 | 1280 | 1168 | 1333 | 1178 |
| VOYHTmiR-104.219.o | 1196 | 1161 | 1283 | 1168 | 1333 | 1178 |
| VOYHTmiR-109.219.o | 1197 | 1161 | 1280 | 1169 | 1333 | 1178 |
| VOYHTmiR-114.219 | 1198 | 1161 | 1286 | 1168 | 1333 | 1179 |
| VOYHTmiR-116.219.o | 1199 | 1161 | 1289 | 1168 | 1333 | 1179 |
| VOYHTmiR-127.219.o | 1200 | 1162 | 1280 | 1170 | 1333 | 1180 |
| VOYHTmiR-102.219.n | 1201 | 1161 | 1292 | 1168 | 1333 | 1178 |
| VOYHTmiR-104.219.n | 1202 | 1161 | 1293 | 1168 | 1333 | 1178 |
| VOYHTmiR-109.219.n | 1203 | 1161 | 1292 | 1169 | 1333 | 1178 |
| VOYHTmiR-116.219.n | 1204 | 1161 | 1294 | 1168 | 1333 | 1179 |
| VOYHTmiR-127.219.n | 1205 | 1162 | 1292 | 1170 | 1333 | 1180 |
| VOYHTmiR-102.257 | 1206 | 1161 | 1298 | 1168 | 1339 | 1178 |
| VOYHTmiR-104.257 | 1207 | 1161 | 1305 | 1168 | 1339 | 1178 |
| VOYHTmiR-109.257 | 1208 | 1161 | 1312 | 1169 | 1339 | 1178 |
| VOYHTmiR-114.257 | 1209 | 1161 | 1319 | 1168 | 1339 | 1179 |
| VOYHTmiR-116.257 | 1210 | 1161 | 1312 | 1168 | 1339 | 1179 |
| VOYHTmiR-127.257 | 1211 | 1162 | 1312 | 1170 | 1339 | 1180 |
| VOYHTmiR-102.894 | 1212 | 1161 | 1281 | 1168 | 1334 | 1178 |
| VOYHTmiR-104.894 | 1213 | 1161 | 1284 | 1168 | 1334 | 1178 |
| VOYHTmiR-109.894 | 1214 | 1161 | 1281 | 1169 | 1334 | 1178 |
| VOYHTmiR-114.894 | 1215 | 1161 | 1287 | 1168 | 1334 | 1179 |
| VOYHTmiR-116.894 | 1216 | 1161 | 1290 | 1168 | 1334 | 1179 |
| VOYHTmiR-127,894 | 1217 | 1162 | 1281 | 1170 | 1334 | 1180 |
| VOYHTmiR-102.907 | 1218 | 1161 | 1301 | 1168 | 1342 | 1178 |
| VOYHTmiR-104.907 | 1219 | 1161 | 1308 | 1168 | 1342 | 1178 |
| VOYHTmiR-109.907 | 1220 | 1161 | 1315 | 1169 | 1342 | 1178 |
| VOYHTmiR-114.907 | 1221 | 1161 | 1322 | 1168 | 1342 | 1179 |
| VOYHTmiR-116.907 | 1222 | 1161 | 1315 | 1168 | 1342 | 1179 |
| VOYHTmiR-127.907 | 1223 | 1162 | 1315 | 1170 | 1342 | 1180 |
| VOYHTmiR-102.372 | 1224 | 1161 | 1299 | 1168 | 1340 | 1178 |
| VOYHTmiR-104.372 | 1225 | 1161 | 1306 | 1168 | 1340 | 1178 |
| VOYHTmiR-109.372 | 1226 | 1161 | 1313 | 1169 | 1340 | 1178 |
| VOYHTmiR-114.372 | 1227 | 1161 | 1320 | 1168 | 1340 | 1179 |
| VOYHTmiR-116.372 | 1228 | 1161 | 1313 | 1168 | 1340 | 1179 |
| VOYHTmiR-127.372 | 1229 | 1162 | 1313 | 1170 | 1340 | 1180 |
| VOYHTmiR-102.425 | 1230 | 1161 | 1300 | 1168 | 1341 | 1178 |
| VOYHTmiR-104.425 | 1231 | 1161 | 1307 | 1168 | 1341 | 1178 |
| VOYHTmiR-109.425 | 1232 | 1161 | 1314 | 1169 | 1341 | 1178 |
| VOYHTmiR-114.425 | 1233 | 1161 | 1321 | 1168 | 1341 | 1179 |
| VOYHTmiR-116.425 | 1234 | 1161 | 1314 | 1168 | 1341 | 1179 |
| VOYHTmiR-127.425 | 1235 | 1162 | 1314 | 1170 | 1341 | 1180 |
| VOYHTmiR-102.032 | 1236 | 1161 | 1324 | 1168 | 1344 | 1178 |
| VOYHTmiR-104.032 | 1237 | 1161 | 1326 | 1168 | 1344 | 1178 |
| VOYHTmiR-109.032 | 1238 | 1161 | 1328 | 1169 | 1344 | 1178 |
| VOYHTmiR-114.032 | 1239 | 1161 | 1330 | 1168 | 1344 | 1179 |
| VOYHTmiR-116.032 | 1240 | 1161 | 1328 | 1168 | 1344 | 1179 |
| VOYHTmiR-127.032 | 1241 | 1162 | 1328 | 1170 | 1344 | 1180 |
| VOYHTmiR-102.020 | 1242 | 1161 | 1323 | 1168 | 1343 | 1178 |
| VOYHTmiR-104.020 | 1243 | 1161 | 1325 | 1168 | 1343 | 1178 |
| VOYHTmiR-109.020 | 1244 | 1161 | 1327 | 1169 | 1343 | 1178 |
| VOYHTmiR-114.020 | 1245 | 1161 | 1329 | 1168 | 1343 | 1179 |
| VOYHTmiR-116.020 | 1246 | 1161 | 1327 | 1168 | 1343 | 1179 |
| VOYHTmiR-127.020 | 1247 | 1162 | 1327 | 1170 | 1343 | 1180 |
| VOYHTmiR-102.016 | 1248 | 1161 | 1295 | 1168 | 1336 | 1178 |
| VOYHTmiR-104.016 | 1249 | 1161 | 1302 | 1168 | 1336 | 1178 |
| VOYHTmiR-109.016 | 1250 | 1161 | 1309 | 1169 | 1336 | 1178 |
| VOYHTmiR-114.016 | 1251 | 1161 | 1316 | 1168 | 1336 | 1179 |
| VOYHTmiR-116.016 | 1252 | 1161 | 1309 | 1168 | 1336 | 1179 |
| VOYHTmiR-127.016 | 1253 | 1162 | 1309 | 1170 | 1336 | 1180 |
| VOYHTmiR-102.579 | 1254 | 1161 | 1282 | 1168 | 1335 | 1178 |
| VOYHTmiR-104.579 | 1255 | 1161 | 1285 | 1168 | 1335 | 1178 |
| VOYHTmiR-109.579 | 1256 | 1161 | 1282 | 1169 | 1335 | 1178 |
| VOYHTmiR-114.579 | 1257 | 1161 | 1288 | 1168 | 1335 | 1179 |
| VOYHTmiR-116.579 | 1258 | 1161 | 1291 | 1168 | 1335 | 1179 |
| VOYHTmiR-127.579 | 1259 | 1162 | 1282 | 1170 | 1335 | 1180 |
| VOYHTmiR-104.579.1 | 1260 | 1161 | 1331 | 1171 | 1335 | 1178 |
| VOYHTmiR-104.579.2 | 1261 | 1163 | 1331 | 1171 | 1335 | 1178 |
| VOYHTmiR-104.579.3 | 1262 | 1163 | 1331 | 1172 | 1335 | 1178 |
| VOYHTmiR-104.579.4 | 1263 | 1164 | 1331 | 1171 | 1335 | 1181 |
| VOYHTmiR-104.579.6 | 1264 | 1165 | 1331 | 1171 | 1335 | 1181 |
| VOYHTmiR-104.579.7 | 1265 | 1166 | 1331 | 1171 | 1345 | 1178 |
| VOYHTmiR-104.579.8 | 1266 | 1163 | 1337 | 1173 | 1335 | 1178 |
| VOYHTmiR-104.579.9 | 1267 | 1167 | 1331 | 1171 | 1335 | 1182 |
| VOYHTmiR-102.020 | 1268 | 1161 | 1323 | 1168 | 1343 | 1178 |
| VOYHTmiR-102.032 | 1269 | 1161 | 1324 | 1168 | 1344 | 1178 |
| VOYHTmiR-104.020 | 1270 | 1161 | 1325 | 1168 | 1343 | 1178 |
| VOYHTmiR-104.032 | 1271 | 1161 | 1326 | 1168 | 1344 | 1178 |
| VOYHTmiR-109.020 | 1272 | 1161 | 1327 | 1169 | 1343 | 1178 |
| VOYHTmiR-109.032 | 1273 | 1161 | 1328 | 1169 | 1344 | 1178 |
| VOYHTmiR-114.020 | 1274 | 1161 | 1329 | 1168 | 1343 | 1179 |
| VOYHTmiR-114.032 | 1275 | 1161 | 1330 | 1168 | 1344 | 1179 |
| VOYHTmiR-116.020 | 1276 | 1161 | 1327 | 1168 | 1343 | 1179 |
| VOYHTmiR-116.032 | 1277 | 1161 | 1328 | 1168 | 1344 | 1179 |
| VOYHTmiR-127.020 | 1278 | 1162 | 1327 | 1170 | 1343 | 1180 |
| VOYHTmiR-127.032 | 1279 | 1162 | 1328 | 1170 | 1344 | 1180 |

TABLE 11
Modulatory Polynucleotide Sequence Region (5′ to 3′)

| | 5′ | | | | | |
|---|---|---|---|---|---|---|
| | Flanking | | | | | 3′ |
| | to 3′ | 5′ | | | | Flanking |
| | Flanking | Flanking | Guide | Loop | Passenger | SEQ |
| | SEQ ID | SEQ ID | SEQ | SEQ | SEQ ID | ID |
| Name | NO | NO | ID NO | ID NO | NO | NO |
| VOYHTmiR- | 1346 | 1163 | 1350 | 1174 | 1348 | 1178 |
| 104.579.5 | | | | | | |
| VOYHTmiR- | 1347 | 1167 | 1351 | 1175 | 1349 | 1182 |
| 104.579.10 | | | | | | |

### AAV Particles Comprising Modulatory Polynuclcotides

[0482] In one embodiment, the AAV particle comprises a viral genome with a payload region comprising a modulatory polynucleotide sequences. In such an embodiment, a viral genome encoding more than one polypeptide may be replicated and packaged into a viral particle. A target cell transduced with a viral particle comprising a modulatory polynucleotide may express the encoded sense and/or antisense sequences in a single cell.

[0483] In some embodiments, the AAV particles are useful in the field of medicine for the treatment, prophylaxis, palliation or amelioration of neurological diseases and/or disorders.

[0484] Non-limiting examples of ITR to ITR sequences of AAV particles comprising a viral genome with a payload region comprising a modulatory polynucleotide sequence are described in Table 12.

TABLE 12
ITR to ITR Sequences of AAV Particles comprising
Modulatory Polynucleotides

| ITR to ITR | ITR to ITR | Modulatory Polynucleotide |
|---|---|---|
| Construct Name | SEQ ID NO | SEQ ID NO |
| VOYHT1 | 1352 | 1262 |
| VOYHT2 | 1353 | 1262 |
| VOYHT3 | 1354 | 1250 |
| VOYHT4 | 1355 | 1347 |
| VOYHT5 | 1356 | 1262 |
| VOYHT6 | 1357 | 1262 |
| VOYHT7 | 1358 | 1250 |
| VOYHT8 | 1359 | 1347 |
| VOYHT9 | 1360 | 1262 |
| VOYHT10 | 1361 | 1262 |
| VOYHT11 | 1362 | 1250 |
| VOYHT12 | 1363 | 1347 |
| VOYHT13 | 1364 | 1262 |
| VOYHT14 | 1365 | 1249 |
| VOYHT15 | 1366 | 1259 |
| VOYHT16 | 1367 | 1249 |
| VOYHT17 | 1368 | 1262 |
| VOYHT18 | 1369 | 1262 |
| VOYHT19 | 1370 | 1262 |
| VOYHT20 | 1371 | 1262 |
| VOYHT21 | 1372 | 1262 |
| VOYHT22 | 1373 | 1262 |
| VOYHT23 | 1374 | 1262 |
| VOYHT24 | 1375 | 1262 |
| VOYHT25 | 1376 | 1249 |
| VOYHT26 | 1377 | 1262 |
| VOYHT27 | 1378 | 1259 |
| VOYHT28 | 1379 | 1249 |
| VOYHT35 | 1388 | 1255 |
| VOYHT36 | 1426 | 1248 |
| VOYHT37 | 1427 | 1231 |
| VOYHT38 | 1428 | 1219 |
| VOYHT39 | 1429 | 1207 |
| VOYHT40 | 1430 | 1250 |
| VOYHT41 | 1431 | 1251 |
| VOYHT42 | 1432 | 1252 |
| VOYHT43 | 1433 | 1253 |
| VOYHT44 | 1434 | 1194 |
| VOYHT45 | 1435 | 1223 |
| VOYHT46 | 1436 | 1211 |
| VOYHT47 | 1437 | 1262 |
| VOYHT48 | 1438 | 1347 |

[0485] In one embodiment, the AAV particle comprises a viral genome which comprises a sequence which has a percent identity to any of SEQ ID NOs: 1352-1379, 1388, and 1426-1438. The viral genome may have 1%, 2%, 3%, 4%, 5%, 6%, 7%, 8%, 9%, 10%, 15%, 20%, 25%, 30%, 35%, 40%, 45%, 50%, 55%, 60%, 65%, 70%, 75%, 80%, 85%, 90%, 95%, 99% or 100% identity to any of SEQ ID NOs: 1352-1379, 1388, and 1426-1438. The viral genome may have 1-10%, 10-20%, 30-40%, 50-60%, 50-70%, 50-80%, 50-90%, 50-99%, 50-100%, 60-70%, 60-80%, 60-90%, 60-99%, 60-100%, 70-80%, 70-90%, 70-99%, 70-100%, 80-85%, 80-90%, 80-95%, 80-99%, 80-100%, 90-95%, 90-99%, or 90-100% to any of SEQ ID NOs: 1352-1379, 1388, and 1426-1438. As a non-limiting example, the viral genome comprises a sequence which as 80% identity to any of SEQ ID NO: 1352-1379, 1388, and 1426-1438. As another non-limiting example, the viral genome comprises a sequence which as 85% identity to any of SEQ ID NO: 1352-1379, 1388, and 1426-1438. As another non-limiting example, the viral genome comprises a sequence which as 90% identity to any of SEQ ID NO: 1352-1379, 1388, and 1426-1438. As another non-limiting example, the viral genome comprises a sequence which as 95% identity to any of SEQ ID NO: 1352-1379, 1388, and 1426-1438. As another non-limiting example, the viral genome comprises a sequence which as 99% identity to any of SEQ ID NO: 1352-1379, 1388, and 1426-1438.

[0486] In one embodiment, the AAV particles comprising modulatory polynucleotide sequence which comprises a nucleic acid sequence encoding at least one siRNA molecule may be introduced into mammalian cells.

[0487] Where the AAV particle payload region comprises a modulatory polynucleotide, the modulatory polynucleotide may comprise sense and/or antisense sequences to knock down a target gene. The AAV viral genomes encoding modulatory polynucleotides described herein may be useful in the fields of human disease, viruses, infections veterinary applications and a variety of in vivo and in vitro settings.

[0488] In one embodiment, the AAV particle viral genome may comprise at least one inverted terminal repeat (ITR) region. The ITR region(s) may, independently, have a length such as, but not limited to, 75, 76, 77, 78, 79, 80, 81, 82, 83, 84, 85, 86, 87, 88, 89, 90, 91, 92, 93, 94, 95, 96, 97, 98, 99, 100, 101, 102, 103, 104, 105, 106, 107, 108, 109, 110, 111, 112, 113, 114, 115, 116, 117, 118, 119, 120, 121, 122, 123, 124, 125, 126, 127, 128, 129, 130, 131, 132, 133, 134, 135, 136, 137, 138, 139, 140, 141, 142, 143, 144, 145, 146, 147, 148, 149, 150, 151, 152, 153, 154, 155, 156, 157, 158, 159, 160, 161, 162, 163, 164, 165, 166, 167, 168, 169, 170, 171, 172, 173, 174, and 175 nucleotides. The length of the ITR region for the viral genome may be 75-80, 75-85, 75-100, 80-85, 80-90, 80-105, 85-90, 85-95, 85-110, 90-95, 90-100, 90-115, 95-100, 95-105, 95-120, 100-105, 100-110, 100-125, 105-110, 105-115, 105-130, 110-115, 110-120, 110-135, 115-120, 115-125, 115-140, 120-125, 120-130, 120-145, 125-130, 125-135, 125-150, 130-135, 130-140, 130-155, 135-140, 135-145, 135-160, 140-145, 140-150, 140-165, 145-150, 145-155, 145-170, 150-155, 150-160, 150-175, 155-160, 155-165, 160-165, 160-170, 165-170, 165-175, and 170-175 nucleotides. As a non-limiting example, the viral genome comprises an ITR that is about 105 nucleotides in length. As a non-limiting example, the viral genome comprises an ITR that is about 141 nucleotides in length. As a non-limiting example, the viral genome comprises an ITR that is about 130 nucleotides in length.

[0489] In one embodiment, the AAV particle viral genome may comprises two inverted terminal repeat (ITR) regions. Each of the ITR regions may independently have a length such as, but not limited to, 75, 76, 77, 78, 79, 80, 81, 82, 83, 84, 85, 86, 87, 88, 89, 90, 91, 92, 93, 94, 95, 96, 97, 98, 99, 100, 101, 102, 103, 104, 105, 106, 107, 108, 109, 110, 111, 112, 113, 114, 115, 116, 117, 118, 119, 120, 121, 122, 123, 124, 125, 126, 127, 128, 129, 130, 131, 132, 133, 134, 135, 136, 137, 138, 139, 140, 141, 142, 143, 144, 145, 146, 147, 148, 149, 150, 151, 152, 153, 154, 155, 156, 157, 158, 159, 160, 161, 162, 163, 164, 165, 166, 167, 168, 169, 170, 171, 172, 173, 174, and 175 nucleotides. The length of the ITR regions for the viral genome may be 75-80, 75-85, 75-100, 80-85, 80-90, 80-105, 85-90, 85-95, 85-110, 90-95, 90-100, 90-115, 95-100, 95-105, 95-120, 100-105, 100-110, 100-125, 105-110, 105-115, 105-130, 110-115, 110-120, 110-135, 115-120, 115-125, 115-140, 120-125, 120-130, 120-145, 125-130, 125-135, 125-150, 130-135, 130-140, 130-155, 135-140, 135-145, 135-160, 140-145, 140-150, 140-165, 145-150, 145-155, 145-170, 150-155, 150-160, 150-175, 155-160, 155-165, 160-165, 160-170, 165-170, 165-175, and 170-175 nucleotides. As a non-limiting example, the viral genome comprises an ITR that is about 105 nucleotides in length and 141 nucleotides in length. As a non-limiting example, the viral genome comprises an ITR that is about 105 nucleotides in length and 130 nucleotides in length. As a non-limiting example, the viral genome comprises an ITR that is about 130 nucleotides in length and 141 nucleotides in length.

[0490] In one embodiment, the AAV particle viral genome may comprise at least one sequence region as described in Tables 13-20. The regions may be located before or after any of the other sequence regions described herein.

[0491] In one embodiment, the AAV particle viral genome comprises at least one inverted terminal repeat (ITR) sequence region. Non-limiting examples of ITR sequence regions are described in Table 13.

TABLE 13
Inverted Terminal Repeat (ITR) Sequence Regions

| Sequence Region | |
|---|---|
| Name | SEQ ID NO |
| ITR1 | 1380 |
| ITR2 | 1381 |
| ITR3 | 1382 |
| ITR4 | 1383 |

[0492] In one embodiment, the AAV particle viral genome comprises two ITR sequence regions. In one embodiment, the ITR sequence regions are the ITR1 sequence region and the ITR3 sequence region. In one embodiment, the ITR sequence regions are the ITR1 sequence region and the ITR4 sequence region. In one embodiment, the ITR sequence regions are the ITR2 sequence region and the ITR3 sequence region. In one embodiment, the ITR sequence regions are the ITR2 sequence region and the ITR4 sequence region.

[0493] In one embodiment, the AAV particle viral genome may comprise at least one multiple cloning site (MCS) sequence region. The MCS region(s) may, independently, have a length such as, but not limited to, 2, 3, 4, 5, 6, 7, 8, 9, 10, 11, 12, 13, 14, 15, 16, 17, 18, 19, 20, 21, 22, 23, 24, 25, 26, 27, 28, 29, 30, 31, 32, 33, 34, 35, 36, 37, 38, 39, 40, 41, 42, 43, 44, 45, 46, 47, 48, 49, 50, 51, 52, 53, 54, 55, 56, 57, 58, 59, 60, 61, 62, 63, 64, 65, 66, 67, 68, 69, 70, 71, 72, 73, 74, 75, 76, 77, 78, 79, 80, 81, 82, 83, 84, 85, 86, 87, 88, 89, 90, 91, 92, 93, 94, 95, 96, 97, 98, 99, 100, 101, 102, 103, 104, 105, 106, 107, 108, 109, 110, 111, 112, 113, 114, 115, 116, 117, 118, 119, 120, 121, 122, 123, 124, 125, 126, 127, 128, 129, 130, 131, 132, 133, 134, 135, 136, 137, 138, 139, 140, 141, 142, 143, 144, 145, 146, 147, 148, 149, and 150 nucleotides. The length of the MCS region for the viral genome may be 2-10, 5-10, 5-15, 10-20, 10-30, 10-40, 15-20, 15-25, 20-30, 20-40, 20-50, 25-30, 25-35, 30-40, 30-50, 30-60, 35-40, 35-45, 40-50, 40-60, 40-70, 45-50, 45-55, 50-60, 50-70, 50-80, 55-60, 55-65, 60-70, 60-80, 60-90, 65-70, 65-75, 70-80, 70-90, 70-100, 75-80, 75-85, 80-90, 80-100, 80-110, 85-90, 85-95, 90-100, 90-110, 90-120, 95-100, 95-105, 100-110, 100-120, 100-130, 105-110, 105-115, 110-120, 110-130, 110-140, 115-120, 115-125, 120-130, 120-140, 120-150, 125-130, 125-135, 130-140, 130-150, 135-140, 135-145, 140-150, and 145-150 nucleotides. As a non-limiting example, the viral genome comprises a MCS region that is about 5 nucleotides in length. As a non-limiting example, the viral genome comprises a MCS region that is about 10 nucleotides in length. As a non-limiting example, the viral genome comprises a MCS region that is about 14 nucleotides in length. As a non-limiting example, the viral genome comprises a MCS region that is about 18 nucleotides in length. As a non-limiting example, the viral genome comprises a MCS region that is about 73 nucleotides in length. As a non-limiting example, the viral genome comprises a MCS region that is about 121 nucleotides in length.

[0494] In one embodiment, the AAV particle viral genome comprises at least one multiple cloning site (MCS) sequence regions. Non-limiting examples of MCS sequence regions are described in Table 14.

TABLE 14
Multiple Cloning Site (MCS) Sequence Regions

| Sequence Region | SEQ ID NO or |
|---|---|
| Name | Sequence |
| MCS1 | 1384 |
| MCS2 | 1385 |
| MCS3 | 1386 |
| MCS4 | 1387 |
| MCS5 | TCGAG |
| MCS6 | 1389 |

[0495] In one embodiment, the AAV particle vi genome comprises one CS sequence region. In one embodiment, the MCS sequence region is the MCS1 sequence region. In one embodiment, the MCS sequence region is the MCS2 sequence region. In one embodiment, the MCS sequence region is the MCS3 sequence region. In one embodiment, the MCS sequence region is the MCS4 sequence region. In one embodiment, the MCS sequence region is the MCS5 sequence region. In one embodiment, the MCS sequence region is the MCS6 sequence region.

[0496] In one embodiment, the AAV particle viral genome comprises two MCS sequence regions. In one embodiment, the two MCS sequence regions are the MCS1 sequence region and the MCS2 sequence region. In one embodiment, the two MCS sequence regions are the MCS1 sequence region and the MCS3 sequence region. In one embodiment, the two MCS sequence regions are the MCS1 sequence region and the MCS4 sequence region. In one embodiment, the two MCS sequence regions are the MCS1 sequence region and the MCS5 sequence region. In one embodiment, the two MCS sequence regions are the MCS1 sequence region and the MCS6 sequence region. In one embodiment, the two MCS sequence regions are the MCS2 sequence region and the MCS3 sequence region. In one embodiment, the two MCS sequence regions are the MCS2 sequence region and the MCS4 sequence region. In one embodiment, the two MCS sequence regions are the MCS2 sequence region and the MCS5 sequence region. In one embodiment, the two MCS sequence regions are the MCS2 sequence region and the MCS6 sequence region. In one embodiment, the two MCS sequence regions are the MCS3 sequence region and the MCS4 sequence region. In one embodiment, the two MCS sequence regions are the MCS3 sequence region and the MCS5 sequence region. In one embodiment, the two MCS sequence regions are the MCS3 sequence region and the MCS6 sequence region. In one embodiment, the two MCS sequence regions are the MCS4 sequence region and the MCS5 sequence region. In one embodiment, the two MCS sequence regions are the MCS4 sequence region and the MCS6 sequence region. In one embodiment, the two MCS sequence regions are the MCS5 sequence region and the MCS6 sequence region.

[0497] In one embodiment, the AAV particle viral genome comprises two or more MCS sequence regions.

[0498] In one embodiment, the AAV particle viral genome comprises three MCS sequence regions. In one embodiment, the three MCS sequence regions are the MCS1 sequence region, the MCS2 sequence region, and the MCS3 sequence region. In one embodiment, the three MCS sequence regions are the MCS1 sequence region, the MCS2 sequence region, and the MCS4 sequence region. In one embodiment, the three MCS sequence regions are the MCS1 sequence region, the MCS2 sequence region, and the MCS5 sequence region. In one embodiment, the three MCS sequence regions are the MCS1 sequence region, the MCS2 sequence region, and the MCS6 sequence region. In one embodiment, the three MCS sequence regions are the MCS1 sequence region, the MCS3 sequence region, and the MCS4 sequence region. In one embodiment, the three MCS sequence regions are the MCS1 sequence region, the MCS3 sequence region, and the MCS5 sequence region. In one embodiment, the three MCS sequence regions are the MCS1 sequence region, the MCS3 sequence region, and the MCS6 sequence region. In one embodiment, the three MCS sequence regions are the MCS1 sequence region, the MCS4 sequence region, and the MCS5 sequence region. In one embodiment, the three MCS sequence regions are the MCS1 sequence region, the MCS4 sequence region, and the MCS6 sequence region. In one embodiment, the three MCS sequence regions are the MCS1 sequence region, the MCS5 sequence region, and the MCS6 sequence region. In one embodiment, the three MCS sequence regions are the MCS2 sequence region, the MCS3 sequence region, and the MCS4 sequence region. In one embodiment, the three MCS sequence regions are the MCS2 sequence region, the MCS3 sequence region, and the MCS5 sequence region. In one embodiment, the three MCS sequence regions are the MCS2 sequence region, the MCS3 sequence region, and the MCS6 sequence region. In one embodiment, the three MCS sequence regions are the MCS2 sequence region, the MCS4 sequence region, and the MCS5 sequence region. In one embodiment, the three MCS sequence regions are the MCS2 sequence region, the MCS4 sequence region, and the MCS6 sequence region. In one embodiment, the three MCS sequence regions are the MCS2 sequence region, the MCS5 sequence region, and the MCS6 sequence region. In one embodiment, the three MCS sequence regions are the MCS3 sequence region, the MCS4 sequence region, and the MCS5 sequence region. In one embodiment, the three MCS sequence regions are the MCS3 sequence region, the MCS4 sequence region, and the MCS6 sequence region. In one embodiment, the three MCS sequence regions are the MCS3 sequence region, the MCS5 sequence region, and the MCS6 sequence region. In one embodiment, the three MCS sequence regions are the MCS4 sequence region, the MCS5 sequence region, and the MCS6 sequence region.

[0499] In one embodiment, the AAV particle viral genome may comprise at least one multiple filler sequence region. The filler region(s) may, independently, have a length such as, but not limited to, 50, 51, 52, 53, 54, 55, 56, 57, 58, 59, 60, 61, 62, 63, 64, 65, 66, 67, 68, 69, 70, 71, 72, 73, 74, 75, 76, 77, 78, 79, 80, 81, 82, 83, 84, 85, 86, 87, 88, 89, 90, 91, 92, 93, 94, 95, 96, 97, 98, 99, 100, 101, 102, 103, 104, 105, 106, 107, 108, 109, 110, 111, 112, 113, 114, 115, 116, 117, 118, 119, 120, 121, 122, 123, 124, 125, 126, 127, 128, 129, 130, 131, 132, 133, 134, 135, 136, 137, 138, 139, 140, 141, 142, 143, 144, 145, 146, 147, 148, 149, 150, 151, 152, 153, 154, 155, 156, 157, 158, 159, 160, 161, 162, 163, 164, 165, 166, 167, 168, 169, 170, 171, 172, 173, 174, 175, 176, 177, 178, 179, 180, 181, 182, 183, 184, 185, 186, 187, 188, 189, 190, 191, 192, 193, 194, 195, 196, 197, 198, 199, 200, 201, 202, 203, 204, 205, 206, 207, 208, 209, 210, 211, 212, 213, 214, 215, 216, 217, 218, 219, 220, 221, 222, 223, 224, 225, 226, 227, 228, 229, 230, 231, 232, 233, 234, 235, 236, 237, 238, 239, 240, 241, 242, 243, 244, 245, 246, 247, 248, 249, 250, 251, 252, 253, 254, 255, 256, 257, 258, 259, 260, 261, 262, 263, 264, 265, 266, 267, 268, 269, 270, 271, 272, 273, 274, 275, 276, 277, 278, 279, 280, 281, 282, 283, 284, 285, 286, 287, 288, 289, 290, 291, 292, 293, 294, 295, 296, 297, 298, 299, 300, 301, 302, 303, 304, 305, 306, 307, 308, 309, 310, 311, 312, 313, 314, 315, 316, 317, 318, 319, 320, 321, 322, 323, 324, 325, 326, 327, 328, 329, 330, 331, 332, 333, 334, 335, 336, 337, 338, 339, 340, 341, 342, 343, 344, 345, 346, 347, 348, 349, 350, 351, 352, 353, 354, 355, 356, 357, 358, 359, 360, 361, 362, 363, 364, 365, 366, 367, 368, 369, 370, 371, 372, 373, 374, 375, 376, 377, 378, 379, 380, 381, 382, 383, 384, 385, 386, 387, 388, 389, 390, 391, 392, 393, 394, 395, 396, 397, 398, 399, 400, 401, 402, 403, 404, 405, 406, 407, 408, 409, 410, 411, 412, 413, 414, 415, 416, 417, 418, 419, 420, 421, 422, 423, 424, 425, 426, 427, 428, 429, 430, 431, 432, 433, 434, 435, 436, 437, 438, 439, 440, 441, 442, 443, 444, 445, 446, 447, 448, 449, 450, 451, 452, 453, 454, 455, 456, 457, 458, 459, 460, 461, 462, 463, 464, 465, 466, 467, 468, 469, 470, 471, 472, 473, 474, 475, 476, 477, 478, 479, 480, 481, 482, 483, 484, 485, 486, 487, 488, 489, 490, 491, 492, 493, 494, 495, 496, 497, 498, 499, 500, 501, 502, 503, 504, 505, 506, 507, 508, 509, 510, 511, 512, 513, 514, 515, 516, 517, 518, 519, 520, 521, 522, 523, 524, 525, 526, 527, 528, 529, 530, 531, 532, 533, 534, 535, 536, 537, 538, 539, 540, 541, 542, 543, 544, 545, 546, 547, 548, 549, 550, 551, 552, 553, 554, 555, 556, 557, 558, 559, 560, 561, 562, 563, 564, 565, 566, 567, 568, 569, 570, 571, 572, 573, 574, 575, 576, 577, 578, 579, 580, 581, 582, 583, 584, 585, 586, 587, 588, 589, 590, 591, 592, 593, 594, 595, 596, 597, 598, 599, 600, 601, 602, 603, 604, 605, 606, 607, 608, 609, 610, 611, 612, 613, 614, 615, 616, 617, 618, 619, 620, 621, 622, 623, 624, 625, 626, 627, 628, 629, 630, 631, 632, 633, 634, 635, 636, 637, 638, 639, 640, 641, 642, 643, 644, 645, 646, 647, 648, 649, 650, 651, 652, 653, 654, 655, 656, 657, 658, 659, 660, 661, 662, 663, 664, 665, 666, 667, 668, 669, 670, 671, 672, 673, 674, 675, 676, 677, 678, 679, 680, 681, 682, 683, 684, 685, 686, 687, 688, 689, 690, 691, 692, 693, 694, 695, 696, 697, 698, 699, 700, 701, 702, 703, 704, 705, 706, 707, 708, 709, 710, 711, 712, 713, 714, 715, 716, 717, 718, 719, 720, 721, 722, 723, 724, 725, 726, 727, 728, 729, 730, 731, 732, 733, 734, 735, 736, 737, 738, 739, 740, 741, 742, 743, 744, 745, 746, 747, 748, 749, 750, 751, 752, 753, 754, 755, 756, 757, 758, 759, 760, 761, 762, 763, 764, 765, 766, 767, 768, 769, 770, 771, 772, 773, 774, 775, 776, 777, 778, 779, 780, 781, 782, 783, 784, 785, 786, 787, 788, 789, 790, 791, 792, 793, 794, 795, 796, 797, 798, 799, 800, 801, 802, 803, 804, 805, 806, 807, 808, 809, 810, 811, 812, 813, 814, 815, 816, 817, 818, 819, 820, 821, 822, 823, 824, 825, 826, 827, 828, 829, 830, 831, 832, 833, 834, 835, 836, 837, 838, 839, 840, 841, 842, 843, 844, 845, 846, 847, 848, 849, 850, 851, 852, 853, 854, 855, 856, 857, 858, 859, 860, 861, 862, 863, 864, 865, 866, 867, 868, 869, 870, 871, 872, 873, 874, 875, 876, 877, 878, 879, 880, 881, 882, 883, 884, 885, 886, 887, 888, 889, 890, 891, 892, 893, 894, 895, 896, 897, 898, 899, 900, 901, 902, 903, 904, 905, 906, 907, 908, 909, 910, 911, 912, 913, 914, 915, 916, 917, 918, 919, 920, 921, 922, 923, 924, 925, 926, 927, 928, 929, 930, 931, 932, 933, 934, 935, 936, 937, 938, 939, 940, 941, 942, 943, 944, 945, 946, 947, 948, 949, 950, 951, 952, 953, 954, 955, 956, 957, 958, 959, 960, 961, 962, 963, 964, 965, 966, 967, 968, 969, 970, 971, 972, 973, 974, 975, 976, 977, 978, 979, 980, 981, 982, 983, 984, 985, 986, 987, 988, 989, 990, 991, 992, 993, 994, 995, 996, 997, 998, 999, 1000, 1001, 1002, 1003, 1004, 1005, 1006, 1007, 1008, 1009, 1010, 1011, 1012, 1013, 1014, 1015, 1016, 1017, 1018, 1019, 1020, 1021, 1022, 1023, 1024, 1025, 1026, 1027, 1028, 1029, 1030, 1031, 1032, 1033, 1034, 1035, 1036, 1037, 1038, 1039, 1040, 1041, 1042, 1043, 1044, 1045, 1046, 1047, 1048, 1049, 1050, 1051, 1052, 1053, 1054, 1055, 1056, 1057, 1058, 1059, 1060, 1061, 1062, 1063, 1064, 1065, 1066, 1067, 1068, 1069, 1070, 1071, 1072, 1073, 1074, 1075, 1076, 1077, 1078, 1079, 1080, 1081, 1082, 1083, 1084, 1085, 1086, 1087, 1088, 1089, 1090, 1091, 1092, 1093, 1094, 1095, 1096, 1097, 1098, 1099, 1100, 1101, 1102, 1103, 1104, 1105, 1106, 1107, 1108, 1109, 1110, 1111, 1112, 1113, 1114, 1115, 1116, 1117, 1118, 1119, 1120, 1121, 1122, 1123, 1124, 1125, 1126, 1127, 1128, 1129, 1130, 1131, 1132, 1133, 1134, 1135, 1136, 1137, 1138, 1139, 1140, 1141, 1142, 1143, 1144, 1145, 1146, 1147, 1148, 1149, 1150, 1151, 1152, 1153, 1154, 1155, 1156, 1157, 1158, 1159, 1160, 1161, 1162, 1163, 1164, 1165, 1166, 1167, 1168, 1169, 1170, 1171, 1172, 1173, 1174, 1175, 1176, 1177, 1178, 1179, 1180, 1181, 1182, 1183, 1184, 1185, 1186, 1187, 1188, 1189, 1190, 1191, 1192, 1193, 1194, 1195, 1196, 1197, 1198, 1199, 1200, 1201, 1202, 1203, 1204, 1205, 1206, 1207, 1208, 1209, 1210, 1211, 1212, 1213, 1214, 1215, 1216, 1217, 1218, 1219, 1220, 1221, 1222, 1223, 1224, 1225, 1226, 1227, 1228, 1229, 1230, 1231, 1232, 1233, 1234, 1235, 1236, 1237, 1238, 1239, 1240, 1241, 1242, 1243, 1244, 1245, 1246, 1247, 1248, 1249, 1250, 1251, 1252, 1253, 1254, 1255, 1256, 1257, 1258, 1259, 1260, 1261, 1262, 1263, 1264, 1265, 1266, 1267, 1268, 1269, 1270, 1271, 1272, 1273, 1274, 1275, 1276, 1277, 1278, 1279, 1280, 1281, 1282, 1283, 1284, 1285, 1286, 1287, 1288, 1289, 1290, 1291, 1292, 1293, 1294, 1295, 1296, 1297, 1298, 1299, 1300, 1301, 1302, 1303, 1304, 1305, 1306, 1307, 1308, 1309, 1310, 1311, 1312, 1313, 1314, 1315, 1316, 1317, 1318, 1319, 1320, 1321, 1322, 1323, 1324, 1325, 1326, 1327, 1328, 1329, 1330, 1331, 1332, 1333, 1334, 1335, 1336, 1337, 1338, 1339, 1340, 1341, 1342, 1343, 1344, 1345, 1346, 1347, 1348, 1349, 1350, 1351, 1352, 1353, 1354, 1355, 1356, 1357, 1358, 1359, 1360, 1361, 1362, 1363, 1364, 1365, 1366, 1367, 1368, 1369, 1370, 1371, 1372, 1373, 1374, 1375, 1376, 1377, 1378, 1379, 1380, 1381, 1382, 1383, 1384, 1385, 1386, 1387, 1388, 1389, 1390, 1391, 1392, 1393, 1394, 1395, 1396, 1397, 1398, 1399, 1400, 1401, 1402, 1403, 1404, 1405, 1406, 1407, 1408, 1409, 1410, 1411, 1412, 1413, 1414, 1415, 1416, 1417, 1418, 1419, 1420, 1421, 1422, 1423, 1424, 1425, 1426, 1427, 1428, 1429, 1430, 1431, 1432, 1433, 1434, 1435, 1436, 1437, 1438, 1439, 1440, 1441, 1442, 1443, 1444, 1445, 1446, 1447, 1448, 1449, 1450, 1451, 1452, 1453, 1454, 1455, 1456, 1457, 1458, 1459, 1460, 1461, 1462, 1463, 1464, 1465, 1466, 1467, 1468, 1469, 1470, 1471, 1472, 1473, 1474, 1475, 1476, 1477, 1478, 1479, 1480, 1481, 1482, 1483, 1484, 1485, 1486, 1487, 1488, 1489, 1490, 1491, 1492, 1493, 1494, 1495, 1496, 1497, 1498, 1499, 1500, 1501, 1502, 1503, 1504, 1505, 1506, 1507, 1508, 1509, 1510, 1511, 1512, 1513, 1514, 1515, 1516, 1517, 1518, 1519, 1520, 1521, 1522, 1523, 1524, 1525, 1526, 1527, 1528, 1529, 1530, 1531, 1532, 1533, 1534, 1535, 1536, 1537, 1538, 1539, 1540, 1541, 1542, 1543, 1544, 1545, 1546, 1547, 1548, 1549, 1550, 1551, 1552, 1553, 1554, 1555, 1556, 1557, 1558, 1559, 1560, 1561, 1562, 1563, 1564, 1565, 1566, 1567, 1568, 1569, 1570, 1571, 1572, 1573, 1574, 1575, 1576, 1577, 1578, 1579, 1580, 1581, 1582, 1583, 1584, 1585, 1586, 1587, 1588, 1589, 1590, 1591, 1592, 1593, 1594, 1595, 1596, 1597, 1598, 1599, 1600, 1601, 1602, 1603, 1604, 1605, 1606, 1607, 1608, 1609, 1610, 1611, 1612, 1613, 1614, 1615, 1616, 1617, 1618, 1619, 1620, 1621, 1622, 1623, 1624, 1625, 1626, 1627, 1628, 1629, 1630, 1631, 1632, 1633, 1634, 1635, 1636, 1637, 1638, 1639, 1640, 1641, 1642, 1643, 1644, 1645, 1646, 1647, 1648, 1649, 1650, 1651, 1652, 1653, 1654, 1655, 1656, 1657, 1658, 1659, 1660, 1661, 1662, 1663, 1664, 1665, 1666, 1667, 1668, 1669, 1670, 1671, 1672, 1673, 1674, 1675, 1676, 1677, 1678, 1679, 1680, 1681, 1682, 1683, 1684, 1685, 1686, 1687, 1688, 1689, 1690, 1691, 1692, 1693, 1694, 1695, 1696, 1697, 1698, 1699, 1700, 1701, 1702, 1703, 1704, 1705, 1706, 1707, 1708, 1709, 1710, 1711, 1712, 1713, 1714, 1715, 1716, 1717, 1718, 1719, 1720, 1721, 1722, 1723, 1724, 1725, 1726, 1727, 1728, 1729, 1730, 1731, 1732, 1733, 1734, 1735, 1736, 1737, 1738, 1739, 1740, 1741, 1742, 1743, 1744, 1745, 1746, 1747, 1748, 1749, 1750, 1751, 1752, 1753, 1754, 1755, 1756, 1757, 1758, 1759, 1760, 1761, 1762, 1763, 1764, 1765, 1766, 1767, 1768, 1769, 1770, 1771, 1772, 1773, 1774, 1775, 1776, 1777, 1778, 1779, 1780, 1781, 1782, 1783, 1784, 1785, 1786, 1787, 1788, 1789, 1790, 1791, 1792, 1793, 1794, 1795, 1796, 1797, 1798, 1799, 1800, 1801, 1802, 1803, 1804, 1805, 1806, 1807, 1808, 1809, 1810, 1811, 1812, 1813, 1814, 1815, 1816, 1817, 1818, 1819, 1820, 1821, 1822, 1823, 1824, 1825, 1826, 1827, 1828, 1829, 1830, 1831, 1832, 1833, 1834, 1835, 1836, 1837, 1838, 1839, 1840, 1841, 1842, 1843, 1844, 1845, 1846, 1847, 1848, 1849, 1850, 1851, 1852, 1853, 1854, 1855, 1856, 1857, 1858, 1859, 1860, 1861, 1862, 1863, 1864, 1865, 1866, 1867, 1868, 1869, 1870, 1871, 1872, 1873, 1874, 1875, 1876, 1877, 1878, 1879, 1880, 1881, 1882, 1883, 1884, 1885, 1886, 1887, 1888, 1889, 1890, 1891, 1892, 1893, 1894, 1895, 1896, 1897, 1898, 1899, 1900, 1901, 1902, 1903, 1904, 1905, 1906, 1907, 1908, 1909, 1910, 1911, 1912, 1913, 1914, 1915, 1916, 1917, 1918, 1919, 1920, 1921, 1922, 1923, 1924, 1925, 1926, 1927, 1928, 1929, 1930, 1931, 1932, 1933, 1934, 1935, 1936, 1937, 1938, 1939, 1940, 1941, 1942, 1943, 1944, 1945, 1946, 1947, 1948, 1949, 1950, 1951, 1952, 1953, 1954, 1955, 1956, 1957, 1958, 1959, 1960, 1961, 1962, 1963, 1964, 1965, 1966, 1967, 1968, 1969, 1970, 1971, 1972, 1973, 1974, 1975, 1976, 1977, 1978, 1979, 1980, 1981, 1982, 1983, 1984, 1985, 1986, 1987, 1988, 1989, 1990, 1991, 1992, 1993, 1994, 1995, 1996, 1997, 1998, 1999, 2000, 2001, 2002, 2003, 2004, 2005, 2006, 2007, 2008, 2009, 2010, 2011, 2012, 2013, 2014, 2015, 2016, 2017, 2018, 2019, 2020, 2021, 2022, 2023, 2024, 2025, 2026, 2027, 2028, 2029, 2030, 2031, 2032, 2033, 2034, 2035, 2036, 2037, 2038, 2039, 2040, 2041, 2042, 2043, 2044, 2045, 2046, 2047, 2048, 2049, 2050, 2051, 2052, 2053, 2054, 2055, 2056, 2057, 2058, 2059, 2060, 2061, 2062, 2063, 2064, 2065, 2066, 2067, 2068, 2069, 2070, 2071, 2072, 2073, 2074, 2075, 2076, 2077, 2078, 2079, 2080, 2081, 2082, 2083, 2084, 2085, 2086, 2087, 2088, 2089, 2090, 2091, 2092, 2093, 2094, 2095, 2096, 2097, 2098, 2099, 2100, 2101, 2102, 2103, 2104, 2105, 2106, 2107, 2108, 2109, 2110, 2111, 2112, 2113, 2114, 2115, 2116, 2117, 2118, 2119, 2120, 2121, 2122, 2123, 2124, 2125, 2126, 2127, 2128, 2129, 2130, 2131, 2132, 2133, 2134, 2135, 2136, 2137, 2138, 2139, 2140, 2141, 2142, 2143, 2144, 2145, 2146, 2147, 2148, 2149, 2150, 2151, 2152, 2153, 2154, 2155, 2156, 2157, 2158, 2159, 2160, 2161, 2162, 2163, 2164, 2165, 2166, 2167, 2168, 2169, 2170, 2171, 2172, 2173, 2174, 2175, 2176, 2177, 2178, 2179, 2180, 2181, 2182, 2183, 2184, 2185, 2186, 2187, 2188, 2189, 2190, 2191, 2192, 2193, 2194, 2195, 2196, 2197, 2198, 2199, 2200, 2201, 2202, 2203, 2204, 2205, 2206, 2207, 2208, 2209, 2210, 2211, 2212, 2213, 2214, 2215, 2216, 2217, 2218, 2219, 2220, 2221, 2222, 2223, 2224, 2225, 2226, 2227, 2228, 2229, 2230, 2231, 2232, 2233, 2234, 2235, 2236, 2237, 2238, 2239, 2240, 2241, 2242, 2243, 2244, 2245, 2246, 2247, 2248, 2249, 2250, 2251, 2252, 2253, 2254, 2255, 2256, 2257, 2258, 2259, 2260, 2261, 2262, 2263, 2264, 2265, 2266, 2267, 2268, 2269, 2270, 2271, 2272, 2273, 2274, 2275, 2276, 2277, 2278, 2279, 2280, 2281, 2282, 2283, 2284, 2285, 2286, 2287, 2288, 2289, 2290, 2291, 2292, 2293, 2294, 2295, 2296, 2297, 2298, 2299, 2300, 2301, 2302, 2303, 2304, 2305, 2306, 2307, 2308, 2309, 2310, 2311, 2312, 2313, 2314, 2315, 2316, 2317, 2318, 2319, 2320, 2321, 2322, 2323, 2324, 2325, 2326, 2327, 2328, 2329, 2330, 2331, 2332, 2333, 2334, 2335, 2336, 2337, 2338, 2339, 2340, 2341, 2342, 2343, 2344, 2345, 2346, 2347, 2348, 2349, 2350, 2351, 2352, 2353, 2354, 2355, 2356, 2357, 2358, 2359, 2360, 2361, 2362, 2363, 2364, 2365, 2366, 2367, 2368, 2369, 2370, 2371, 2372, 2373, 2374, 2375, 2376, 2377, 2378, 2379, 2380, 2381, 2382, 2383, 2384, 2385, 2386, 2387, 2388, 2389, 2390, 2391, 2392, 2393, 2394, 2395, 2396, 2397, 2398, 2399, 2400, 2401, 2402, 2403, 2404, 2405, 2406, 2407, 2408, 2409, 2410, 2411, 2412, 2413, 2414, 2415, 2416, 2417, 2418, 2419, 2420, 2421, 2422, 2423, 2424, 2425, 2426, 2427, 2428, 2429, 2430, 2431, 2432, 2433, 2434, 2435, 2436, 2437, 2438, 2439, 2440, 2441, 2442, 2443, 2444, 2445, 2446, 2447, 2448, 2449, 2450, 2451, 2452, 2453, 2454, 2455, 2456, 2457, 2458, 2459, 2460, 2461, 2462, 2463, 2464, 2465, 2466, 2467, 2468, 2469, 2470, 2471, 2472, 2473, 2474, 2475, 2476, 2477, 2478, 2479, 2480, 2481, 2482, 2483, 2484, 2485, 2486, 2487, 2488, 2489, 2490, 2491, 2492, 2493, 2494, 2495, 2496, 2497, 2498, 2499, 2500, 2501, 2502, 2503, 2504, 2505, 2506, 2507, 2508, 2509, 2510, 2511, 2512, 2513, 2514, 2515, 2516, 2517, 2518, 2519, 2520, 2521, 2522, 2523, 2524, 2525, 2526, 2527, 2528, 2529, 2530, 2531, 2532, 2533, 2534, 2535, 2536, 2537, 2538, 2539, 2540, 2541, 2542, 2543, 2544, 2545, 2546, 2547, 2548, 2549, 2550, 2551, 2552, 2553, 2554, 2555, 2556, 2557, 2558, 2559, 2560, 2561, 2562, 2563, 2564, 2565, 2566, 2567, 2568, 2569, 2570, 2571, 2572, 2573, 2574, 2575, 2576, 2577, 2578, 2579, 2580, 2581, 2582, 2583, 2584, 2585, 2586, 2587, 2588, 2589, 2590, 2591, 2592, 2593, 2594, 2595, 2596, 2597, 2598, 2599, 2600, 2601, 2602, 2603, 2604, 2605, 2606, 2607, 2608, 2609, 2610, 2611, 2612, 2613, 2614, 2615, 2616, 2617, 2618, 2619, 2620, 2621, 2622, 2623, 2624, 2625, 2626, 2627, 2628, 2629, 2630, 2631, 2632, 2633, 2634, 2635, 2636, 2637, 2638, 2639, 2640, 2641, 2642, 2643, 2644, 2645, 2646, 2647, 2648, 2649, 2650, 2651, 2652, 2653, 2654, 2655, 2656, 2657, 2658, 2659, 2660, 2661, 2662, 2663, 2664, 2665, 2666, 2667, 2668, 2669, 2670, 2671, 2672, 2673, 2674, 2675, 2676, 2677, 2678, 2679, 2680, 2681, 2682, 2683, 2684, 2685, 2686, 2687, 2688, 2689, 2690, 2691, 2692, 2693, 2694, 2695, 2696, 2697, 2698, 2699, 2700, 2701, 2702, 2703, 2704, 2705, 2706, 2707, 2708, 2709, 2710, 2711, 2712, 2713, 2714, 2715, 2716, 2717, 2718, 2719, 2720, 2721, 2722, 2723, 2724, 2725, 2726, 2727, 2728, 2729, 2730, 2731, 2732, 2733, 2734, 2735, 2736, 2737, 2738, 2739, 2740, 2741, 2742, 2743, 2744, 2745, 2746, 2747, 2748, 2749, 2750, 2751, 2752, 2753, 2754, 2755, 2756, 2757, 2758, 2759, 2760, 2761, 2762, 2763, 2764, 2765, 2766, 2767, 2768, 2769, 2770, 2771, 2772, 2773, 2774, 2775, 2776, 2777, 2778, 2779, 2780, 2781, 2782, 2783, 2784, 2785, 2786, 2787, 2788, 2789, 2790, 2791, 2792, 2793, 2794, 2795, 2796, 2797, 2798, 2799, 2800, 2801, 2802, 2803, 2804, 2805, 2806, 2807, 2808, 2809, 2810, 2811, 2812, 2813, 2814, 2815, 2816, 2817, 2818, 2819, 2820, 2821, 2822, 2823, 2824, 2825, 2826, 2827, 2828, 2829, 2830, 2831, 2832, 2833, 2834, 2835, 2836, 2837, 2838, 2839, 2840, 2841, 2842, 2843, 2844, 2845, 2846, 2847, 2848, 2849, 2850, 2851, 2852, 2853, 2854, 2855, 2856, 2857, 2858, 2859, 2860, 2861, 2862, 2863, 2864, 2865, 2866, 2867, 2868, 2869, 2870, 2871, 2872, 2873, 2874, 2875, 2876, 2877, 2878, 2879, 2880, 2881, 2882, 2883, 2884, 2885, 2886, 2887, 2888, 2889, 2890, 2891, 2892, 2893, 2894, 2895, 2896, 2897, 2898, 2899, 2900, 2901, 2902, 2903, 2904, 2905, 2906, 2907, 2908, 2909, 2910, 2911, 2912, 2913, 2914, 2915, 2916, 2917, 2918, 2919, 2920, 2921, 2922, 2923, 2924, 2925, 2926, 2927, 2928, 2929, 2930, 2931, 2932, 2933, 2934, 2935, 2936, 2937, 2938, 2939, 2940, 2941, 2942, 2943, 2944, 2945, 2946, 2947, 2948, 2949, 2950, 2951, 2952, 2953, 2954, 2955, 2956, 2957, 2958, 2959, 2960, 2961, 2962, 2963, 2964, 2965, 2966, 2967, 2968, 2969, 2970, 2971, 2972, 2973, 2974, 2975, 2976, 2977, 2978, 2979, 2980, 2981, 2982, 2983, 2984, 2985, 2986, 2987, 2988, 2989, 2990, 2991, 2992, 2993, 2994, 2995, 2996, 2997, 2998, 2999, 3000, 3001, 3002, 3003, 3004, 3005, 3006, 3007, 3008, 3009, 3010, 3011, 3012, 3013, 3014, 3015, 3016, 3017, 3018, 3019, 3020, 3021, 3022, 3023, 3024, 3025, 3026, 3027, 3028, 3029, 3030, 3031, 3032, 3033, 3034, 3035, 3036, 3037, 3038, 3039, 3040, 3041, 3042, 3043, 3044, 3045, 3046, 3047, 3048, 3049, 3050, 3051, 3052, 3053, 3054, 3055, 3056, 3057, 3058, 3059, 3060, 3061, 3062, 3063, 3064, 3065, 3066, 3067, 3068, 3069, 3070, 3071, 3072, 3073, 3074, 3075, 3076, 3077, 3078, 3079, 3080, 3081, 3082, 3083, 3084, 3085, 3086, 3087, 3088, 3089, 3090, 3091, 3092, 3093, 3094, 3095, 3096, 3097, 3098, 3099, 3100, 3101, 3102, 3103, 3104, 3105, 3106, 3107, 3108, 3109, 3110, 3111, 3112, 3113, 3114, 3115, 3116, 3117, 3118, 3119, 3120, 3121, 3122, 3123, 3124, 3125, 3126, 3127, 3128, 3129, 3130, 3131, 3132, 3133, 3134, 3135, 3136, 3137, 3138, 3139, 3140, 3141, 3142, 3143, 3144, 3145, 3146, 3147, 3148, 3149, 3150, 3151, 3152, 3153, 3154, 3155, 3156, 3157, 3158, 3159, 3160, 3161, 3162, 3163, 3164, 31653166, 3167, 3168, 3169, 3170, 3171, 3172, 3173, 3174, 3175, 3176, 3177, 3178, 3179, 3180, 3181, 3182, 3183, 3184, 3185, 3186, 3187, 3188, 3189, 3190, 3191, 3192, 3193, 3194, 3195, 3196, 3197, 3198, 3199, 3200, 3201, 3202, 3203, 3204, 3205, 3206, 3207, 3208, 3209, 3210, 3211, 3212, 3213, 3214, 3215, 3216, 3217, 3218, 3219, 3220, 3221, 3222, 3223, 3224, 3225, 3226, 3227, 3228, 3229, 3230, 3231, 3232, 3233, 3234, 3235, 3236, 3237, 3238, 3239, 3240, 3241, 3242, 3243, 3244, 3245, 3246, 3247, 3248, 3249, and 3250 nucleotides. The length of any filler region for the viral genome may be 50-100, 100-150, 150-200, 200-250, 250-300, 300-350, 350-400, 400-450, 450-500, 500-550, 550-600, 600-650, 650-700, 700-750, 750-800, 800-850, 850-900, 900-950, 950-1000, 1000-1050, 1050-1100, 1100-1150, 1150-1200, 1200-1250, 1250-1300, 1300-1350, 1350-1400, 1400-1450, 1450-1500, 1500-1550, 1550-1600, 1600-1650, 1650-1700, 1700-1750, 1750-1800, 1800-1850, 1850-1900, 1900-1950, 1950-2000, 2000-2050, 2050-2100, 2100-2150, 2150-2200, 2200-2250, 2250-2300, 2300-2350, 2350-2400, 2400-2450, 2450-2500, 2500-2550, 2550-2600, 2600-2650, 2650-2700, 2700-2750, 2750-2800, 2800-2850, 2850-2900, 2900-2950, 2950-3000, 3000-3050, 3050-3100, 3100-3150, 3150-3200, and 3200-3250 nucleotides. As a non-limiting example, the viral genome comprises a filler region that is about 55 nucleotides in length. As a non-limiting example, the viral genome comprises a filler region that is about 56 nucleotides in length. As a non-limiting example, the viral genome comprises a filler region that is about 97 nucleotides in length. As a non-limiting example, the viral genome comprises a filler region that is about 103 nucleotides in length. As a non-limiting example, the viral genome comprises a filler region that is about 105 nucleotides in length. As a non-limiting example, the viral genome comprises a filler region that is about 357 nucleotides in length. As a non-limiting example, the viral genome comprises a filler region that is about 363 nucleotides in length. As a non-limiting example, the viral genome comprises a filler region that is about 712 nucleotides in length. As a non-limiting example, the viral genome comprises a filler region that is about 714 nucleotides in length. As a non-limiting example, the viral genome comprises a filler region that is about 1203 nucleotides in length. As a non-limiting example, the viral genome comprises a filler region that is about 1209 nucleotides in length. As a non-limiting example, the viral genome comprises a filler region that is about 1512 nucleotides in length. As a non-limiting example, the viral genome comprises a filler region that is about 1519 nucleotides in length. As a non-limiting example, the viral genome comprises a filler region that is about 2395 nucleotides in length. As a non-limiting example, the viral genome comprises a filler region that is about 2403 nucleotides in length. As a non-limiting example, the viral genome comprises a filler region that is about 2405 nucleotides in length. As a non-limiting example, the viral genome comprises a filler region that is about 3013 nucleotides in length. As a non-limiting example, the viral genome comprises a filler region that is about 3021 nucleotides in length.

[0500] In one embodiment, the AAV particle viral genome comprises at least one filler sequence regions. Non-limiting examples of filler sequence regions are described in Table 15.

TABLE 15
Filler Sequence Regions

| Sequence Region | |
|---|---|
| Name | SEQ ID NO o |
| FILL1 | 1390 |
| FILL2 | 1391 |
| FILL3 | 1392 |
| FILL4 | 1393 |
| FILL5 | 1394 |
| FILL6 | 1395 |
| FILL7 | 1396 |
| FILL8 | 1397 |
| FILL9 | 1398 |
| FILL10 | 1399 |
| FILL11 | 1400 |
| FILL12 | 1401 |
| FILL13 | 1402 |
| FILL14 | 1403 |
| FILL15 | 1404 |
| FILL16 | 1405 |
| FILL17 | 1406 |
| FILL18 | 1407 |

[0501] In one embodiment, the AAV particle viral genome comprises one filler sequence region. In one embodiment, the filler sequence region is the FILL1 sequence region. In one embodiment, the filler sequence region is the FILL2 sequence region. In one embodiment, the filler sequence region is the FILL3 sequence region. In one embodiment, the filler sequence region is the FILL4 sequence region. In one embodiment, the filler sequence region is the FILL5 sequence region. In one embodiment, the filler sequence region is the FILL6 sequence region. In one embodiment, the filler sequence region is the FILL7 sequence region. In one embodiment, the filler sequence region is the FILL8 sequence region. In one embodiment, the filler sequence region is the FILL9 sequence region. In one embodiment, the filler sequence region is the FILL10 sequence region. In one embodiment, the filler sequence region is the FILL11 sequence region. In one embodiment, the filler sequence region is the FILL12 sequence region. In one embodiment, the filler sequence region is the FILL13 sequence region. In one embodiment, the filler sequence region is the FILL14 sequence region. In one embodiment, the filler sequence region is the FILL15 sequence region. In one embodiment, the filler sequence region is the FILL16 sequence region. In one embodiment, the filler sequence region is the FILL17 sequence region. In one embodiment, the filler sequence region is the FILL18 sequence region.

[0502] In one embodiment, the AAV particle viral genome comprises two filler sequence regions. In one embodiment, the two filler sequence regions are the FILL1 sequence region, and the FILL2 sequence region. In one embodiment, the filler sequence region is the FILL1 sequence region, and the FILL3 sequence region. In one embodiment, the filler sequence region is the FILL1 sequence region, and the FILL4 sequence region. In one embodiment, the filler sequence region is the FILL1 sequence region, and the FILL5 sequence region. In one embodiment, the filler sequence region is the FILL1 sequence region, and the FILL6 sequence region. In one embodiment, the filler sequence region is the FILL1 sequence region, and the FILL7 sequence region. In one embodiment, the filler sequence region is the FILL1 sequence region, and the FILL8 sequence region. In one embodiment, the filler sequence region is the FILL1 sequence region, and the FILL9 sequence region. In one embodiment, the filler sequence region is the FILL sequence region, and the FILL10 sequence region. In one embodiment, the filler sequence region is the FILL1 sequence region, and the FILL11 sequence region. In one embodiment, the filler sequence region is the FILL1 sequence region, and the FILL12 sequence region. In one embodiment, the filler sequence region is the FILL1 sequence region, and the FILL13 sequence region. In one embodiment, the filler sequence region is the FILL1 sequence region, and the FILL14 sequence region. In one embodiment, the filler sequence region is the FILL1 sequence region, and the FILL15 sequence region. In one embodiment, the filler sequence region is the FILL1 sequence region, and the FILL16 sequence region. In one embodiment, the filler sequence region is the FILL1 sequence region, and the FILL17 sequence region. In one embodiment, the filler sequence region is the FILL1 sequence region, and the FILL18 sequence region. In one embodiment, the filler sequence region is the FILL2 sequence region, and the FILL3 sequence region. In one embodiment, the filler sequence region is the FILL3 sequence region, and the FILL4 sequence region. In one embodiment, the filler sequence region is the FILL3 sequence region, and the FILL5 sequence region. In one embodiment, the filler sequence region is the FILL3 sequence region, and the FILL6 sequence region. In one embodiment, the filler sequence region is the FILL3 sequence region, and the FILL7 sequence region. In one embodiment, the filler sequence region is the FILL3 sequence region, and the FILL8 sequence region. In one embodiment, the filler sequence region is the FILL3 sequence region, and the FILL9 sequence region. In one embodiment, the filler sequence region is the FILL3 sequence region, and the FILL10 sequence region. In one embodiment, the filler sequence region is the FILL3 sequence region, and the FILL11 sequence region. In one embodiment, the filler sequence region is the FILL3 sequence region, and the FILL12 sequence region. In one embodiment, the filler sequence region is the FILL3 sequence region, and the FILL13 sequence region. In one embodiment, the filler sequence region is the FILL3 sequence region, and the FILL14 sequence region. In one embodiment, the filler sequence region is the FILL3 sequence region, and the FILL15 sequence region. In one embodiment, the filler sequence region is the FILL3 sequence region, and the FILL16 sequence region. In one embodiment, the filler sequence region is the FILL3 sequence region, and the FILL17 sequence region. In one embodiment, the filler sequence region is the FILL3 sequence region, and the FILL18 sequence region. In one embodiment, the filler sequence region is the FILL4 sequence region, and the FILL5 sequence region. In one embodiment, the filler sequence region is the FILL4 sequence region, and the FILL6 sequence region. In one embodiment, the filler sequence region is the FILL4 sequence region, and the FILL7 sequence region. In one embodiment, the filler sequence region is the FILL4 sequence region, and the FILL8 sequence region. In one embodiment, the filler sequence region is the FILL4 sequence region, and the FILL9 sequence region. In one embodiment, the filler sequence region is the FILL4 sequence region, and the FILL10 sequence region. In one embodiment, the filler sequence region is the FILL4 sequence region, and the FILL11 sequence region. In one embodiment, the filler sequence region is the FILL4 sequence region, and the FILL12 sequence region. In one embodiment, the filler sequence region is the FILL4 sequence region, and the FILL13 sequence region. In one embodiment, the filler sequence region is the FILL4 sequence region, and the FILL14 sequence region. In one embodiment, the filler sequence region is the FILL4 sequence region, and the FILL15 sequence region. In one embodiment, the filler sequence region is the FILL4 sequence region, and the FILL16 sequence region. In one embodiment, the filler sequence region is the FILL4 sequence region, and the FILL17 sequence region. In one embodiment, the filler sequence region is the FILL4 sequence region, and the FILL18 sequence region. In one embodiment, the filler sequence region is the FILL5 sequence region, and the FILL6 sequence region. In one embodiment, the filler sequence region is the FILL5 sequence region, and the FILL7 sequence region. In one embodiment, the filler sequence region is the FILL5 sequence region, and the FILL8 sequence region. In one embodiment, the filler sequence region is the FILL5 sequence region, and the FILL9 sequence region. In one embodiment, the filler sequence region is the FILL5 sequence region, and the FILL10 sequence region. In one embodiment, the filler sequence region is the FILL5 sequence region, and the FILL11 sequence region. In one embodiment, the filler sequence region is the FILL5 sequence region, and the FILL12 sequence region. In one embodiment, the filler sequence region is the FILL5 sequence region, and the FILL13 sequence region. In one embodiment, the filler sequence region is the FILL5 sequence region, and the FILL14 sequence region. In one embodiment, the filler sequence region is the FILL5 sequence region, and the FILL15 sequence region. In one embodiment, the filler sequence region is the FILL5 sequence region, and the FILL16 sequence region. In one embodiment, the filler sequence region is the FILL5 sequence region, and the FILL17 sequence region. In one embodiment, the filler sequence region is the FILL5 sequence region, and the FILL18 sequence region. In one embodiment, the filler sequence region is the FILL6 sequence region, and the FILL7 sequence region. In one embodiment, the filler sequence region is the FILL6 sequence region, and the FILL8 sequence region. In one embodiment, the filler sequence region is the FILL6 sequence region, and the FILL9 sequence region. In one embodiment, the filler sequence region is the FILL6 sequence region, and the FILL10 sequence region. In one embodiment, the filler sequence region is the FILL6 sequence region, and the FILL11 sequence region. In one embodiment, the filler sequence region is the FILL6 sequence region, and the FILL12 sequence region. In one embodiment, the filler sequence region is the FILL6 sequence region, and the FILL13 sequence region. In one embodiment, the filler sequence region is the FILL6 sequence region, and the FILL14 sequence region. In one embodiment, the filler sequence region is the FILL6 sequence region, and the FILL15 sequence region. In one embodiment, the filler sequence region is the FILL6 sequence region, and the FILL16 sequence region. In one embodiment, the filler sequence region is the FILL6 sequence region, and the FILL17 sequence region. In one embodiment, the filler sequence region is the FILL6 sequence region, and the FILL18 sequence region. In one embodiment, the filler sequence region is the FILL7 sequence region, and the FILL5 sequence region. In one embodiment, the filler sequence region is the FILL7 sequence region, and the FILL9 sequence region. In one embodiment, the filler sequence region is the FILL7 sequence region, and the FILL10 sequence region. In one embodiment, the filler sequence region is the FILL7 sequence region, and the FILL11 sequence region. In one embodiment, the filler sequence region is the FILL7 sequence region, and the FILL12 sequence region. In one embodiment, the filler sequence region is the FILL7 sequence region, and the FILL13 sequence region. In one embodiment, the filler sequence region is the FILL7 sequence region, and the FILL14 sequence region. In one embodiment, the filler sequence region is the FILL7 sequence region, and the FILL15 sequence region. In one embodiment, the filler sequence region is the FILL7 sequence region, and the FILL16 sequence region. In one embodiment, the filler sequence region is the FILL7 sequence region, and the FILL17 sequence region. In one embodiment, the filler sequence region is the FILL7 sequence region, and the FILL18 sequence region. In one embodiment, the filler sequence region is the FILL5 sequence region, and the FILL9 sequence region. In one embodiment, the filler sequence region is the FILL8 sequence region, and the FILL10 sequence region. In one embodiment, the filler sequence region is the FILL8 sequence region, and the FILL11 sequence region. In one embodiment, the filler sequence region is the FILL8 sequence region, and the FILL12 sequence region. In one embodiment, the filler sequence region is the FILL8 sequence region, and the FILL13 sequence region. In one embodiment, the filler sequence region is the FILL8 sequence region, and the FILL14 sequence region. In one embodiment, the filler sequence region is the FILL8 sequence region, and the FILL15 sequence region. In one embodiment, the filler sequence region is the FILL5 sequence region, and the FILL16 sequence region. In one embodiment, the filler sequence region is the FILL8 sequence region, and the FILL17 sequence region. In one embodiment, the filler sequence region is the FILL8 sequence region, and the FILL18 sequence region. In one embodiment, the filler sequence region is the FILL9 sequence region, and the FILL10 sequence region. In one embodiment, the filler sequence region is the FILL9 sequence region, and the FILL11 sequence region. In one embodiment, the filler sequence region is the FILL9 sequence region, and the FILL12 sequence region. In one embodiment, the filler sequence region is the FILL9 sequence region, and the FILL13 sequence region. In one embodiment, the filler sequence region is the FILL9 sequence region, and the FILL14 sequence region. In one embodiment, the filler sequence region is the FILL9 sequence region, and the FILL15 sequence region. In one embodiment, the filler sequence region is the FILL9 sequence region, and the FILL16 sequence region. In one embodiment, the filler sequence region is the FILL9 sequence region, and the FILL17 sequence region. In one embodiment, the filler sequence region is the FILL9 sequence region, and the FILL18 sequence region. In one embodiment, the filler sequence region is the FILL10 sequence region, and the FILL11 sequence region. In one embodiment, the filler sequence region is the FILL10 sequence region, and the FILL12 sequence region. In one embodiment, the filler sequence region is the FILL10 sequence region, and the FILL13 sequence region. In one embodiment, the filler sequence region is the FILL10 sequence region, and the FILL14 sequence region. In one embodiment, the filler sequence region is the FILL10 sequence region, and the FILL15 sequence region. In one embodiment, the filler sequence region is the FILL10 sequence region, and the FILL16 sequence region. In one embodiment, the filler sequence region is the FILL10 sequence region, and the FILL17 sequence region. In one embodiment, the filler sequence region is the FILL10 sequence region, and the FILL8 sequence region. In one embodiment, the filler sequence region is the FILL11 sequence region, and the FILL12 sequence region. In one embodiment, the filler sequence region is the FILL11 sequence region, and the FILL13 sequence region. In one embodiment, the filler sequence region is the FILL1 sequence region, and the FILL14 sequence region. In one embodiment, the filler sequence region is the FILL11 sequence region, and the FILL15 sequence region. In one embodiment, the filler sequence region is the FILL11 sequence region, and the FILL16 sequence region. In one embodiment, the filler sequence region is the FILL11 sequence region, and the FILL17 sequence region. In one embodiment, the filler sequence region is the FILL11 sequence region, and the FILL18 sequence region. In one embodiment, the filler sequence region is the FILL12 sequence region, and the FILL13 sequence region. In one embodiment, the filler sequence region is the FILL12 sequence region, and the FILL14 sequence region. In one embodiment, the filler sequence region is the FILL12 sequence region, and the FILL15 sequence region. In one embodiment, the filler sequence region is the FILL12 sequence region, and the FILL16 sequence region. In one embodiment, the filler sequence region is the FILL12 sequence region, and the FILL17 sequence region. In one embodiment, the filler sequence region is the FILL12 sequence region, and the FILL18 sequence region. In one embodiment, the filler sequence region is the FILL13 sequence region, and the FILL14 sequence region. In one embodiment, the filler sequence region is the FILL13 sequence region, and the FILL15 sequence region. In one embodiment, the filler sequence region is the FILL13 sequence region, and the FILL16 sequence region. In one embodiment, the filler sequence region is the FILL13 sequence region, and the FILL17 sequence region. In one embodiment, the filler sequence region is the FILL13 sequence region, and the FILL18 sequence region. In one embodiment, the filler sequence region is the FILL14 sequence region, and the FILL15 sequence region. In one embodiment, the filler sequence region is the FILL14 sequence region, and the FILL16 sequence region. In one embodiment, the filler sequence region is the FILL14 sequence region, and the FILL17 sequence region. In one embodiment, the filler sequence region is the FILL14 sequence region, and the FILL18 sequence region. In one embodiment, the filler sequence region is the FILL15 sequence region, and the FILL16 sequence region. In one embodiment, the filler sequence region is the FILL15 sequence region, and the FILL17 sequence region. In one embodiment, the filler sequence region is the FILL15 sequence region, and the FILL18 sequence region. In one embodiment, the filler sequence region is the FILL16 sequence region, and the FILL17 sequence region. In one embodiment, the filler sequence region is the FILL16 sequence region, and the FILL18 sequence region. In one embodiment, the filler sequence region is the FILL17 sequence region, and the FILL18 sequence region.

[0503] In one embodiment, the AAV particle viral genome comprises three filler sequence regions. In one embodiment, the two filler sequence regions are the FILL1 sequence region, the FILL2 sequence region, and the FILL3 sequence region. In one embodiment, the filler sequence region is the FILL1 sequence region, the FILL2 sequence region, and the FILL4 sequence region. In one embodiment, the filler sequence region is the FILL1 sequence region, the FILL2 sequence region, and the FILL5 sequence region. In one embodiment, the filler sequence region is the FILL1 sequence region, the FILL2 sequence region, and the FILL6 sequence region. In one embodiment, the filler sequence region is the FILL1 sequence region, the FILL2 sequence region, and the FILL7 sequence region. In one embodiment, the filler sequence region is the FILL1 sequence region, the FILL2 sequence region, and the FILL8 sequence region. In one embodiment, the filler sequence region is the FILL1 sequence region, the FILL2 sequence region, and the FILL9 sequence region. In one embodiment, the filler sequence region is the FILL1 sequence region, the FILL2 sequence region, and the FILL10 sequence region. In one embodiment, the filler sequence region is the FILL1 sequence region, the FILL2 sequence region, and the FILL11 sequence region. In one embodiment, the filler sequence region is the FILL1 sequence region, the FILL2 sequence region, and the FILL12 sequence region. In one embodiment, the filler sequence region is the FILL1 sequence region, the FILL2 sequence region, and the FILL13 sequence region. In one embodiment, the filler sequence region is the FILL1 sequence region, the FILL2 sequence region, and the FILL14 sequence region. In one embodiment, the filler sequence region is the FILL1 sequence region, the FILL2 sequence region, and the FILL15 sequence region. In one embodiment, the filler sequence region is the FILL1 sequence region, the FILL2 sequence region, and the FILL16 sequence region. In one embodiment, the filler sequence region is the FILL1 sequence region, the FILL2 sequence region, and the FILL17 sequence region. In one embodiment, the filler sequence region is the FILL1 sequence region, the FILL2 sequence region, and the FILL18 sequence region. In one embodiment, the filler sequence region is the FILL1 sequence region, the FILL3 sequence region, and the FILL4 sequence region. In one embodiment, the filler sequence region is the FILL1 sequence region, the FILL3 sequence region, and the FILL5 sequence region. In one embodiment, the filler sequence region is the FILL1 sequence region, the FILL3 sequence region, and the FILL6 sequence region. In one embodiment, the filler sequence region is the FILL1 sequence region, the FILL3 sequence region, and the FILL7 sequence region. In one embodiment, the filler sequence region is the FILL1 sequence region, the FILL3 sequence region, and the FILL8 sequence region. In one embodiment, the filler sequence region is the FILL1 sequence region, the FILL3 sequence region, and the FILL9 sequence region. In one embodiment, the filler sequence region is the FILL1 sequence region, the FILL3 sequence region, and the FILL10 sequence region. In one embodiment, the filler sequence region is the FILL1 sequence region, the FILL3 sequence region, and the FILL11 sequence region. In one embodiment, the filler sequence region is the FILL1 sequence region, the FILL3 sequence region, and the FILL12 sequence region. In one embodiment, the filler sequence region is the FILL1 sequence region, the FILL3 sequence region, and the FILL13 sequence region. In one embodiment, the filler sequence region is the FILL1 sequence region, the FILL3 sequence region, and the FILL14 sequence region. In one embodiment, the filler sequence region is the FILL1 sequence region, the FILL3 sequence region, and the FILL15 sequence region. In one embodiment, the filler sequence region is the FILL1 sequence region, the FILL3 sequence region, and the FILL16 sequence region. In one embodiment, the filler sequence region is the FILL1 sequence region, the FILL3 sequence region, and the FILL17 sequence region. In one embodiment, the filler sequence region is the FILL1 sequence region, the FILL3 sequence region, and the FILL18 sequence region. In one embodiment, the filler sequence region is the FILL1 sequence region, the FILL4 sequence region, and the FILL5 sequence region. In one embodiment, the filler sequence region is the FILL1 sequence region, the FILL4 sequence region, and the FILL6 sequence region. In one embodiment, the filler sequence region is the FILL1 sequence region, the FILL4 sequence region, and the FILL7 sequence region. In one embodiment, the filler sequence region is the FILL1 sequence region, the FILL4 sequence region, and the FILL8 sequence region. In one embodiment, the filler sequence region is the FILL1 sequence region, the FILL4 sequence region, and the FILL9 sequence region. In one embodiment, the filler sequence region is the FILL1 sequence region, the FILL4 sequence region, and the FILL10 sequence region. In one embodiment, the filler sequence region is the FILL1 sequence region, the FILL4 sequence region, and the FILL11 sequence region. In one embodiment, the filler sequence region is the FILL1 sequence region, the FILL4 sequence region, and the FILL12 sequence region. In one embodiment, the filler sequence region is the FILL1 sequence region, the FILL4 sequence region, and the FILL13 sequence region. In one embodiment, the filler sequence region is the FILL1 sequence region, the FILL4 sequence region, and the FILL14 sequence region. In one embodiment, the filler sequence region is the FILL1 sequence region, the FILL4 sequence region, and the FILL15 sequence region. In one embodiment, the filler sequence region is the FILL1 sequence region, the FILL4 sequence region, and the FILL16 sequence region. In one embodiment, the filler sequence region is the FILL1 sequence region, the FILL4 sequence region, and the FILL17 sequence region. In one embodiment, the filler sequence region is the FILL1 sequence region, the FILL4 sequence region, and the FILL18 sequence region. In one embodiment, the filler sequence region is the FILL1 sequence region, the FILL5 sequence region, and the FILL6 sequence region. In one embodiment, the filler sequence region is the FILL1 sequence region, the FILL5 sequence region, and the FILL7 sequence region. In one embodiment, the filler sequence region is the FILL1 sequence region, the FILL5 sequence region, and the FILL8 sequence region. In one embodiment, the filler sequence region is the FILL1 sequence region, the FILL5 sequence region, and the FILL9 sequence region. In one embodiment, the filler sequence region is the FILL1 sequence region, the FILL5 sequence region, and the FILL10 sequence region. In one embodiment, the filler sequence region is the FILL1 sequence region, the FILL5 sequence region, and the FILL11 sequence region. In one embodiment, the filler sequence region is the FILL1 sequence region, the FILL5 sequence region, and the FILL12 sequence region. In one embodiment, the filler sequence region is the FILL1 sequence region, the FILL5 sequence region, and the FILL13 sequence region. In one embodiment, the filler sequence region is the FILL1 sequence region, the FILL5 sequence region, and the FILL14 sequence region. In one embodiment, the filler sequence region is the FILL1 sequence region, the FILL5 sequence region, and the FILL15 sequence region. In one embodiment, the filler sequence region is the FILL1 sequence region, the FILL5 sequence region, and the FILL16 sequence region. In one embodiment, the filler sequence region is the FILL1 sequence region, the FILL5 sequence region, and the FILL17 sequence region. In one embodiment, the filler sequence region is the FILL1 sequence region, the FILL5 sequence region, and the FILL18 sequence region. In one embodiment, the filler sequence region is the FILL1 sequence region, the FILL6 sequence region, and the FILL7 sequence region. In one embodiment, the filler sequence region is the FILL1 sequence region, the FILL6 sequence region, and the FILL5 sequence region. In one embodiment, the filler sequence region is the FILL1 sequence region, the FILL6 sequence region, and the FILL9 sequence region. In one embodiment, the filler sequence region is the FILL1 sequence region, the FILL6 sequence region, and the FILL10 sequence region. In one embodiment, the filler sequence region is the FILL1 sequence region, the FILL6 sequence region, and the FILL11 sequence region. In one embodiment, the filler sequence region is the FILL1 sequence region, the FILL6 sequence region, and the FILL12 sequence region. In one embodiment, the filler sequence region is the FILL1 sequence region, the FILL6 sequence region, and the FILL13 sequence region. In one embodiment, the filler sequence region is the FILL1 sequence region, the FILL6 sequence region, and the FILL14 sequence region. In one embodiment, the filler sequence region is the FILL1 sequence region, the FILL6 sequence region, and the FILL15 sequence region. In one embodiment, the filler sequence region is the FILL1 sequence region, the FILL6 sequence region, and the FILL16 sequence region. In one embodiment, the filler sequence region is the FILL1 sequence region, the FILL6 sequence region, and the FILL17 sequence region. In one embodiment, the filler sequence region is the FILL1 sequence region, the FILL6 sequence region, and the FILL18 sequence region. In one embodiment, the filler sequence region is the FILL1 sequence region, the FILL7 sequence region, and the FILL5 sequence region. In one embodiment, the filler sequence region is the FILL1 sequence region, the FILL7 sequence region, and the FILL9 sequence region. In one embodiment, the filler sequence region is the FILL1 sequence region, the FILL7 sequence region, and the FILL10 sequence region. In one embodiment, the filler sequence region is the FILL1 sequence region, the FILL7 sequence region, and the FILL11 sequence region. In one embodiment, the filler sequence region is the FILL1 sequence region, the FILL7 sequence region, and the FILL12 sequence region. In one embodiment, the filler sequence region is the FILL1 sequence region, the FILL7 sequence region, and the FILL13 sequence region. In one embodiment, the filler sequence region is the FILL1 sequence region, the FILL7 sequence region, and the FILL14 sequence region. In one embodiment, the filler sequence region is the FILL1 sequence region, the FILL7 sequence region, and the FILL15 sequence region. In one embodiment, the filler sequence region is the FILL1 sequence region, the FILL7 sequence region, and the FILL16 sequence region. In one embodiment, the filler sequence region is the FILL1 sequence region, the FILL7 sequence region, and the FILL17 sequence region. In one embodiment, the filler sequence region is the FILL1 sequence region, the FILL7 sequence region, and the FILL18 sequence region. In one embodiment, the filler sequence region is the FILL1 sequence region, the FILL8 sequence region, and the FILL9 sequence region. In one embodiment, the filler sequence region is the FILL1 sequence region, the FILL8 sequence region, and the FILL10 sequence region. In one embodiment, the filler sequence region is the FILL1 sequence region, the FILL8 sequence region, and the FILL11 sequence region. In one embodiment, the filler sequence region is the FILL1 sequence region, the FILL8 sequence region, and the FILL12 sequence region. In one embodiment, the filler sequence region is the FILL1 sequence region, the FILL8 sequence region, and the FILL13 sequence region. In one embodiment, the filler sequence region is the FILL1 sequence region, the FILL8 sequence region, and the FILL14 sequence region. In one embodiment, the filler sequence region is the FILL1 sequence region, the FILL8 sequence region, and the FILL15 sequence region. In one embodiment, the filler sequence region is the FILL1 sequence region, the FILL8 sequence region, and the FILL16 sequence region. In one embodiment, the filler sequence region is the FILL1 sequence region, the FILL8 sequence region, and the FILL17 sequence region. In one embodiment, the filler sequence region is the FILL1 sequence region, the FILL8 sequence region, and the FILL18 sequence region. In one embodiment, the filler sequence region is the FILL1 sequence region, the FILL9 sequence region, and the FILL10 sequence region. In one embodiment, the filler sequence region is the FILL1 sequence region, the FILL9 sequence region, and the FILL11 sequence region. In one embodiment, the filler sequence region is the FILL1 sequence region, the FILL9 sequence region, and the FILL12 sequence region. In one embodiment, the filler sequence region is the FILL1 sequence region, the FILL9 sequence region, and the FILL13 sequence region. In one embodiment, the filler sequence region is the FILL1 sequence region, the FILL9 sequence region, and the FILL14 sequence region. In one embodiment, the filler sequence region is the FILL1 sequence region, the FILL9 sequence region, and the FILL15 sequence region. In one embodiment, the filler sequence region is the FILL1 sequence region, the FILL9 sequence region, and the FILL16 sequence region. In one embodiment, the filler sequence region is the FILL1 sequence region, the FILL9 sequence region, and the FILL17 sequence region. In one embodiment, the filler sequence region is the FILL1 sequence region, the FILL9 sequence region, and the FILL18 sequence region. In one embodiment, the filler sequence region is the FILL1 sequence region, the FILL10 sequence region, and the FILL11 sequence region. In one embodiment, the filler sequence region is the FILL1 sequence region, the FILL10 sequence region, and the FILL12 sequence region. In one embodiment, the filler sequence region is the FILL1 sequence region, the FILL10 sequence region, and the FILL13 sequence region. In one embodiment, the filler sequence region is the FILL1 sequence region, the FILL10 sequence region, and the FILL14 sequence region. In one embodiment, the filler sequence region is the FILL1 sequence region, the FILL10 sequence region, and the FILL15 sequence region. In one embodiment, the filler sequence region is the FILL1 sequence region, the FILL10 sequence region, and the FILL16 sequence region. In one embodiment, the filler sequence region is the FILL1 sequence region, the FILL10 sequence region, and the FILL17 sequence region. In one embodiment, the filler sequence region is the FILL1 sequence region, the FILL10 sequence region, and the FILL18 sequence region. In one embodiment, the filler sequence region is the FILL1 sequence region, the FILL11 sequence region, and the FILL12 sequence region. In one embodiment, the filler sequence region is the FILL1 sequence region, the FILL11 sequence region, and the FILL13 sequence region. In one embodiment, the filler sequence region is the FILL1 sequence region, the FILL11 sequence region, and the FILL14 sequence region. In one embodiment, the filler sequence region is the FILL1 sequence region, the FILL11 sequence region, and the FILL15 sequence region. In one embodiment, the filler sequence region is the FILL1 sequence region, the FILL11 sequence region, and the FILL16 sequence region. In one embodiment, the filler sequence region is the FILL1 sequence region, the FILL11 sequence region, and the FILL17 sequence region. In one embodiment, the filler sequence region is the FILL1 sequence region, the FILL11 sequence region, and the FILL18 sequence region. In one embodiment, the filler sequence region is the FILL1 sequence region, the FILL12 sequence region, and the FILL13 sequence region. In one embodiment, the filler sequence region is the FILL1 sequence region, the FILL12 sequence region, and the FILL14 sequence region. In one embodiment, the filler sequence region is the FILL1 sequence region, the FILL12 sequence region, and the FILL15 sequence region. In one embodiment, the filler sequence region is the FILL1 sequence region, the FILL12 sequence region, and the FILL16 sequence region. In one embodiment, the filler sequence region is the FILL1 sequence region, the FILL12 sequence region, and the FILL17 sequence region. In one embodiment, the filler sequence region is the FILL1 sequence region, the FILL12 sequence region, and the FILL18 sequence region. In one embodiment, the filler sequence region is the FILL1 sequence region, the FILL13 sequence region, and the FILL14 sequence region. In one embodiment, the filler sequence region is the FILL1 sequence region, the FILL13 sequence region, and the FILL15 sequence region. In one embodiment, the filler sequence region is the FILL1 sequence region, the FILL13 sequence region, and the FILL16 sequence region. In one embodiment, the filler sequence region is the FILL1 sequence region, the FILL13 sequence region, and the FILL17 sequence region. In one embodiment, the filler sequence region is the FILL1 sequence region, the FILL13 sequence region, and the FILL18 sequence region. In one embodiment, the filler sequence region is the FILL1 sequence region, the FILL14 sequence region, and the FILL15 sequence region. In one embodiment, the filler sequence region is the FILL1 sequence region, the FILL14 sequence region, and the FILL16 sequence region. In one embodiment, the filler sequence region is the FILL1 sequence region, the FILL14 sequence region, and the FILL17 sequence region. In one embodiment, the filler sequence region is the FILL1 sequence region, the FILL14 sequence region, and the FILL18 sequence region. In one embodiment, the filler sequence region is the FILL1 sequence region, the FILL15 sequence region, and the FILL16 sequence region. In one embodiment, the filler sequence region is the FILL1 sequence region, the FILL15 sequence region, and the FILL17 sequence region. In one embodiment, the filler sequence region is the FILL1 sequence region, the FILL15 sequence region, and the FILL18 sequence region. In one embodiment, the filler sequence region is the FILL1 sequence region, the FILL16 sequence region, and the FILL17 sequence region. In one embodiment, the filler sequence region is the FILL1 sequence region, the FILL16 sequence region, and the FILL18 sequence region. In one embodiment, the filler sequence region is the FILL1 sequence region, the FILL17 sequence region, and the FILL18 sequence region. In one embodiment, the filler sequence region is the FILL2 sequence region, the FILL3 sequence region, and the FILL4 sequence region. In one embodiment, the filler sequence region is the FILL2 sequence region, the FILL3 sequence region, and the FILL5 sequence region. In one embodiment, the filler sequence region is the FILL2 sequence region, the FILL3 sequence region, and the FILL6 sequence region. In one embodiment, the filler sequence region is the FILL2 sequence region, the FILL3 sequence region, and the FILL7 sequence region. In one embodiment, the filler sequence region is the FILL2 sequence region, the FILL3 sequence region, and the FILL8 sequence region. In one embodiment, the filler sequence region is the FILL2 sequence region, the FILL3 sequence region, and the FILL9 sequence region. In one embodiment, the filler sequence region is the FILL2 sequence region, the FILL3 sequence region, and the FILL10 sequence region. In one embodiment, the filler sequence region is the FILL2 sequence region, the FILL3 sequence region, and the FILL11 sequence region. In one embodiment, the filler sequence region is the FILL2 sequence region, the FILL3 sequence region, and the FILL12 sequence region. In one embodiment, the filler sequence region is the FILL2 sequence region, the FILL3 sequence region, and the FILL13 sequence region. In one embodiment, the filler sequence region is the FILL2 sequence region, the FILL3 sequence region, and the FILL14 sequence region. In one embodiment, the filler sequence region is the FILL2 sequence region, the FILL3 sequence region, and the FILL15 sequence region. In one embodiment, the filler sequence region is the FILL2 sequence region, the FILL3 sequence region, and the FILL16 sequence region. In one embodiment, the filler sequence region is the FILL2 sequence region, the FILL3 sequence region, and the FILL17 sequence region. In one embodiment, the filler sequence region is the FILL2 sequence region, the FILL3 sequence region, and the FILL18 sequence region. In one embodiment, the filler sequence region is the FILL2 sequence region, the FILL4 sequence region, and the FILL5 sequence region. In one embodiment, the filler sequence region is the FILL2 sequence region, the FILL4 sequence region, and the FILL6 sequence region. In one embodiment, the filler sequence region is the FILL2 sequence region, the FILL4 sequence region, and the FILL7 sequence region. In one embodiment, the filler sequence region is the FILL2 sequence region, the FILL4 sequence region, and the FILL8 sequence region. In one embodiment, the filler sequence region is the FILL2 sequence region, the FILL4 sequence region, and the FILL9 sequence region. In one embodiment, the filler sequence region is the FILL2 sequence region, the FILL4 sequence region, and the FILL10 sequence region. In one embodiment, the filler sequence region is the FILL2 sequence region, the FILL4 sequence region, and the FILL11 sequence region. In one embodiment, the filler sequence region is the FILL2 sequence region, the FILL4 sequence region, and the FILL12 sequence region. In one embodiment, the filler sequence region is the FILL2 sequence region, the FILL4 sequence region, and the FILL13 sequence region. In one embodiment, the filler sequence region is the FILL2 sequence region, the FILL4 sequence region, and the FILL14 sequence region. In one embodiment, the filler sequence region is the FILL2 sequence region, the FILL4 sequence region, and the FILL15 sequence region. In one embodiment, the filler sequence region is the FILL2 sequence region, the FILL4 sequence region, and the FILL16 sequence region. In one embodiment, the filler sequence region is the FILL2 sequence region, the FILL4 sequence region, and the FILL17 sequence region. In one embodiment, the filler sequence region is the FILL2 sequence region, the FILL4 sequence region, and the FILL18 sequence region. In one embodiment, the filler sequence region is the FILL2 sequence region, the FILL5 sequence region, and the FILL6 sequence region. In one embodiment, the filler sequence region is the FILL2 sequence region, the FILL5 sequence region, and the FILL7 sequence region. In one embodiment, the filler sequence region is the FILL2 sequence region, the FILL5 sequence region, and the FILL8 sequence region. In one embodiment, the filler sequence region is the FILL2 sequence region, the FILL5 sequence region, and the FILL9 sequence region. In one embodiment, the filler sequence region is the FILL2 sequence region, the FILL5 sequence region, and the FILL10 sequence region. In one embodiment, the filler sequence region is the FILL2 sequence region, the FILL5 sequence region, and the FILL11 sequence region. In one embodiment, the filler sequence region is the FILL2 sequence region, the FILL5 sequence region, and the FILL12 sequence region. In one embodiment, the filler sequence region is the FILL2 sequence region, the FILL5 sequence region, and the FILL13 sequence region. In one embodiment, the filler sequence region is the FILL2 sequence region, the FILL5 sequence region, and the FILL14 sequence region. In one embodiment, the filler sequence region is the FILL2 sequence region, the FILL5 sequence region, and the FILL15 sequence region. In one embodiment, the filler sequence region is the FILL2 sequence region, the FILL5 sequence region, and the FILL16 sequence region. In one embodiment, the filler sequence region is the FILL2 sequence region, the FILL5 sequence region, and the FILL17 sequence region. In one embodiment, the filler sequence region is the FILL2 sequence region, the FILL5 sequence region, and the FILL18 sequence region. In one embodiment, the filler sequence region is the FILL2 sequence region, the FILL6 sequence region, and the FILL7 sequence region. In one embodiment, the filler sequence region is the FILL2 sequence region, the FILL6 sequence region, and the FILL8 sequence region. In one embodiment, the filler sequence region is the FILL2 sequence region, the FILL6 sequence region, and the FILL9 sequence region. In one embodiment, the filler sequence region is the FILL2 sequence region, the FILL6 sequence region, and the FILL10 sequence region. In one embodiment, the filler sequence region is the FILL2 sequence region, the FILL6 sequence region, and the FILL11 sequence region. In one embodiment, the filler sequence region is the FILL2 sequence region, the FILL6 sequence region, and the FILL12 sequence region. In one embodiment, the filler sequence region is the FILL2 sequence region, the FILL6 sequence region, and the FILL13 sequence region. In one embodiment, the filler sequence region is the FILL2 sequence region, the FILL6 sequence region, and the FILL14 sequence region. In one embodiment, the filler sequence region is the FILL2 sequence region, the FILL6 sequence region, and the FILL15 sequence region. In one embodiment, the filler sequence region is the FILL2 sequence region, the FILL6 sequence region, and the FILL16 sequence region. In one embodiment, the filler sequence region is the FILL2 sequence region, the FILL6 sequence region, and the FILL17 sequence region. In one embodiment, the filler sequence region is the FILL2 sequence region, the FILL6 sequence region, and the FILL18 sequence region. In one embodiment, the filler sequence region is the FILL2 sequence region, the FILL7 sequence region, and the FILL8 sequence region. In one embodiment, the filler sequence region is the FILL2 sequence region, the FILL7 sequence region, and the FILL9 sequence region. In one embodiment, the filler sequence region is the FILL2 sequence region, the FILL7 sequence region, and the FILL10 sequence region. In one embodiment, the filler sequence region is the FILL2 sequence region, the FILL7 sequence region, and the FILL11 sequence region. In one embodiment, the filler sequence region is the FILL2 sequence region, the FILL7 sequence region, and the FILL12 sequence region. In one embodiment, the filler sequence region is the FILL2 sequence region, the FILL7 sequence region, and the FILL13 sequence region. In one embodiment, the filler sequence region is the FILL2 sequence region, the FILL7 sequence region, and the FILL14 sequence region. In one embodiment, the filler sequence region is the FILL2 sequence region, the FILL7 sequence region, and the FILL15 sequence region. In one embodiment, the filler sequence region is the FILL2 sequence region, the FILL7 sequence region, and the FILL16 sequence region. In one embodiment, the filler sequence region is the FILL2 sequence region, the FILL7 sequence region, and the FILL17 sequence region. In one embodiment, the filler sequence region is the FILL2 sequence region, the FILL7 sequence region, and the FILL18 sequence region. In one embodiment, the filler sequence region is the FILL2 sequence region, the FILL8 sequence region, and the FILL9 sequence region. In one embodiment, the filler sequence region is the FILL2 sequence region, the FILL8 sequence region, and the FILL10 sequence region. In one embodiment, the filler sequence region is the FILL2 sequence region, the FILL8 sequence region, and the FILL11 sequence region. In one embodiment, the filler sequence region is the FILL2 sequence region, the FILL8 sequence region, and the FILL12 sequence region. In one embodiment, the filler sequence region is the FILL2 sequence region, the FILL8 sequence region, and the FILL13 sequence region. In one embodiment, the filler sequence region is the FILL2 sequence region, the FILL8 sequence region, and the FILL14 sequence region. In one embodiment, the filler sequence region is the FILL2 sequence region, the FILL8 sequence region, and the FILL15 sequence region. In one embodiment, the filler sequence region is the FILL2 sequence region, the FILL8 sequence region, and the FILL16 sequence region. In one embodiment, the filler sequence region is the FILL2 sequence region, the FILL8 sequence region, and the FILL17 sequence region. In one embodiment, the filler sequence region is the FILL2 sequence region, the FILL8 sequence region, and the FILL18 sequence region. In one embodiment, the filler sequence region is the FILL2 sequence region, the FILL9 sequence region, and the FILL10 sequence region. In one embodiment, the filler sequence region is the FILL2 sequence region, the FILL9 sequence region, and the FILL11 sequence region. In one embodiment, the filler sequence region is the FILL2 sequence region, the FILL9 sequence region, and the FILL12 sequence region. In one embodiment, the filler sequence region is the FILL2 sequence region, the FILL9 sequence region, and the FILL13 sequence region. In one embodiment, the filler sequence region is the FILL2 sequence region, the FILL9 sequence region, and the FILL14 sequence region. In one embodiment, the filler sequence region is the FILL2 sequence region, the FILL9 sequence region, and the FILL15 sequence region. In one embodiment, the filler sequence region is the FILL2 sequence region, the FILL9 sequence region, and the FILL16 sequence region. In one embodiment, the filler sequence region is the FILL2 sequence region, the FILL9 sequence region, and the FILL17 sequence region. In one embodiment, the filler sequence region is the FILL2 sequence region, the FILL9 sequence region, and the FILL18 sequence region. In one embodiment, the filler sequence region is the FILL2 sequence region, the FILL10 sequence region, and the FILL11 sequence region. In one embodiment, the filler sequence region is the FILL2 sequence region, the FILL10 sequence region, and the FILL12 sequence region. In one embodiment, the filler sequence region is the FILL2 sequence region, the FILL10 sequence region, and the FILL13 sequence region. In one embodiment, the filler sequence region is the FILL2 sequence region, the FILL10 sequence region, and the FILL14 sequence region. In one embodiment, the filler sequence region is the FILL2 sequence region, the FILL10 sequence region, and the FILL15 sequence region. In one embodiment, the filler sequence region is the FILL2 sequence region, the FILL10 sequence region, and the FILL16 sequence region. In one embodiment, the filler sequence region is the FILL2 sequence region, the FILL10 sequence region, and the FILL17 sequence region. In one embodiment, the filler sequence region is the FILL2 sequence region, the FILL10 sequence region, and the FILL18 sequence region. In one embodiment, the filler sequence region is the FILL2 sequence region, the FILL11 sequence region, and the FILL12 sequence region. In one embodiment, the filler sequence region is the FILL2 sequence region, the FILL11 sequence region, and the FILL13 sequence region. In one embodiment, the filler sequence region is the FILL2 sequence region, the FILL11 sequence region, and the FILL14 sequence region. In one embodiment, the filler sequence region is the FILL2 sequence region, the FILL11 sequence region, and the FILL15 sequence region. In one embodiment, the filler sequence region is the FILL2 sequence region, the FILL11 sequence region, and the FILL16 sequence region. In one embodiment, the filler sequence region is the FILL2 sequence region, the FILL11 sequence region, and the FILL17 sequence region. In one embodiment, the filler sequence region is the FILL2 sequence region, the FILL11 sequence region, and the FILL18 sequence region. In one embodiment, the filler sequence region is the FILL2 sequence region, the FILL12 sequence region, and the FILL13 sequence region. In one embodiment, the filler sequence region is the FILL2 sequence region, the FILL12 sequence region, and the FILL14 sequence region. In one embodiment, the filler sequence region is the FILL2 sequence region, the FILL12 sequence region, and the FILL15 sequence region. In one embodiment, the filler sequence region is the FILL2 sequence region, the FILL12 sequence region, and the FILL16 sequence region. In one embodiment, the filler sequence region is the FILL2 sequence region, the FILL12 sequence region, and the FILL17 sequence region. In one embodiment, the filler sequence region is the FILL2 sequence region, the FILL12 sequence region, and the FILL18 sequence region. In one embodiment, the filler sequence region is the FILL2 sequence region, the FILL13 sequence region, and the FILL14 sequence region. In one embodiment, the filler sequence region is the FILL2 sequence region, the FILL13 sequence region, and the FILL15 sequence region. In one embodiment, the filler sequence region is the FILL2 sequence region, the FILL13 sequence region, and the FILL16 sequence region. In one embodiment, the filler sequence region is the FILL2 sequence region, the FILL13 sequence region, and the FILL17 sequence region. In one embodiment, the filler sequence region is the FILL2 sequence region, the FILL13 sequence region, and the FILL18 sequence region. In one embodiment, the filler sequence region is the FILL2 sequence region, the FILL14 sequence region, and the FILL15 sequence region. In one embodiment, the filler sequence region is the FILL2 sequence region, the FILL14 sequence region, and the FILL16 sequence region. In one embodiment, the filler sequence region is the FILL2 sequence region, the FILL14 sequence region, and the FILL17 sequence region. In one embodiment, the filler sequence region is the FILL2 sequence region, the FILL14 sequence region, and the FILL18 sequence region. In one embodiment, the filler sequence region is the FILL2 sequence region, the FILL15 sequence region, and the FILL16 sequence region. In one embodiment, the filler sequence region is the FILL2 sequence region, the FILL15 sequence region, and the FILL17 sequence region. In one embodiment, the filler sequence region is the FILL2 sequence region, the FILL15 sequence region, and the FILL18 sequence region. In one embodiment, the filler sequence region is the FILL2 sequence region, the FILL16 sequence region, and the FILL17 sequence region. In one embodiment, the filler sequence region is the FILL2 sequence region, the FILL16 sequence region, and the FILL18 sequence region. In one embodiment, the filler sequence region is the FILL2 sequence region, the FILL17 sequence region, and the FILL18 sequence region. In one embodiment, the filler sequence region is the FILL3 sequence region, the FILL4 sequence region, and the FILL5 sequence region. In one embodiment, the filler sequence region is the FILL3 sequence region, the FILL4 sequence region, and the FILL6 sequence region. In one embodiment, the filler sequence region is the FILL3 sequence region, the FILL4 sequence region, and the FILL7 sequence region. In one embodiment, the filler sequence region is the FILL3 sequence region, the FILL4 sequence region, and the FILL8 sequence region. In one embodiment, the filler sequence region is the FILL3 sequence region, the FILL4 sequence region, and the FILL9 sequence region. In one embodiment, the filler sequence region is the FILL3 sequence region, the FILL4 sequence region, and the FILL10 sequence region. In one embodiment, the filler sequence region is the FILL3 sequence region, the FILL4 sequence region, and the FILL11 sequence region. In one embodiment, the filler sequence region is the FILL3 sequence region, the FILL4 sequence region, and the FILL12 sequence region. In one embodiment, the filler sequence region is the FILL3 sequence region, the FILL4 sequence region, and the FILL13 sequence region. In one embodiment, the filler sequence region is the FILL3 sequence region, the FILL4 sequence region, and the FILL14 sequence region. In one embodiment, the filler sequence region is the FILL3 sequence region, the FILL4 sequence region, and the FILL15 sequence region. In one embodiment, the filler sequence region is the FILL3 sequence region, the FILL4 sequence region, and the FILL16 sequence region. In one embodiment, the filler sequence region is the FILL3 sequence region, the FILL4 sequence region, and the FILL17 sequence region. In one embodiment, the filler sequence region is the FILL3 sequence region, the FILL4 sequence region, and the FILL18 sequence region. In one embodiment, the filler sequence region is the FILL3 sequence region, the FILL5 sequence region, and the FILL6 sequence region. In one embodiment, the filler sequence region is the FILL3 sequence region, the FILL5 sequence region, and the FILL7 sequence region. In one embodiment, the filler sequence region is the FILL3 sequence region, the FILL5 sequence region, and the FILL8 sequence region. In one embodiment, the filler sequence region is the FILL3 sequence region, the FILL5 sequence region, and the FILL9 sequence region. In one embodiment, the filler sequence region is the FILL3 sequence region, the FILL5 sequence region, and the FILL10 sequence region. In one embodiment, the filler sequence region is the FILL3 sequence region, the FILL5 sequence region, and the FILL11 sequence region. In one embodiment, the filler sequence region is the FILL3 sequence region, the FILL5 sequence region, and the FILL12 sequence region. In one embodiment, the filler sequence region is the FILL3 sequence region, the FILL5 sequence region, and the FILL13 sequence region. In one embodiment, the filler sequence region is the FILL3 sequence region, the FILL5 sequence region, and the FILL14 sequence region. In one embodiment, the filler sequence region is the FILL3 sequence region, the FILL5 sequence region, and the FILL15 sequence region. In one embodiment, the filler sequence region is the FILL3 sequence region, the FILL5 sequence region, and the FILL16 sequence region. In one embodiment, the filler sequence region is the FILL3 sequence region, the FILL5 sequence region, and the FILL17 sequence region. In one embodiment, the filler sequence region is the FILL3 sequence region, the FILL5 sequence region, and the FILL18 sequence region. In one embodiment, the filler sequence region is the FILL3 sequence region, the FILL6 sequence region, and the FILL7 sequence region. In one embodiment, the filler sequence region is the FILL3 sequence region, the FILL6 sequence region, and the FILL8 sequence region. In one embodiment, the filler sequence region is the FILL3 sequence region, the FILL6 sequence region, and the FILL9 sequence region. In one embodiment, the filler sequence region is the FILL3 sequence region, the FILL6 sequence region, and the FILL10 sequence region. In one embodiment, the filler sequence region is the FILL3 sequence region, the FILL6 sequence region, and the FILL11 sequence region. In one embodiment, the filler sequence region is the FILL3 sequence region, the FILL6 sequence region, and the FILL12 sequence region. In one embodiment, the filler sequence region is the FILL3 sequence region, the FILL6 sequence region, and the FILL13 sequence region. In one embodiment, the filler sequence region is the FILL3 sequence region, the FILL6 sequence region, and the FILL14 sequence region. In one embodiment, the filler sequence region is the FILL3 sequence region, the FILL6 sequence region, and the FILL IS sequence region. In one embodiment, the filler sequence region is the FILL3 sequence region, the FILL6 sequence region, and the FILL16 sequence region. In one embodiment, the filler sequence region is the FILL3 sequence region, the FILL6 sequence region, and the FILL17 sequence region. In one embodiment, the filler sequence region is the FILL3 sequence region, the FILL6 sequence region, and the FILL18 sequence region. In one embodiment, the filler sequence region is the FILL3 sequence region, the FILL7 sequence region, and the FILL8 sequence region. In one embodiment, the filler sequence region is the FILL3 sequence region, the FILL7 sequence region, and the FILL9 sequence region. In one embodiment, the filler sequence region is the FILL3 sequence region, the FILL7 sequence region, and the FILL10 sequence region. In one embodiment, the filler sequence region is the FILL3 sequence region, the FILL7 sequence region, and the FILL11 sequence region. In one embodiment, the filler sequence region is the FILL3 sequence region, the FILL7 sequence region, and the FILL12 sequence region. In one embodiment, the filler sequence region is the FILL3 sequence region, the FILL7 sequence region, and the FILL13 sequence region. In one embodiment, the filler sequence region is the FILL3 sequence region, the FILL7 sequence region, and the FILL14 sequence region. In one embodiment, the filler sequence region is the FILL3 sequence region, the FILL7 sequence region, and the FILL15 sequence region. In one embodiment, the filler sequence region is the FILL3 sequence region, the FILL7 sequence region, and the FILL16 sequence region. In one embodiment, the filler sequence region is the FILL3 sequence region, the FILL7 sequence region, and the FILL17 sequence region. In one embodiment, the filler sequence region is the FILL3 sequence region, the FILL7 sequence region, and the FILL18 sequence region. In one embodiment, the filler sequence region is the FILL3 sequence region, the FILL8 sequence region, and the FILL9 sequence region. In one embodiment, the filler sequence region is the FILL3 sequence region, the FILL8 sequence region, and the FILL10 sequence region. In one embodiment, the filler sequence region is the FILL3 sequence region, the FILL8 sequence region, and the FILL11 sequence region. In one embodiment, the filler sequence region is the FILL3 sequence region, the FILL8 sequence region, and the FILL12 sequence region. In one embodiment, the filler sequence region is the FILL3 sequence region, the FILL8 sequence region, and the FILL13 sequence region. In one embodiment, the filler sequence region is the FILL3 sequence region, the FILL8 sequence region, and the FILL14 sequence region. In one embodiment, the filler sequence region is the FILL3 sequence region, the FILL8 sequence region, and the FILL15 sequence region. In one embodiment, the filler sequence region is the FILL3 sequence region, the FILL8 sequence region, and the FILL16 sequence region. In one embodiment, the filler sequence region is the FILL3 sequence region, the FILL8 sequence region, and the FILL17 sequence region. In one embodiment, the filler sequence region is the FILL3 sequence region, the FILL5 sequence region, and the FILL18 sequence region. In one embodiment, the filler sequence region is the FILL3 sequence region, the FILL9 sequence region, and the FILL10 sequence region. In one embodiment, the filler sequence region is the FILL3 sequence region, the FILL9 sequence region, and the FILL11 sequence region. In one embodiment, the filler sequence region is the FILL3 sequence region, the FILL9 sequence region, and the FILL12 sequence region. In one embodiment, the filler sequence region is the FILL3 sequence region, the FILL9 sequence region, and the FILL13 sequence region. In one embodiment, the filler sequence region is the FILL3 sequence region, the FILL9 sequence region, and the FILL14 sequence region. In one embodiment, the filler sequence region is the FILL3 sequence region, the FILL9 sequence region, and the FILL15 sequence region. In one embodiment, the filler sequence region is the FILL3 sequence region, the FILL9 sequence region, and the FILL16 sequence region. In one embodiment, the filler sequence region is the FILL3 sequence region, the FILL9 sequence region, and the FILL17 sequence region. In one embodiment, the filler sequence region is the FILL3 sequence region, the FILL9 sequence region, and the FILL18 sequence region. In one embodiment, the filler sequence region is the FILL3 sequence region, the FILL10 sequence region, and the FILL11 sequence region. In one embodiment, the filler sequence region is the FILL3 sequence region, the FILL10 sequence region, and the FILL12 sequence region. In one embodiment, the filler sequence region is the FILL3 sequence region, the FILL10 sequence region, and the FILL13 sequence region. In one embodiment, the filler sequence region is the FILL3 sequence region, the FILL10 sequence region, and the FILL14 sequence region. In one embodiment, the filler sequence region is the FILL3 sequence region, the FILL10 sequence region, and the FILL15 sequence region. In one embodiment, the filler sequence region is the FILL3 sequence region, the FILL10 sequence region, and the FILL16 sequence region. In one embodiment, the filler sequence region is the FILL3 sequence region, the FILL10 sequence region, and the FILL17 sequence region. In one embodiment, the filler sequence region is the FILL3 sequence region, the FILL10 sequence region, and the FILL18 sequence region. In one embodiment, the filler sequence region is the FILL3 sequence region, the FILL11 sequence region, and the FILL12 sequence region. In one embodiment, the filler sequence region is the FILL3 sequence region, the FILL11 sequence region, and the FILL13 sequence region. In one embodiment, the filler sequence region is the FILL3 sequence region, the FILL11 sequence region, and the FILL14 sequence region. In one embodiment, the filler sequence region is the FILL3 sequence region, the FILL11 sequence region, and the FILL15 sequence region. In one embodiment, the filler sequence region is the FILL3 sequence region, the FILL11 sequence region, and the FILL16 sequence region. In one embodiment, the filler sequence region is the FILL3 sequence region, the FILL11 sequence region, and the FILL17 sequence region. In one embodiment, the filler sequence region is the FILL3 sequence region, the FILL11 sequence region, and the FILL18 sequence region. In one embodiment, the filler sequence region is the FILL3 sequence region, the FILL12 sequence region, and the FILL13 sequence region. In one embodiment, the filler sequence region is the FILL3 sequence region, the FILL12 sequence region, and the FILL14 sequence region. In one embodiment, the filler sequence region is the FILL3 sequence region, the FILL12 sequence region, and the FILL15 sequence region. In one embodiment, the filler sequence region is the FILL3 sequence region, the FILL12 sequence region, and the FILL16 sequence region. In one embodiment, the filler sequence region is the FILL3 sequence region, the FILL12 sequence region, and the FILL17 sequence region. In one embodiment, the filler sequence region is the FILL3 sequence region, the FILL12 sequence region, and the FILL18 sequence region. In one embodiment, the filler sequence region is the FILL3 sequence region, the FILL13 sequence region, and the FILL14 sequence region. In one embodiment, the filler sequence region is the FILL3 sequence region, the FILL13 sequence region, and the FILL15 sequence region. In one embodiment, the filler sequence region is the FILL3 sequence region, the FILL13 sequence region, and the FILL16 sequence region. In one embodiment, the filler sequence region is the FILL3 sequence region, the FILL13 sequence region, and the FILL17 sequence region. In one embodiment, the filler sequence region is the FILL3 sequence region, the FILL13 sequence region, and the FILL18 sequence region. In one embodiment, the filler sequence region is the FILL3 sequence region, the FILL14 sequence region, and the FILL15 sequence region. In one embodiment, the filler sequence region is the FILL3 sequence region, the FILL14 sequence region, and the FILL16 sequence region. In one embodiment, the filler sequence region is the FILL3 sequence region, the FILL14 sequence region, and the FILL17 sequence region. In one embodiment, the filler sequence region is the FILL3 sequence region, the FILL14 sequence region, and the FILL18 sequence region. In one embodiment, the filler sequence region is the FILL3 sequence region, the FILL15 sequence region, and the FILL16 sequence region. In one embodiment, the filler sequence region is the FILL3 sequence region, the FILL15 sequence region, and the FILL17 sequence region. In one embodiment, the filler sequence region is the FILL3 sequence region, the FILL15 sequence region, and the FILL18 sequence region. In one embodiment, the filler sequence region is the FILL3 sequence region, the FILL16 sequence region, and the FILL17 sequence region. In one embodiment, the filler sequence region is the FILL3 sequence region, the FILL16 sequence region, and the FILL18 sequence region. In one embodiment, the filler sequence region is the FILL3 sequence region, the FILL17 sequence region, and the FILL18 sequence region. In one embodiment, the filler sequence region is the FILL4 sequence region, the FILL5 sequence region, and the FILL6 sequence region. In one embodiment, the filler sequence region is the FILL4 sequence region, the FILL5 sequence region, and the FILL7 sequence region. In one embodiment, the filler sequence region is the FILL4 sequence region, the FILL5 sequence region, and the FILL8 sequence region. In one embodiment, the filler sequence region is the FILL4 sequence region, the FILL5 sequence region, and the FILL9 sequence region. In one embodiment, the filler sequence region is the FILL4 sequence region, the FILL5 sequence region, and the FILL10 sequence region. In one embodiment, the filler sequence region is the FILL4 sequence region, the FILL5 sequence region, and the FILL11 sequence region. In one embodiment, the filler sequence region is the FILL4 sequence region, the FILL5 sequence region, and the FILL12 sequence region. In one embodiment, the filler sequence region is the FILL4 sequence region, the FILL5 sequence region, and the FILL13 sequence region. In one embodiment, the filler sequence region is the FILL4 sequence region, the FILL5 sequence region, and the FILL14 sequence region. In one embodiment the filler sequence region is the FILL4 sequence region, the FILL5 sequence region, and the FILL15 sequence region. In one embodiment, the filler sequence region is the FILL4 sequence region, the FILL5 sequence region, and the FILL16 sequence region. In one embodiment, the filler sequence region is the FILL4 sequence region, the FILL5 sequence region, and the FILL17 sequence region. In one embodiment, the filler sequence region is the FILL4 sequence region, the FILL5 sequence region, and the FILL18 sequence region. In one embodiment, the filler sequence region is the FILL4 sequence region, the FILL6 sequence region, and the FILL7 sequence region. In one embodiment, the filler sequence region is the FILL4 sequence region, the FILL6 sequence region, and the FILL8 sequence region. In one embodiment, the filler sequence region is the FILL4 sequence region, the FILL6 sequence region, and the FILL9 sequence region. In one embodiment, the filler sequence region is the FILL4 sequence region, the FILL6 sequence region, and the FILL10 sequence region. In one embodiment, the filler sequence region is the FILL4 sequence region, the FILL6 sequence region, and the FILL11 sequence region. In one embodiment, the filler sequence region is the FILL4 sequence region, the FILL6 sequence region, and the FILL12 sequence region. In one embodiment, the filler sequence region is the FILL4 sequence region, the FILL6 sequence region, and the FILL13 sequence region. In one embodiment, the filler sequence region is the FILL4 sequence region, the FILL6 sequence region, and the FILL14 sequence region. In one embodiment, the filler sequence region is the FILL4 sequence region, the FILL6 sequence region, and the FILL15 sequence region. In one embodiment, the filler sequence region is the FILL4 sequence region, the FILL6 sequence region, and the FILL16 sequence region. In one embodiment, the filler sequence region is the FILL4 sequence region, the FILL6 sequence region, and the FILL17 sequence region. In one embodiment, the filler sequence region is the FILL4 sequence region, the FILL6 sequence region, and the FILL18 sequence region. In one embodiment, the filler sequence region is the FILL4 sequence region, the FILL7 sequence region, and the FILL8 sequence region. In one embodiment, the filler sequence region is the FILL4 sequence region, the FILL7 sequence region, and the FILL9 sequence region. In one embodiment, the filler sequence region is the FILL4 sequence region, the FILL7 sequence region, and the FILL10 sequence region. In one embodiment, the filler sequence region is the FILL4 sequence region, the FILL7 sequence region, and the FILL11 sequence region. In one embodiment, the filler sequence region is the FILL4 sequence region, the FILL7 sequence region, and the FILL12 sequence region. In one embodiment, the filler sequence region is the FILL4 sequence region, the FILL7 sequence region, and the FILL13 sequence region. In one embodiment, the filler sequence region is the FILL4 sequence region, the FILL7 sequence region, and the FILL14 sequence region. In one embodiment, the filler sequence region is the FILL4 sequence region, the FILL7 sequence region, and the FILL15 sequence region. In one embodiment, the filler sequence region is the FILL4 sequence region, the FILL7 sequence region, and the FILL16 sequence region. In one embodiment, the filler sequence region is the FILL4 sequence region, the FILL7 sequence region, and the FILL17 sequence region. In one embodiment, the filler sequence region is the FILL4 sequence region, the FILL7 sequence region, and the FILL18 sequence region. In one embodiment, the filler sequence region is the FILL4 sequence region, the FILL8 sequence region, and the FILL9 sequence region. In one embodiment, the filler sequence region is the FILL4 sequence region, the FILL8 sequence region, and the FILL10 sequence region. In one embodiment, the filler sequence region is the FILL4 sequence region, the FILL8 sequence region, and the FILL11 sequence region. In one embodiment, the filler sequence region is the FILL4 sequence region, the FILL8 sequence region, and the FILL12 sequence region. In one embodiment, the filler sequence region is the FILL4 sequence region, the FILL8 sequence region, and the FILL13 sequence region. In one embodiment, the filler sequence region is the FILL4 sequence region, the FILL8 sequence region, and the FILL14 sequence region. In one embodiment, the filler sequence region is the FILL4 sequence region, the FILL8 sequence region, and the FILL15 sequence region. In one embodiment, the filler sequence region is the FILL4 sequence region, the FILL8 sequence region, and the FILL16 sequence region. In one embodiment, the filler sequence region is the FILL4 sequence region, the FILL8 sequence region, and the FILL17 sequence region. In one embodiment, the filler sequence region is the FILL4 sequence region, the FILL8 sequence region, and the FILL18 sequence region. In one embodiment, the filler sequence region is the FILL4 sequence region, the FILL9 sequence region, and the FILL10 sequence region. In one embodiment, the filler sequence region is the FILL4 sequence region, the FILL9 sequence region, and the FILL11 sequence region. In one embodiment, the filler sequence region is the FILL4 sequence region, the FILL9 sequence region, and the FILL12 sequence region. In one embodiment, the filler sequence region is the FILL4 sequence region, the FILL9 sequence region, and the FILL13 sequence region. In one embodiment, the filler sequence region is the FILL4 sequence region, the FILL9 sequence region, and the FILL14 sequence region. In one embodiment, the filler sequence region is the FILL4 sequence region, the FILL9 sequence region, and the FILL15 sequence region. In one embodiment, the filler sequence region is the FILL4 sequence region, the FILL9 sequence region, and the FILL16 sequence region. In one embodiment, the filler sequence region is the FILL4 sequence region, the FILL9 sequence region, and the FILL17 sequence region. In one embodiment, the filler sequence region is the FILL4 sequence region, the FILL9 sequence region, and the FILL18 sequence region. In one embodiment, the filler sequence region is the FILL4 sequence region, the FILL10 sequence region, and the FILL11 sequence region. In one embodiment, the filler sequence region is the FILL4 sequence region, the FILL10 sequence region, and the FILL12 sequence region. In one embodiment, the filler sequence region is the FILL4 sequence region, the FILL10 sequence region, and the FILL13 sequence region. In one embodiment, the filler sequence region is the FILL4 sequence region, the FILL10 sequence region, and the FILL14 sequence region. In one embodiment, the filler sequence region is the FILL4 sequence region, the FILL10 sequence region, and the FILL15 sequence region. In one embodiment, the filler sequence region is the FILL4 sequence region, the FILL10 sequence region, and the FILL16 sequence region. In one embodiment, the filler sequence region is the FILL4 sequence region, the FILL10 sequence region, and the FILL17 sequence region. In one embodiment, the filler sequence region is the FILL4 sequence region, the FILL10 sequence region, and the FILL18 sequence region. In one embodiment, the filler sequence region is the FILL4 sequence region, the FILL11 sequence region, and the FILL12 sequence region. In one embodiment, the filler sequence region is the FILL4 sequence region, the FILL11 sequence region, and the FILL13 sequence region. In one embodiment, the filler sequence region is the FILL4 sequence region, the FILL11 sequence region, and the FILL14 sequence region. In one embodiment, the filler sequence region is the FILL4 sequence region, the FILL11 sequence region, and the FILL15 sequence region. In one embodiment, the filler sequence region is the FILL4 sequence region, the FILL11 sequence region, and the FILL16 sequence region. In one embodiment, the filler sequence region is the FILL4 sequence region, the FILL11 sequence region, and the FILL17 sequence region. In one embodiment, the filler sequence region is the FILL4 sequence region, the FILL11 sequence region, and the FILL18 sequence region. In one embodiment, the filler sequence region is the FILL4 sequence region, the FILL12 sequence region, and the FILL13 sequence region. In one embodiment, the filler sequence region is the FILL4 sequence region, the FILL12 sequence region, and the FILL14 sequence region. In one embodiment, the filler sequence region is the FILL4 sequence region, the FILL12 sequence region, and the FILL15 sequence region. In one embodiment, the filler sequence region is the FILL4 sequence region, the FILL12 sequence region, and the FILL16 sequence region. In one embodiment, the filler sequence region is the FILL4 sequence region, the FILL12 sequence region, and the FILL17 sequence region. In one embodiment, the filler sequence region is the FILL4 sequence region, the FILL12 sequence region, and the FILL18 sequence region. In one embodiment, the filler sequence region is the FILL4 sequence region, the FILL13 sequence region, and the FILL14 sequence region. In one embodiment, the filler sequence region is the FILL4 sequence region, the FILL13 sequence region, and the FILL15 sequence region. In one embodiment, the filler sequence region is the FILL4 sequence region, the FILL13 sequence region, and the FILL16 sequence region. In one embodiment, the filler sequence region is the FILL4 sequence region, the FILL13 sequence region, and the FILL17 sequence region. In one embodiment, the filler sequence region is the FILL4 sequence region, the FILL13 sequence region, and the FILL18 sequence region. In one embodiment, the filler sequence region is the FILL4 sequence region, the FILL14 sequence region, and the FILL15 sequence region. In one embodiment, the filler sequence region is the FILL4 sequence region, the FILL14 sequence region, and the FILL16 sequence region. In one embodiment, the filler sequence region is the FILL4 sequence region, the FILL14 sequence region, and the FILL17 sequence region. In one embodiment, the filler sequence region is the FILL4 sequence region, the FILL14 sequence region, and the FILL18 sequence region. In one embodiment, the filler sequence region is the FILL4 sequence region, the FILL15 sequence region, and the FILL16 sequence region. In one embodiment, the filler sequence region is the FILL4 sequence region, the FILL15 sequence region, and the FILL17 sequence region. In one embodiment, the filler sequence region is the FILL4 sequence region, the FILL15 sequence region, and the FILL18 sequence region. In one embodiment, the filler sequence region is the FILL4 sequence region, the FILL16 sequence region, and the FILL17 sequence region. In one embodiment, the filler sequence region is the FILL4 sequence region, the FILL16 sequence region, and the FILL18 sequence region. In one embodiment, the filler sequence region is the FILL4 sequence region, the FILL17 sequence region, and the FILL18 sequence region. In one embodiment, the filler sequence region is the FILL5 sequence region, the FILL6 sequence region, and the FILL7 sequence region. In one embodiment, the filler sequence region is the FILL5 sequence region, the FILL6 sequence region, and the FILL8 sequence region. In one embodiment, the filler sequence region is the FILL5 sequence region, the FILL6 sequence region, and the FILL9 sequence region. In one embodiment, the filler sequence region is the FILL5 sequence region, the FILL6 sequence region, and the FILL10 sequence region. In one embodiment, the filler sequence region is the FILL5 sequence region, the FILL6 sequence region, and the FILL11 sequence region. In one embodiment, the filler sequence region is the FILL5 sequence region, the FILL6 sequence region, and the FILL12 sequence region. In one embodiment, the filler sequence region is the FILL5 sequence region, the FILL6 sequence region, and the FILL13 sequence region. In one embodiment, the filler sequence region is the FILL5 sequence region, the FILL6 sequence region, and the FILL14 sequence region. In one embodiment, the filler sequence region is the FILL5 sequence region, the FILL6 sequence region, and the FILL15 sequence region. In one embodiment, the filler sequence region is the FILL5 sequence region, the FILL6 sequence region, and the FILL16 sequence region. In one embodiment, the filler sequence region is the FILL5 sequence region, the FILL6 sequence region, and the FILL17 sequence region. In one embodiment, the filler sequence region is the FILL5 sequence region, the FILL6 sequence region, and the FILL18 sequence region. In one embodiment, the filler sequence region is the FILL5 sequence region, the FILL7 sequence region, and the FILL8 sequence region. In one embodiment, the filler sequence region is the FILL5 sequence region, the FILL7 sequence region, and the FILL9 sequence region. In one embodiment, the filler sequence region is the FILL5 sequence region, the FILL7 sequence region, and the FILL10 sequence region. In one embodiment, the filler sequence region is the FILL5 sequence region, the FILL7 sequence region, and the FILL11 sequence region. In one embodiment, the filler sequence region is the FILL5 sequence region, the FILL7 sequence region, and the FILL12 sequence region. In one embodiment, the filler sequence region is the FILL5 sequence region, the FILL7 sequence region, and the FILL13 sequence region. In one embodiment, the filler sequence region is the FILL5 sequence region, the FILL7 sequence region, and the FILL14 sequence region. In one embodiment, the filler sequence region is the FILL5 sequence region, the FILL7 sequence region, and the FILL15 sequence region. In one embodiment, the filler sequence region is the FILL5 sequence region, the FILL7 sequence region, and the FILL16 sequence region. In one embodiment, the filler sequence region is the FILL5 sequence region, the FILL7 sequence region, and the FILL17 sequence region. In one embodiment, the filler sequence region is the FILL5 sequence region, the FILL7 sequence region, and the FILL18 sequence region. In one embodiment, the filler sequence region is the FILL5 sequence region, the FILL5 sequence region, and the FILL9 sequence region. In one embodiment, the filler sequence region is the FILL5 sequence region, the FILL8 sequence region, and the FILL10 sequence region. In one embodiment, the filler sequence region is the FILL5 sequence region, the FILL5 sequence region, and the FILL11 sequence region. In one embodiment, the filler sequence region is the FILL5 sequence region, the FILL5 sequence region, and the FILL12 sequence region. In one embodiment, the filler sequence region is the FILL5 sequence region, the FILL8 sequence region, and the FILL13 sequence region. In one embodiment, the filler sequence region is the FILL5 sequence region, the FILL8 sequence region, and the FILL14 sequence region. In one embodiment, the filler sequence region is the FILL5 sequence region, the FILL5 sequence region, and the FILL15 sequence region. In one embodiment, the filler sequence region is the FILL5 sequence region, the FILL8 sequence region, and the FILL16 sequence region. In one embodiment, the filler sequence region is the FILL5 sequence region, the FILL5 sequence region, and the FILL17 sequence region. In one embodiment, the filler sequence region is the FILL5 sequence region, the FILL5 sequence region, and the FILL18 sequence region. In one embodiment, the filler sequence region is the FILL5 sequence region, the FILL9 sequence region, and the FILL10 sequence region. In one embodiment, the filler sequence region is the FILL5 sequence region, the FILL9 sequence region, and the FILL11 sequence region. In one embodiment, the filler sequence region is the FILL5 sequence region, the FILL9 sequence region, and the FILL12 sequence region. In one embodiment, the filler sequence region is the FILL5 sequence region, the FILL9 sequence region, and the FILL13 sequence region. In one embodiment, the filler sequence region is the FILL5 sequence region, the FILL9 sequence region, and the FILL14 sequence region. In one embodiment, the filler sequence region is the FILL5 sequence region, the FILL9 sequence region, and the FILL15 sequence region. In one embodiment, the filler sequence region is the FILL5 sequence region, the FILL9 sequence region, and the FILL16 sequence region. In one embodiment, the filler sequence region is the FILL5 sequence region, the FILL9 sequence region, and the FILL17 sequence region. In one embodiment, the filler sequence region is the FILL5 sequence region, the FILL9 sequence region, and the FILL18 sequence region. In one embodiment, the filler sequence region is the FILL5 sequence region, the FILL10 sequence region, and the FILL11 sequence region. In one embodiment, the filler sequence region is the FILL5 sequence region, the FILL10 sequence region, and the FILL12 sequence region. In one embodiment, the filler sequence region is the FILL5 sequence region, the FILL10 sequence region, and the FILL13 sequence region. In one embodiment, the filler sequence region is the FILL5 sequence region, the FILL10 sequence region, and the FILL14 sequence region. In one embodiment, the filler sequence region is the FILL5 sequence region, the FILL10 sequence region, and the FILL15 sequence region. In one embodiment, the filler sequence region is the FILL5 sequence region, the FILL10 sequence region, and the FILL16 sequence region. In one embodiment, the filler sequence region is the FILL5 sequence region, the FILL10 sequence region, and the FILL17 sequence region. In one embodiment, the filler sequence region is the FILL5 sequence region, the FILL10 sequence region, and the FILL18 sequence region. In one embodiment, the filler sequence region is the FILL5 sequence region, the FILL11 sequence region, and the FILL12 sequence region. In one embodiment, the filler sequence region is the FILL5 sequence region, the FILL11 sequence region, and the FILL13 sequence region. In one embodiment, the filler sequence region is the FILL5 sequence region, the FILL11 sequence region, and the FILL14 sequence region. In one embodiment, the filler sequence region is the FILL5 sequence region, the FILL11 sequence region, and the FILL15 sequence region. In one embodiment, the filler sequence region is the FILL5 sequence region, the FILL11 sequence region, and the FILL16 sequence region. In one embodiment, the filler sequence region is the FILL5 sequence region, the FILL11 sequence region, and the FILL17 sequence region. In one embodiment, the filler sequence region is the FILL5 sequence region, the FILL11 sequence region, and the FILL18 sequence region. In one embodiment, the filler sequence region is the FILL5 sequence region, the FILL12 sequence region, and the FILL13 sequence region. In one embodiment, the filler sequence region is the FILL5 sequence region, the FILL12 sequence region, and the FILL14 sequence region. In one embodiment, the filler sequence region is the FILL5 sequence region, the FILL12 sequence region, and the FILL15 sequence region. In one embodiment, the filler sequence region is the FILL5 sequence region, the FILL12 sequence region, and the FILL16 sequence region. In one embodiment, the filler sequence region is the FILL5 sequence region, the FILL12 sequence region, and the FILL17 sequence region. In one embodiment, the filler sequence region is the FILL5 sequence region, the FILL12 sequence region, and the FILL18 sequence region. In one embodiment, the filler sequence region is the FILL5 sequence region, the FILL13 sequence region, and the FILL14 sequence region. In one embodiment, the filler sequence region is the FILL5 sequence region, the FILL13 sequence region, and the FILL15 sequence region. In one embodiment, the filler sequence region is the FILL5 sequence region, the FILL13 sequence region, and the FILL16 sequence region. In one embodiment, the filler sequence region is the FILL5 sequence region, the FILL13 sequence region, and the FILL17 sequence region. In one embodiment, the filler sequence region is the FILL5 sequence region, the FILL13 sequence region, and the FILL18 sequence region. In one embodiment, the filler sequence region is the FILL5 sequence region, the FILL14 sequence region, and the FILL15 sequence region. In one embodiment, the filler sequence region is the FILL5 sequence region, the FILL14 sequence region, and the FILL16 sequence region. In one embodiment, the filler sequence region is the FILL5 sequence region, the FILL14 sequence region, and the FILL17 sequence region. In one embodiment, the filler sequence region is the FILL5 sequence region, the FILL14 sequence region, and the FILL18 sequence region. In one embodiment, the filler sequence region is the FILL5 sequence region, the FILL15 sequence region, and the FILL16 sequence region. In one embodiment, the filler sequence region is the FILL5 sequence region, the FILL15 sequence region, and the FILL17 sequence region. In one embodiment, the filler sequence region is the FILL5 sequence region, the FILL15 sequence region, and the FILL18 sequence region. In one embodiment, the filler sequence region is the FILL5 sequence region, the FILL16 sequence region, and the FILL17 sequence region. In one embodiment, the filler sequence region is the FILL5 sequence region, the FILL16 sequence region, and the FILL18 sequence region. In one embodiment, the filler sequence region is the FILL5 sequence region, the FILL17 sequence region, and the FILL18 sequence region. In one embodiment, the filler sequence region is the FILL6 sequence region, the FILL7 sequence region, and the FILL8 sequence region. In one embodiment, the filler sequence region is the FILL6 sequence region, the FILL7 sequence region, and the FILL9 sequence region. In one embodiment, the filler sequence region is the FILL6 sequence region, the FILL7 sequence region, and the FILL10 sequence region. In one embodiment, the filler sequence region is the FILL6 sequence region, the FILL7 sequence region, and the FILL11 sequence region. In one embodiment, the filler sequence region is the FILL6 sequence region, the FILL7 sequence region, and the FILL12 sequence region. In one embodiment, the filler sequence region is the FILL6 sequence region, the FILL7 sequence region, and the FILL13 sequence region. In one embodiment, the filler sequence region is the FILL6 sequence region, the FILL7 sequence region, and the FILL14 sequence region. In one embodiment, the filler sequence region is the FILL6 sequence region, the FILL7 sequence region, and the FILL15 sequence region. In one embodiment, the filler sequence region is the FILL6 sequence region, the FILL7 sequence region, and the FILL16 sequence region. In one embodiment, the filler sequence region is the FILL6 sequence region, the FILL7 sequence region, and the FILL17 sequence region. In one embodiment, the filler sequence region is the FILL6 sequence region, the FILL7 sequence region, and the FILL18 sequence region. In one embodiment, the filler sequence region is the FILL6 sequence region, the FILL8 sequence region, and the FILL9 sequence region. In one embodiment, the filler sequence region is the FILL6 sequence region, the FILL8 sequence region, and the FILL10 sequence region. In one embodiment, the filler sequence region is the FILL6 sequence region, the FILL5 sequence region, and the FILL11 sequence region. In one embodiment, the filler sequence region is the FILL6 sequence region, the FILL8 sequence region, and the FILL12 sequence region. In one embodiment, the filler sequence region is the FILL6 sequence region, the FILL8 sequence region, and the FILL13 sequence region. In one embodiment, the filler sequence region is the FILL6 sequence region, the FILL8 sequence region, and the FILL14 sequence region. In one embodiment, the filler sequence region is the FILL6 sequence region, the FILL8 sequence region, and the FILL15 sequence region. In one embodiment, the filler sequence region is the FILL6 sequence region, the FILL8 sequence region, and the FILL16 sequence region. In one embodiment, the filler sequence region is the FILL6 sequence region, the FILL8 sequence region, and the FILL17 sequence region. In one embodiment, the filler sequence region is the FILL6 sequence region, the FILL8 sequence region, and the FILL18 sequence region. In one embodiment, the filler sequence region is the FILL6 sequence region, the FILL9 sequence region, and the FILL10 sequence region. In one embodiment, the filler sequence region is the FILL6 sequence region, the FILL9 sequence region, and the FILL11 sequence region. In one embodiment, the filler sequence region is the FILL6 sequence region, the FILL9 sequence region, and the FILL12 sequence region. In one embodiment, the filler sequence region is the FILL6 sequence region, the FILL9 sequence region, and the FILL13 sequence region. In one embodiment, the filler sequence region is the FILL6 sequence region, the FILL9 sequence region, and the FILL14 sequence region. In one embodiment, the filler sequence region is the FILL6 sequence region, the FILL9 sequence region, and the FILL15 sequence region. In one embodiment, the filler sequence region is the FILL6 sequence region, the FILL9 sequence region, and the FILL16 sequence region. In one embodiment, the filler sequence region is the FILL6 sequence region, the FILL9 sequence region, and the FILL17 sequence region. In one embodiment, the filler sequence region is the FILL6 sequence region, the FILL9 sequence region, and the FILL18 sequence region. In one embodiment, the filler sequence region is the FILL6 sequence region, the FILL10 sequence region, and the FILL11 sequence region. In one embodiment, the filler sequence region is the FILL6 sequence region, the FILL10 sequence region, and the FILL12 sequence region. In one embodiment, the filler sequence region is the FILL6 sequence region, the FILL10 sequence region, and the FILL13 sequence region. In one embodiment, the filler sequence region is the FILL6 sequence region, the FILL10 sequence region, and the FILL14 sequence region. In one embodiment, the filler sequence region is the FILL6 sequence region, the FILL10 sequence region, and the FILL15 sequence region. In one embodiment, the filler sequence region is the FILL6 sequence region, the FILL10 sequence region, and the FILL16 sequence region. In one embodiment, the filler sequence region is the FILL6 sequence region, the FILL10 sequence region, and the FILL17 sequence region. In one embodiment, the filler sequence region is the FILL6 sequence region, the FILL10 sequence region, and the FILL18 sequence region. In one embodiment, the filler sequence region is the FILL6 sequence region, the FILL11 sequence region, and the FILL12 sequence region. In one embodiment, the filler sequence region is the FILL6 sequence region, the FILL11 sequence region, and the FILL13 sequence region. In one embodiment, the filler sequence region is the FILL6 sequence region, the FILL11 sequence region, and the FILL14 sequence region. In one embodiment, the filler sequence region is the FILL6 sequence region, the FILL11 sequence region, and the FILL15 sequence region. In one embodiment, the filler sequence region is the FILL6 sequence region, the FILL11 sequence region, and the FILL16 sequence region. In one embodiment, the filler sequence region is the FILL6 sequence region, the FILL11 sequence region, and the FILL17 sequence region. In one embodiment, the filler sequence region is the FILL6 sequence region, the FILL11 sequence region, and the FILL18 sequence region. In one embodiment, the filler sequence region is the FILL6 sequence region, the FILL12 sequence region, and the FILL13 sequence region. In one embodiment, the filler sequence region is the FILL6 sequence region, the FILL12 sequence region, and the FILL14 sequence region. In one embodiment, the filler sequence region is the FILL6 sequence region, the FILL12 sequence region, and the FILL15 sequence region. In one embodiment, the filler sequence region is the FILL6 sequence region, the FILL12 sequence region, and the FILL16 sequence region. In one embodiment, the filler sequence region is the FILL6 sequence region, the FILL12 sequence region, and the FILL17 sequence region. In one embodiment, the filler sequence region is the FILL6 sequence region, the FILL12 sequence region, and the FILL18 sequence region. In one embodiment, the filler sequence region is the FILL6 sequence region, the FILL13 sequence region, and the FILL14 sequence region. In one embodiment, the filler sequence region is the FILL6 sequence region, the FILL13 sequence region, and the FILL15 sequence region. In one embodiment, the filler sequence region is the FILL6 sequence region, the FILL13 sequence region, and the FILL16 sequence region. In one embodiment, the filler sequence region is the FILL6 sequence region, the FILL13 sequence region, and the FILL17 sequence region. In one embodiment, the filler sequence region is the FILL6 sequence region, the FILL13 sequence region, and the FILL18 sequence region. In one embodiment, the filler sequence region is the FILL6 sequence region, the FILL14 sequence region, and the FILL15 sequence region. In one embodiment, the filler sequence region is the FILL6 sequence region, the FILL14 sequence region, and the FILL16 sequence region. In one embodiment, the filler sequence region is the FILL6 sequence region, the FILL14 sequence region, and the FILL17 sequence region. In one embodiment, the filler sequence region is the FILL6 sequence region, the FILL14 sequence region, and the FILL18 sequence region. In one embodiment, the filler sequence region is the FILL6 sequence region, the FILL15 sequence region, and the FILL16 sequence region. In one embodiment, the filler sequence region is the FILL6 sequence region, the FILL15 sequence region, and the FILL17 sequence region. In one embodiment, the filler sequence region is the FILL6 sequence region, the FILL15 sequence region, and the FILL18 sequence region. In one embodiment, the filler sequence region is the FILL6 sequence region, the FILL16 sequence region, and the FILL17 sequence region. In one embodiment, the filler sequence region is the FILL6 sequence region, the FILL16 sequence region, and the FILL18 sequence region. In one embodiment, the filler sequence region is the FILL6 sequence region, the FILL17 sequence region, and the FILL18 sequence region. In one embodiment, the filler sequence region is the FILL7 sequence region, the FILL8 sequence region, and the FILL9 sequence region. In one embodiment, the filler sequence region is the FILL7 sequence region, the FILL8 sequence region, and the FILL10 sequence region. In one embodiment, the filler sequence region is the FILL7 sequence region, the FILL8 sequence region, and the FILL11 sequence region. In one embodiment, the filler sequence region is the FILL7 sequence region, the FILL8 sequence region, and the FILL12 sequence region. In one embodiment, the filler sequence region is the FILL7 sequence region, the FILL8 sequence region, and the FILL13 sequence region. In one embodiment, the filler sequence region is the FILL7 sequence region, the FILL8 sequence region, and the FILL14 sequence region. In one embodiment, the filler sequence region is the FILL7 sequence region, the FILL8 sequence region, and the FILL15 sequence region. In one embodiment, the filler sequence region is the FILL7 sequence region, the FILL8 sequence region, and the FILL16 sequence region. In one embodiment, the filler sequence region is the FILL7 sequence region, the FILL8 sequence region, and the FILL17 sequence region. In one embodiment, the filler sequence region is the FILL7 sequence region, the FILL8 sequence region, and the FILL18 sequence region. In one embodiment, the filler sequence region is the FILL7 sequence region, the FILL9 sequence region, and the FILL10 sequence region. In one embodiment, the filler sequence region is the FILL7 sequence region, the FILL9 sequence region, and the FILL11 sequence region. In one embodiment, the filler sequence region is the FILL7 sequence region, the FILL9 sequence region, and the FILL12 sequence region. In one embodiment, the filler sequence region is the FILL7 sequence region, the FILL9 sequence region, and the FILL13 sequence region. In one embodiment, the filler sequence region is the FILL7 sequence region, the FILL9 sequence region, and the FILL14 sequence region. In one embodiment, the filler sequence region is the FILL7 sequence region, the FILL9 sequence region, and the FILL15 sequence region. In one embodiment, the filler sequence region is the FILL7 sequence region, the FILL9 sequence region, and the FILL16 sequence region. In one embodiment, the filler sequence region is the FILL7 sequence region, the FILL9 sequence region, and the FILL17 sequence region. In one embodiment, the filler sequence region is the FILL7 sequence region, the FILL9 sequence region, and the FILL18 sequence region. In one embodiment, the filler sequence region is the FILL7 sequence region, the FILL10 sequence region, and the FILL11 sequence region. In one embodiment, the filler sequence region is the FILL7 sequence region, the FILL10 sequence region, and the FILL12 sequence region. In one embodiment, the filler sequence region is the FILL7 sequence region, the FILL10 sequence region, and the FILL13 sequence region. In one embodiment, the filler sequence region is the FILL7 sequence region, the FILL10 sequence region, and the FILL14 sequence region. In one embodiment, the filler sequence region is the FILL7 sequence region, the FILL10 sequence region, and the FILL15 sequence region. In one embodiment, the filler sequence region is the FILL7 sequence region, the FILL10 sequence region, and the FILL16 sequence region. In one embodiment, the filler sequence region is the FILL7 sequence region, the FILL10 sequence region, and the FILL17 sequence region. In one embodiment, the filler sequence region is the FILL7 sequence region, the FILL10 sequence region, and the FILL18 sequence region. In one embodiment, the filler sequence region is the FILL7 sequence region, the FILL11 sequence region, and the FILL12 sequence region. In one embodiment, the filler sequence region is the FILL7 sequence region, the FILL11 sequence region, and the FILL13 sequence region. In one embodiment, the filler sequence region is the FILL7 sequence region, the FILL11 sequence region, and the FILL14 sequence region. In one embodiment, the filler sequence region is the FILL7 sequence region, the FILL11 sequence region, and the FILL15 sequence region. In one embodiment, the filler sequence region is the FILL7 sequence region, the FILL11 sequence region, and the FILL16 sequence region. In one embodiment, the filler sequence region is the FILL7 sequence region, the FILL11 sequence region, and the FILL17 sequence region. In one embodiment, the filler sequence region is the FILL7 sequence region, the FILL11 sequence region, and the FILL18 sequence region. In one embodiment, the filler sequence region is the FILL7 sequence region, the FILL12 sequence region, and the FILL13 sequence region. In one embodiment, the filler sequence region is the FILL7 sequence region, the FILL12 sequence region, and the FILL14 sequence region. In one embodiment, the filler sequence region is the FILL7 sequence region, the FILL12 sequence region, and the FILL15 sequence region. In one embodiment, the filler sequence region is the FILL7 sequence region, the FILL12 sequence region, and the FILL16 sequence region. In one embodiment, the filler sequence region is the FILL7 sequence region, the FILL12 sequence region, and the FILL17 sequence region. In one embodiment, the filler sequence region is the FILL7 sequence region, the FILL12 sequence region, and the FILL18 sequence region. In one embodiment, the filler sequence region is the FILL7 sequence region, the FILL13 sequence region, and the FILL14 sequence region. In one embodiment, the filler sequence region is the FILL7 sequence region, the FILL13 sequence region, and the FILL15 sequence region. In one embodiment, the filler sequence region is the FILL7 sequence region, the FILL13 sequence region, and the FILL16 sequence region. In one embodiment, the filler sequence region is the FILL7 sequence region, the FILL13 sequence region, and the FILL17 sequence region. In one embodiment, the filler sequence region is the FILL7 sequence region, the FILL13 sequence region, and the FILL18 sequence region. In one embodiment, the filler sequence region is the FILL7 sequence region, the FILL14 sequence region, and the FILL15 sequence region. In one embodiment, the filler sequence region is the FILL7 sequence region, the FILL14 sequence region, and the FILL16 sequence region. In one embodiment, the filler sequence region is the FILL7 sequence region, the FILL14 sequence region, and the FILL17 sequence region. In one embodiment, the filler sequence region is the FILL7 sequence region, the FILL14 sequence region, and the FILL18 sequence region. In one embodiment, the filler sequence region is the FILL7 sequence region, the FILL15 sequence region, and the FILL16 sequence region. In one embodiment, the filler sequence region is the FILL7 sequence region, the FILL15 sequence region, and the FILL17 sequence region. In one embodiment, the filler sequence region is the FILL7 sequence region, the FILL15 sequence region, and the FILL18 sequence region. In one embodiment, the filler sequence region is the FILL7 sequence region, the FILL16 sequence region, and the FILL17 sequence region. In one embodiment, the filler sequence region is the FILL7 sequence region, the FILL16 sequence region, and the FILL18 sequence region. In one embodiment, the filler sequence region is the FILL7 sequence region, the FILL17 sequence region, and the FILL18 sequence region. In one embodiment, the filler sequence region is the FILL8 sequence region, the FILL9 sequence region, and the FILL10 sequence region. In one embodiment, the filler sequence region is the FILL5 sequence region, the FILL9 sequence region, and the FILL11 sequence region. In one embodiment, the filler sequence region is the FILL5 sequence region, the FILL9 sequence region, and the FILL12 sequence region. In one embodiment, the filler sequence region is the FILL8 sequence region, the FILL9 sequence region, and the FILL13 sequence region. In one embodiment, the filler sequence region is the FILL8 sequence region, the FILL9 sequence region, and the FILL14 sequence region. In one embodiment, the filler sequence region is the FILL8 sequence region, the FILL9 sequence region, and the FILL15 sequence region. In one embodiment, the filler sequence region is the FILL8 sequence region, the FILL9 sequence region, and the FILL16 sequence region. In one embodiment, the filler sequence region is the FILL8 sequence region, the FILL9 sequence region, and the FILL17 sequence region. In one embodiment, the filler sequence region is the FILL8 sequence region, the FILL9 sequence region, and the FILL18 sequence region. In one embodiment, the filler sequence region is the FILL8 sequence region, the FILL10 sequence region, and the FILL11 sequence region. In one embodiment, the filler sequence region is the FILL8 sequence region, the FILL10 sequence region, and the FILL12 sequence region. In one embodiment, the filler sequence region is the FILL8 sequence region, the FILL10 sequence region, and the FILL13 sequence region. In one embodiment, the filler sequence region is the FILL8 sequence region, the FILL10 sequence region, and the FILL14 sequence region. In one embodiment, the filler sequence region is the FILL8 sequence region, the FILL10 sequence region, and the FILL15 sequence region. In one embodiment, the filler sequence region is the FILL8 sequence region, the FILL10 sequence region, and the FILL16 sequence region. In one embodiment, the filler sequence region is the FILL8 sequence region, the FILL10 sequence region, and the FILL17 sequence region. In one embodiment, the filler sequence region is the FILL5 sequence region, the FILL10 sequence region, and the FILL18 sequence region. In one embodiment, the filler sequence region is the FILL8 sequence region, the FILL11 sequence region, and the FILL12 sequence region. In one embodiment, the filler sequence region is the FILL8 sequence region, the FILL11 sequence region, and the FILL13 sequence region. In one embodiment, the filler sequence region is the FILL8 sequence region, the FILL11 sequence region, and the FILL14 sequence region. In one embodiment, the filler sequence region is the FILL8 sequence region, the FILL11 sequence region, and the FILL15 sequence region. In one embodiment, the filler sequence region is the FILL8 sequence region, the FILL11 sequence region, and the FILL16 sequence region. In one embodiment, the filler sequence region is the FILL8 sequence region, the FILL11 sequence region, and the FILL17 sequence region. In one embodiment, the filler sequence region is the FILL8 sequence region, the FILL11 sequence region, and the FILL18 sequence region. In one embodiment, the filler sequence region is the FILL8 sequence region, the FILL12 sequence region, and the FILL13 sequence region. In one embodiment, the filler sequence region is the FILL8 sequence region, the FILL12 sequence region, and the FILL14 sequence region. In one embodiment, the filler sequence region is the FILL8 sequence region, the FILL12 sequence region, and the FILL15 sequence region. In one embodiment, the filler sequence region is the FILL8 sequence region, the FILL12 sequence region, and the FILL16 sequence region. In one embodiment, the filler sequence region is the FILL8 sequence region, the FILL12 sequence region, and the FILL17 sequence region. In one embodiment, the filler sequence region is the FILL8 sequence region, the FILL12 sequence region, and the FILL18 sequence region. In one embodiment, the filler sequence region is the FILL8 sequence region, the FILL13 sequence region, and the FILL14 sequence region. In one embodiment, the filler sequence region is the FILL8 sequence region, the FILL13 sequence region, and the FILL15 sequence region. In one embodiment, the filler sequence region is the FILL8 sequence region, the FILL13 sequence region, and the FILL16 sequence region. In one embodiment, the filler sequence region is the FILL8 sequence region, the FILL13 sequence region, and the FILL17 sequence region. In one embodiment, the filler sequence region is the FILL8 sequence region, the FILL13 sequence region, and the FILL18 sequence region. In one embodiment, the filler sequence region is the FILL8 sequence region, the FILL14 sequence region, and the FILL15 sequence region. In one embodiment, the filler sequence region is the FILL8 sequence region, the FILL14 sequence region, and the FILL16 sequence region. In one embodiment, the filler sequence region is the FILL8 sequence region, the FILL14 sequence region, and the FILL17 sequence region. In one embodiment, the filler sequence region is the FILL8 sequence region, the FILL14 sequence region, and the FILL18 sequence region. In one embodiment, the filler sequence region is the FILL8 sequence region, the FILL15 sequence region, and the FILL16 sequence region. In one embodiment, the filler sequence region is the FILL8 sequence region, the FILL15 sequence region, and the FILL17 sequence region. In one embodiment, the filler sequence region is the FILL8 sequence region, the FILL15 sequence region, and the FILL18 sequence region. In one embodiment, the filler sequence region is the FILL8 sequence region, the FILL16 sequence region, and the FILL17 sequence region. In one embodiment, the filler sequence region is the FILL8 sequence region, the FILL16 sequence region, and the FILL18 sequence region. In one embodiment, the filler sequence region is the FILL8 sequence region, the FILL17 sequence region, and the FILL18 sequence region. In one embodiment, the filler sequence region is the FILL9 sequence region, the FILL10 sequence region, and the FILL11 sequence region. In one embodiment, the filler sequence region is the FILL9 sequence region, the FILL10 sequence region, and the FILL12 sequence region. In one embodiment, the filler sequence region is the FILL9 sequence region, the FILL10 sequence region, and the FILL13 sequence region. In one embodiment, the filler sequence region is the FILL9 sequence region, the FILL10 sequence region, and the FILL14 sequence region. In one embodiment, the filler sequence region is the FILL9 sequence region, the FILL10 sequence region, and the FILL15 sequence region. In one embodiment, the filler sequence region is the FILL9 sequence region, the FILL10 sequence region, and the FILL16 sequence region. In one embodiment, the filler sequence region is the FILL9 sequence region, the FILL10 sequence region, and the FILL17 sequence region. In one embodiment, the filler sequence region is the FILL9 sequence region, the FILL10 sequence region, and the FILL18 sequence region. In one embodiment, the filler sequence region is the FILL9 sequence region, the FILL11 sequence region, and the FILL12 sequence region. In one embodiment, the filler sequence region is the FILL9 sequence region, the FILL11 sequence region, and the FILL13 sequence region. In one embodiment, the filler sequence region is the FILL9 sequence region, the FILL11 sequence region, and the FILL14 sequence region. In one embodiment, the filler sequence region is the FILL9 sequence region, the FILL11 sequence region, and the FILL15 sequence region. In one embodiment, the filler sequence region is the FILL9 sequence region, the FILL11 sequence region, and the FILL16 sequence region. In one embodiment, the filler sequence region is the FILL9 sequence region, the FILL11 sequence region, and the FILL17 sequence region. In one embodiment, the filler sequence region is the FILL9 sequence region, the FILL11 sequence region, and the FILL18 sequence region. In one embodiment, the filler sequence region is the FILL9 sequence region, the FILL12 sequence region, and the FILL13 sequence region. In one embodiment, the filler sequence region is the FILL9 sequence region, the FILL12 sequence region, and the FILL14 sequence region. In one embodiment, the filler sequence region is the FILL9 sequence region, the FILL12 sequence region, and the FILL15 sequence region. In one embodiment, the filler sequence region is the FILL9 sequence region, the FILL12 sequence region, and the FILL16 sequence region. In one embodiment, the filler sequence region is the FILL9 sequence region, the FILL12 sequence region, and the FILL17 sequence region. In one embodiment, the filler sequence region is the FILL9 sequence region, the FILL12 sequence region, and the FILL18 sequence region. In one embodiment, the filler sequence region is the FILL9 sequence region, the FILL13 sequence region, and the FILL14 sequence region. In one embodiment, the filler sequence region is the FILL9 sequence region, the FILL13 sequence region, and the FILL15 sequence region. In one embodiment, the filler sequence region is the FILL9 sequence region, the FILL13 sequence region, and the FILL16 sequence region. In one embodiment, the filler sequence region is the FILL9 sequence region, the FILL13 sequence region, and the FILL17 sequence region. In one embodiment, the filler sequence region is the FILL9 sequence region, the FILL13 sequence region, and the FILL18 sequence region. In one embodiment, the filler sequence region is the FILL9 sequence region, the FILL14 sequence region, and the FILL15 sequence region. In one embodiment, the filler sequence region is the FILL9 sequence region, the FILL14 sequence region, and the FILL16 sequence region. In one embodiment, the filler sequence region is the FILL9 sequence region, the FILL14 sequence region, and the FILL17 sequence region. In one embodiment, the filler sequence region is the FILL9 sequence region, the FILL14 sequence region, and the FILL18 sequence region. In one embodiment, the filler sequence region is the FILL9 sequence region, the FILL15 sequence region, and the FILL16 sequence region. In one embodiment, the filler sequence region is the FILL9 sequence region, the FILL15 sequence region, and the FILL17 sequence region. In one embodiment, the filler sequence region is the FILL9 sequence region, the FILL15 sequence region, and the FILL18 sequence region. In one embodiment, the filler sequence region is the FILL9 sequence region, the FILL16 sequence region, and the FILL17 sequence region. In one embodiment, the filler sequence region is the FILL9 sequence region, the FILL16 sequence region, and the FILL18 sequence region. In one embodiment, the filler sequence region is the FILL9 sequence region, the FILL17 sequence region, and the FILL18 sequence region. In one embodiment, the filler sequence region is the FILL10 sequence region, the FILL11 sequence region, and the FILL12 sequence region. In one embodiment, the filler sequence region is the FILL10 sequence region, the FILL11 sequence region, and the FILL13 sequence region. In one embodiment, the filler sequence region is the FILL10 sequence region, the FILL11 sequence region, and the FILL14 sequence region. In one embodiment, the filler sequence region is the FILL10 sequence region, the FILL11 sequence region, and the FILL15 sequence region. In one embodiment, the filler sequence region is the FILL10 sequence region, the FILL11 sequence region, and the FILL16 sequence region. In one embodiment, the filler sequence region is the FILL10 sequence region, the FILL11 sequence region, and the FILL17 sequence region. In one embodiment, the filler sequence region is the FILL10 sequence region, the FILL11 sequence region, and the FILL18 sequence region. In one embodiment, the filler sequence region is the FILL10 sequence region, the FILL12 sequence region, and the FILL13 sequence region. In one embodiment, the filler sequence region is the FILL10 sequence region, the FILL12 sequence region, and the FILL14 sequence region. In one embodiment, the filler sequence region is the FILL10 sequence region, the FILL12 sequence region, and the FILL15 sequence region. In one embodiment, the filler sequence region is the FILL10 sequence region, the FILL12 sequence region, and the FILL16 sequence region. In one embodiment, the filler sequence region is the FILL10 sequence region, the FILL12 sequence region, and the FILL17 sequence region. In one embodiment, the filler sequence region is the FILL10 sequence region, the FILL12 sequence region, and the FILL18 sequence region. In one embodiment, the filler sequence region is the FILL10 sequence region, the FILL13 sequence region, and the FILL14 sequence region. In one embodiment, the filler sequence region is the FILL10 sequence region, the FILL13 sequence region, and the FILL15 sequence region. In one embodiment, the filler sequence region is the FILL10 sequence region, the FILL13 sequence region, and the FILL16 sequence region. In one embodiment, the filler sequence region is the FILL10 sequence region, the FILL13 sequence region, and the FILL17 sequence region. In one embodiment, the filler sequence region is the FILL10 sequence region, the FILL13 sequence region, and the FILL18 sequence region. In one embodiment, the filler sequence region is the FILL10 sequence region, the FILL14 sequence region, and the FILL15 sequence region. In one embodiment, the filler sequence region is the FILL10 sequence region, the FILL14 sequence region, and the FILL16 sequence region. In one embodiment, the filler sequence region is the FILL10 sequence region, the FILL14 sequence region, and the FILL17 sequence region. In one embodiment, the filler sequence region is the FILL10 sequence region, the FILL14 sequence region, and the FILL18 sequence region. In one embodiment, the filler sequence region is the FILL10 sequence region, the FILL15 sequence region, and the FILL16 sequence region. In one embodiment, the filler sequence region is the FILL10 sequence region, the FILL15 sequence region, and the FILL17 sequence region. In one embodiment, the filler sequence region is the FILL10 sequence region, the FILL15 sequence region, and the FILL18 sequence region. In one embodiment, the filler sequence region is the FILL10 sequence region, the FILL16 sequence region, and the FILL17 sequence region. In one embodiment, the filler sequence region is the FILL10 sequence region, the FILL16 sequence region, and the FILL18 sequence region. In one embodiment, the filler sequence region is the FILL10 sequence region, the FILL17 sequence region, and the FILL18 sequence region. In one embodiment, the filler sequence region is the FILL11 sequence region, the FILL12 sequence region, and the FILL13 sequence region. In one embodiment, the filler sequence region is the FILL11 sequence region, the FILL12 sequence region, and the FILL14 sequence region. In one embodiment, the filler sequence region is the FILL11 sequence region, the FILL12 sequence region, and the FILL15 sequence region. In one embodiment, the filler sequence region is the FILL11 sequence region, the FILL12 sequence region, and the FILL16 sequence region. In one embodiment, the filler sequence region is the FILL11 sequence region, the FILL12 sequence region, and the FILL17 sequence region. In one embodiment, the filler sequence region is the FILL11 sequence region, the FILL12 sequence region, and the FILL18 sequence region. In one embodiment, the filler sequence region is the FILL11 sequence region, the FILL13 sequence region, and the FILL14 sequence region. In one embodiment, the filler sequence region is the FILL11 sequence region, the FILL13 sequence region, and the FILL15 sequence region. In one embodiment, the filler sequence region is the FILL11 sequence region, the FILL13 sequence region, and the FILL16 sequence region. In one embodiment, the filler sequence region is the FILL11 sequence region, the FILL13 sequence region, and the FILL17 sequence region. In one embodiment, the filler sequence region is the FILL11 sequence region, the FILL13 sequence region, and the FILL18 sequence region. In one embodiment, the filler sequence region is the FILL11 sequence region, the FILL14 sequence region, and the FILL15 sequence region. In one embodiment, the filler sequence region is the FILL11 sequence region, the FILL14 sequence region, and the FILL16 sequence region. In one embodiment, the filler sequence region is the FILL11 sequence region, the FILL14 sequence region, and the FILL17 sequence region. In one embodiment, the filler sequence region is the FILL11 sequence region, the FILL14 sequence region, and the FILL18 sequence region. In one embodiment, the filler sequence region is the FILL11 sequence region, the FILL15 sequence region, and the FILL16 sequence region. In one embodiment, the filler sequence region is the FILL11 sequence region, the FILL15 sequence region, and the FILL17 sequence region. In one embodiment, the filler sequence region is the FILL11 sequence region, the FILL15 sequence region, and the FILL18 sequence region. In one embodiment, the filler sequence region is the FILL11 sequence region, the FILL16 sequence region, and the FILL17 sequence region. In one embodiment, the filler sequence region is the FILL11 sequence region, the FILL16 sequence region, and the FILL18 sequence region. In one embodiment, the filler sequence region is the FILL11 sequence region, the FILL17 sequence region, and the FILL18 sequence region. In one embodiment, the filler sequence region is the FILL12 sequence region, the FILL13 sequence region, and the FILL14 sequence region. In one embodiment, the filler sequence region is the FILL12 sequence region, the FILL13 sequence region, and the FILL15 sequence region. In one embodiment, the filler sequence region is the FILL12 sequence region, the FILL13 sequence region, and the FILL16 sequence region. In one embodiment, the filler sequence region is the FILL12 sequence region, the FILL13 sequence region, and the FILL17 sequence region. In one embodiment, the filler sequence region is the FILL12 sequence region, the FILL13 sequence region, and the FILL18 sequence region. In one embodiment, the filler sequence region is the FILL12 sequence region, the FILL14 sequence region, and the FILL15 sequence region. In one embodiment, the filler sequence region is the FILL12 sequence region, the FILL14 sequence region, and the FILL16 sequence region. In one embodiment, the filler sequence region is the FILL12 sequence region, the FILL14 sequence region, and the FILL17 sequence region. In one embodiment, the filler sequence region is the FILL12 sequence region, the FILL14 sequence region, and the FILL18 sequence region. In one embodiment, the filler sequence region is the FILL12 sequence region, the FILL15 sequence region, and the FILL16 sequence region. In one embodiment, the filler sequence region is the FILL12 sequence region, the FILL15 sequence region, and the FILL17 sequence region. In one embodiment, the filler sequence region is the FILL12 sequence region, the FILL15 sequence region, and the FILL18 sequence region. In one embodiment, the filler sequence region is the FILL12 sequence region, the FILL16 sequence region, and the FILL17 sequence region. In one embodiment, the filler sequence region is the FILL12 sequence region, the FILL16 sequence region, and the FILL18 sequence region. In one embodiment, the filler sequence region is the FILL12 sequence region, the FILL17 sequence region, and the FILL18 sequence region. In one embodiment, the filler sequence region is the FILL13 sequence region, the FILL14 sequence region, and the FILL15 sequence region. In one embodiment, the filler sequence region is the FILL13 sequence region, the FILL14 sequence region, and the FILL16 sequence region. In one embodiment, the filler sequence region is the FILL13 sequence region, the FILL14 sequence region, and the FILL17 sequence region. In one embodiment, the filler sequence region is the FILL13 sequence region, the FILL14 sequence region, and the FILL18 sequence region. In one embodiment, the filler sequence region is the FILL13 sequence region, the FILL15 sequence region, and the FILL16 sequence region. In one embodiment, the filler sequence region is the FILL13 sequence region, the FILL15 sequence region, and the FILL17 sequence region. In one embodiment, the filler sequence region is the FILL13 sequence region, the FILL15 sequence region, and the FILL18 sequence region. In one embodiment, the filler sequence region is the FILL13 sequence region, the FILL16 sequence region, and the FILL17 sequence region. In one embodiment, the filler sequence region is the FILL13 sequence region, the FILL16 sequence region, and the FILL18 sequence region. In one embodiment, the filler sequence region is the FILL13 sequence region, the FILL17 sequence region, and the FILL18 sequence region. In one embodiment, the filler sequence region is the FILL14 sequence region, the FILL15 sequence region, and the FILL16 sequence region. In one embodiment, the filler sequence region is the FILL14 sequence region, the FILL15 sequence region, and the FILL17 sequence region. In one embodiment, the filler sequence region is the FILL14 sequence region, the FILL15 sequence region, and the FILL18 sequence region. In one embodiment, the filler sequence region is the FILL14 sequence region, the FILL16 sequence region, and the FILL17 sequence region. In one embodiment, the filler sequence region is the FILL14 sequence region, the FILL16 sequence region, and the FILL18 sequence region. In one embodiment, the filler sequence region is the FILL14 sequence region, the FILL17 sequence region, and the FILL18 sequence region. In one embodiment, the filler sequence region is the FILL15 sequence region, the FILL16 sequence region, and the FILL17 sequence region. In one embodiment, the filler sequence region is the FILL15 sequence region, the FILL16 sequence region, and the FILL18 sequence region. In one embodiment, the filler sequence region is the FILL15 sequence region, the FILL17 sequence region, and the FILL18 sequence region. In one embodiment, the filler sequence region is the FILL16 sequence region, the FILL17 sequence region, and the FILL18 sequence region.

[0504] In one embodiment, the AAV particle viral genome may comprise at least one enhancer sequence region. The enhancer sequence region(s) may, independently, have a length such as, but not limited to, 300, 301, 302, 303, 304, 305, 306, 307, 308, 309, 310, 311, 312, 313, 314, 315, 316, 317, 318, 319, 320, 321, 322, 323, 324, 325, 326, 327, 328, 329, 330, 331, 332, 333, 334, 335, 336, 337, 338, 339, 340, 341, 342, 343, 344, 345, 346, 347, 348, 349, 350, 351, 352, 353, 354, 355, 356, 357, 358, 359, 360, 361, 362, 363, 364, 365, 366, 367, 368, 369, 370, 371, 372, 373, 374, 375, 376, 377, 378, 379, 380, 381, 382, 383, 384, 385, 386, 387, 388, 389, 390, 391, 392, 393, 394, 395, 396, 397, 398, 399, and 400 nucleotides. The length of the enhancer region for the viral genome may be 300-310, 300-325, 305-315, 310-320, 315-325, 320-330, 325-335, 325-350, 330-340, 335-345, 340-350, 345-355, 350-360, 350-375, 355-365, 360-370, 365-375, 370-380, 375-385, 375-400, 380-390, 385-395, and 390-400 nucleotides. As a non-limiting example, the viral genome comprises an enhancer region that is about 303 nucleotides in length. As a non-limiting example, the viral genome comprises an enhancer region that is about 382 nucleotides in length.

[0505] In one embodiment, the AAV particle viral genome comprises at least one enhancer sequence region. Non-limiting examples of enhancer sequence regions are described in Table 16.

TABLE 16
Enhancer Sequence Regions

| Sequence Region | |
|---|---|
| Name | SEQ ID NO |
| Enhancer1 | 1408 |
| Enhancer2 | 1409 |

[0506] In one embodiment, the AAV particle viral genome comprises one enhancer sequence region. In one embodiment, the enhancer sequence regions is the Enhancer1 sequence region. In one embodiment, the enhancer sequence regions is the Enhancer2 sequence region.

[0507] In one embodiment, the AAV particle viral genome comprises two enhancer sequence regions. In one embodiment, the enhancer sequence regions are the Enhancer1 sequence region and the Enhancer 2 sequence region.

[0508] In one embodiment, the AAV particle viral genome may comprise at least one promoter sequence region. The promoter sequence region(s) may, independently, have a length such as, but not limited to, 4, 5, 6, 7, 8, 9, 10, 11, 12, 13, 14, 15, 16, 17, 18, 19, 20, 21, 22, 23, 24, 25, 26, 27, 28, 29, 30, 31, 32, 33, 34, 35, 36, 37, 38, 39, 40, 41, 42, 43, 44, 45, 46, 47, 48, 49, 50, 51, 52, 53, 54, 55, 56, 57, 58, 59, 60, 61, 62, 63, 64, 65, 66, 67, 68, 69, 70, 71, 72, 73, 74, 75, 76, 77, 78, 79, 80, 81, 82, 83, 84, 85, 86, 87, 88, 89, 90, 91, 92, 93, 94, 95, 96, 97, 98, 99, 100, 101, 102, 103, 104, 105, 106, 107, 108, 109, 110, 111, 112, 113, 114, 115, 116, 117, 118, 119, 120, 121, 122, 123, 124, 125, 126, 127, 128, 129, 130, 131, 132, 133, 134, 135, 136, 137, 138, 139, 140, 141, 142, 143, 144, 145, 146, 147, 148, 149, 150, 151, 152, 153, 154, 155, 156, 157, 158, 159, 160, 161, 162, 163, 164, 165, 166, 167, 168, 169, 170, 171, 172, 173, 174, 175, 176, 177, 178, 179, 180, 181, 182, 183, 184, 185, 186, 187, 188, 189, 190, 191, 192, 193, 194, 195, 196, 197, 198, 199, 200, 201, 202, 203, 204, 205, 206, 207, 208, 209, 210, 211, 212, 213, 214, 215, 216, 217, 218, 219, 220, 221, 222, 223, 224, 225, 226, 227, 228, 229, 230, 231, 232, 233, 234, 235, 236, 237, 238, 239, 240, 241, 242, 243, 244, 245, 246, 247, 248, 249, 250, 251, 252, 253, 254, 255, 256, 257, 258, 259, 260, 261, 262, 263, 264, 265, 266, 267, 268, 269, 270, 271, 272, 273, 274, 275, 276, 277, 278, 279, 280, 281, 282, 283, 284, 285, 286, 287, 288, 289, 290, 291, 292, 293, 294, 295, 296, 297, 298, 299, 300, 301, 302, 303, 304, 305, 306, 307, 308, 309, 310, 311, 312, 313, 314, 315, 316, 317, 318, 319, 320, 321, 322, 323, 324, 325, 326, 327, 328, 329, 330, 331, 332, 333, 334, 335, 336, 337, 338, 339, 340, 341, 342, 343, 344, 345, 346, 347, 348, 349, 350, 351, 352, 353, 354, 355, 356, 357, 358, 359, 360, 361, 362, 363, 364, 365, 366, 367, 368, 369, 370, 371, 372, 373, 374, 375, 376, 377, 378, 379, 380, 381, 382, 383, 384, 385, 386, 387, 388, 389, 390, 391, 392, 393, 394, 395, 396, 397, 398, 399, 400, 401, 402, 403, 404, 405, 406, 407, 408, 409, 410, 411, 412, 413, 414, 415, 416, 417, 418, 419, 420, 421, 422, 423, 424, 425, 426, 427, 428, 429, 430, 431, 432, 433, 434, 435, 436, 437, 438, 439, 440, 441, 442, 443, 444, 445, 446, 447, 448, 449, 450, 451, 452, 453, 454, 455, 456, 457, 458, 459, 460, 461, 462, 463, 464, 465, 466, 467, 468, 469, 470, 471, 472, 473, 474, 475, 476, 477, 478, 479, 480, 481, 482, 483, 484, 485, 486, 487, 488, 489, 490, 491, 492, 493, 494, 495, 496, 497, 498, 499, 500, 501, 502, 503, 504, 505, 506, 507, 508, 509, 510, 511, 512, 513, 514, 515, 516, 517, 518, 519, 520, 521, 522, 523, 524, 525, 526, 527, 528, 529, 530, 531, 532, 533, 534, 535, 536, 537, 538, 539, 540, 541, 542, 543, 544, 545, 546, 547, 548, 549, 550, 551, 552, 553, 554, 555, 556, 557, 558, 559, 560, 561, 562, 563, 564, 565, 566, 567, 568, 569, 570, 571, 572, 573, 574, 575, 576, 577, 578, 579, 580, 581, 582, 583, 584, 585, 586, 587, 588, 589, 590, 591, 592, 593, 594, 595, 596, 597, 598, 599, and 600 nucleotides. The length of the promoter region for the viral genome may be 4-10, 10-20, 10-50, 20-30, 30-40, 40-50, 50-60, 50-100, 60-70, 70-80, 80-90, 90-100, 100-110, 100-150, 110-120, 120-130, 130-140, 140-150, 150-160, 150-200, 160-170, 170-180, 180-190, 190-200, 200-210, 200-250, 210-220, 220-230, 230-240, 240-250, 250-260, 250-300, 260-270, 270-280, 280-290, 290-300, 300-310, 300-350, 310-320, 320-330, 330-340, 340-350, 350-360, 350-400, 360-370, 370-380, 380-390, 390-400, 400-410, 400-450, 410-420, 420-430, 430-440, 440-450, 450-460, 450-500, 460-470, 470-480, 480-490, 490-500, 500-510, 500-550, 510-520, 520-530, 530-540, 540-550, 550-560, 550-600, 560-570, 570-580, 580-590, and 590-600 nucleotides. As a non-limiting example, the viral genome comprises a promoter region that is about 4 nucleotides in length. As a non-limiting example, the viral genome comprises a promoter region that is about 17 nucleotides in length. As a non-limiting example, the viral genome comprises a promoter region that is about 204 nucleotides in length. As a non-limiting example, the viral genome comprises a promoter region that is about 219 nucleotides in length. As a non-limiting example, the viral genome comprises a promoter region that is about 260 nucleotides in length. As a non-limiting example, the viral genome comprises a promoter region that is about 303 nucleotides in length. As a non-limiting example, the viral genome comprises a promoter region that is about 382 nucleotides in length. As a non-limiting example, the viral genome comprises a promoter region that is about 588 nucleotides in length.

[0509] In one embodiment, the AAV particle viral genome comprises at least one promoter sequence region. Non-limiting examples of promoter sequence regions are described in Table 17.

TABLE 17
Promoter Sequence Regions

| Sequence Region | SEQ ID NO or |
|---|---|
| Name | Sequence |
| Promoter1 | 1410 |
| Promoter2 | 1411 |
| Promoter3 | GTTG |
| Promoter4 | 1412 |
| Promoter5 | 1413 |
| Promoter6 | 1414 |

[0510] In one embodiment, the AAV particle viral genome comprises one promoter sequence region. In one embodiment, the promoter sequence region is Promoter1. In one embodiment, the promoter sequence region is Promoter2. In one embodiment, the promoter sequence region is Promoter3. In one embodiment, the promoter sequence region is Promoter4. In one embodiment, the promoter sequence region is Promoter5. In one embodiment, the promoter sequence region is Promoter6.

[0511] In one embodiment, the AAV particle viral genome comprises two promoter sequence regions. In one embodiment, the promoter sequence region is Promoter1 sequence region, and the Promoter2 sequence region. In one embodiment, the promoter sequence region is Promoter1 sequence region, and the Promoter3 sequence region. In one embodiment, the promoter sequence region is Promoter1 sequence region, and the Promoter4 sequence region. In one embodiment, the promoter sequence region is Promoter1 sequence region, and the Promoter5 sequence region. In one embodiment, the promoter sequence region is Promoter1 sequence region, and the Promoter6 sequence region. In one embodiment, the promoter sequence region is Promoter2 sequence region, and the Promoter3 sequence region. In one embodiment, the promoter sequence region is Promoter2 sequence region, and the Promoter4 sequence region. In one embodiment, the promoter sequence region is Promoter2 sequence region, and the Promoter5 sequence region. In one embodiment, the promoter sequence region is Promoter2 sequence region, and the Promoter6 sequence region. In one embodiment, the promoter sequence region is Promoter3 sequence region, and the Promoter4 sequence region. In one embodiment, the promoter sequence region is Promoter3 sequence region, and the Promoter5 sequence region. In one embodiment, the promoter sequence region is Promoter3 sequence region, and the Promoter6 sequence region. In one embodiment, the promoter sequence region is Promoter4 sequence region, and the Promoter5 sequence region. In one embodiment, the promoter sequence region is Promoter4 sequence region, and the Promoter6 sequence region. In one embodiment, the promoter sequence region is Promoter5 sequence region, and the Promoter6 sequence region.

[0512] In one embodiment, the AAV particle viral genome may comprise at least one exon sequence region. The exon region(s) may, independently, have a length such as, but not limited to, 2, 3, 4, 5, 6, 7, 8, 9, 10, 11, 12, 13, 14, 15, 16, 17, 18, 19, 20, 21, 22, 23, 24, 25, 26, 27, 28, 29, 30, 31, 32, 33, 34, 35, 36, 37, 38, 39, 40, 41.42, 43, 44, 45, 46, 47, 48, 49, 50, 51, 52, 53.54, 55, 56, 57, 58, 59, 60, 61, 62, 63, 64, 65, 66, 67, 68, 69, 70, 71, 72, 73, 74, 75, 76, 77, 78, 79, 80, 81, 82, 83, 84, 85, 86, 87, 88, 89, 90, 91, 92, 93, 94, 95, 96, 97, 98, 99, 100, 101, 102, 103, 104, 105, 106, 107, 108, 109, 110, 111, 112, 113, 114, 115, 116, 117, 118, 119, 120, 121, 122, 123, 124, 125, 126, 127, 128, 129, 130, 131, 132, 133, 134, 135, 136, 137, 138, 139, 140, 141, 142, 143, 144, 145, 146, 147, 148, 149, and 150 nucleotides. The length of the exon region for the viral genome may be 2-10, 5-10, 5-15, 10-20, 10-30, 10-40, 15-20, 15-25, 20-30, 20-40, 20-50, 25-30, 25-35, 30-40, 30-50, 30-60, 35-40, 35-45, 40-50, 40-60, 40-70, 45-50, 45-55, 50-60, 50-70, 50-80, 55-60, 55-65, 60-70, 60-80, 60-90, 65-70, 65-75, 70-80, 70-90, 70-100, 75-80, 75-85, 80-90, 80-100, 80-110, 85-90, 85-95, 90-100, 90-110, 90-120, 95-100, 95-105, 100-110, 100-120, 100-130, 105-110, 105-115, 110-120, 110-130, 110-140, 115-120, 115-125, 120-130, 120-140, 120-150, 125-130, 125-135, 130-140, 130-150, 135-140, 135-145, 140-150, and 145-150 nucleotides. As a non-limiting example, the viral genome comprises an exon region that is about 53 nucleotides in length. As a non-limiting example, the viral genome comprises an exon region that is about 134 nucleotides in length.

[0513] In one embodiment, the AAV particle viral genome comprises at least one Exon sequence region. Non-limiting examples of Exon sequence regions are described in Table 18.

TABLE 18
Exon Sequence Regions

| Sequence Region Name | SEQ ID NO |
|---|---|
| Exon1 | 1415 |
| Exon2 | 1416 |

[0514] In one embodiment, the AAV particle viral genome comprises one Exon sequence region. In one embodiment, the Exon sequence regions is the Exon1 sequence region. In one embodiment, the Exon sequence regions is the Exon2 sequence region.

[0515] In one embodiment, the AAV particle viral genome comprises two Exon sequence regions. In one embodiment, the Exon sequence regions are the Exon1 sequence region and the Exon 2 sequence region.

[0516] In one embodiment, the AAV particle viral genome may comprise at least one intron sequence region. The intron region(s) may, independently, have a length such as, but not limited to, 25, 26, 27, 28, 29, 30, 31, 32, 33, 34, 35, 36, 37, 38, 39, 40, 41, 42, 43, 44, 45, 46, 47, 48, 49, 50, 51, 52, 53, 54, 55, 56, 57, 58, 59, 60, 61, 62, 63, 64, 65, 66, 67, 68, 69, 70, 71, 72, 73, 74, 75, 76, 77, 78, 79, 80, 81, 82, 83, 84, 85, 86, 87, 88, 89, 90, 91, 92, 93, 94, 95, 96, 97, 98, 99, 100, 101, 102, 103, 104, 105, 106, 107, 108, 109, 110, 111, 112, 113, 114, 115, 116, 117, 118, 119, 120, 121, 122, 123, 124, 125, 126, 127, 128, 129, 130, 131, 132, 133, 134, 135, 136, 137, 138, 139, 140, 141, 142, 143, 144, 145, 146, 147, 148, 149, 150, 151, 152, 153, 154, 155, 156, 157, 158, 159, 160, 161, 162, 163, 164, 165, 166, 167, 168, 169, 170, 171, 172, 173, 174, 175, 176, 177, 178, 179, 180, 181, 182, 183, 184, 185, 186, 187, 188, 189, 190, 191, 192, 193, 194, 195, 196, 197, 198, 199, 200, 201, 202, 203, 204, 205, 206, 207, 208, 209, 210, 211, 212, 213, 214, 215, 216, 217, 218, 219, 220, 221, 222, 223, 224, 225, 226, 227, 228, 229, 230, 231, 232, 233, 234, 235, 236, 237, 238, 239, 240, 241, 242, 243, 244, 245, 246, 247, 248, 249, 250, 251, 252, 253, 254, 255, 256, 257, 258, 259, 260, 261, 262, 263, 264, 265, 266, 267, 268, 269, 270, 271, 272, 273, 274, 275, 276, 277, 278, 279, 280, 281, 282, 283, 284, 285, 286, 287, 288, 289, 290, 291, 292, 293, 294, 295, 296, 297, 298, 299, 300, 301, 302, 303, 304, 305, 306, 307, 308, 309, 310, 311, 312, 313, 314, 315, 316, 317, 318, 319, 320, 321, 322, 323, 324, 325, 326, 327, 328, 329, 330, 331, 332, 333, 334, 335, 336, 337, 338, 339, 340, 341, 342, 343, 344, 345, 346, 347, 348, 349, and 350 nucleotides. The length of the intron region for the viral genome may be 25-35, 25-50, 35-45, 45-55, 50-75, 55-65, 65-75, 75-85, 75-100, 85-95, 95-105, 100-125, 105-115, 115-125, 125-135, 125-150, 135-145, 145-155, 150-175, 155-165, 165-175, 175-185, 175-200, 185-195, 195-205, 200-225, 205-215, 215-225, 225-235, 225-250, 235-245, 245-255, 250-275, 255-265, 265-275, 275-285, 275-300, 285-295, 295-305, 300-325, 305-315, 315-325, 325-335, 325-350, and 335-345 nucleotides. As a non-limiting example, the viral genome comprises an intron region that is about 32 nucleotides in length. As a non-limiting example, the viral genome comprises an intron region that is about 172 nucleotides in length. As a non-limiting example, the viral genome comprises an intron region that is about 201 nucleotides in length. As a non-limiting example, the viral genome comprises an intron region that is about 347 nucleotides in length.

[0517] In one embodiment, the AAV particle viral genome comprises at least one intron sequence region. Non-limiting examples of intron sequence regions are described in Table 19.

TABLE 19
Intron Sequence Regions

| Sequence Region | |
|---|---|
| Name | SEQ ID NO |
| Intron1 | 1417 |
| Intron2 | 1418 |
| Intron3 | 1419 |

[0518] In one embodiment, the AAV particle viral genome comprises one intron sequence region. In one embodiment, the intron sequence regions is the Intron sequence region. In one embodiment, the intron sequence regions is the Intron2 sequence region. In one embodiment, the intron sequence regions is the Intron3 sequence region.

[0519] In one embodiment, the AAV particle viral genome comprises two intron sequence regions. In one embodiment, the intron sequence regions are the Intron sequence region and the Intron2 sequence region. In one embodiment, the intron sequence regions are the Intron2 sequence region and the Intron3 sequence region. In one embodiment, the intron sequence regions are the Intron1 sequence region and the Intron3 sequence region.

[0520] In one embodiment, the AAV particle viral genome comprises three intron sequence regions. In one embodiment, the intron sequence regions are the Intron1 sequence region, the Intron2 sequence region, and the Intron3 sequence region.

[0521] In one embodiment, the AAV particle viral genome may comprise at least one polyadenylation signal sequence region. The polyadenylation signal region sequence region(s) may, independently, have a length such as, but not limited to, 4, 5, 6, 7, 8, 9, 10, 11, 12, 13, 14, 15, 16, 17, 18, 19, 20, 21, 22, 23, 24, 25, 26, 27, 28, 29, 30, 31, 32, 33, 34, 35, 36, 37, 38, 39, 40, 41, 42, 43, 44, 45, 46, 47, 48, 49, 50, 51, 52, 53, 54, 55, 56, 57, 58, 59, 60, 61, 62, 63, 64, 65, 66, 67, 68, 69, 70, 71, 72, 73, 74, 75, 76, 77, 78, 79, 80, 81, 82, 83, 84, 85, 86, 87, 88, 89, 90, 91, 92, 93, 94, 95, 96, 97, 98, 99, 100, 101, 102, 103, 104, 105, 106, 107, 108, 109, 110, 111, 112, 113, 114, 115, 116, 117, 118, 119, 120, 121, 122, 123, 124, 125, 126, 127, 128, 129, 130, 131, 132, 133, 134, 135, 136, 137, 138, 139, 140, 141, 142, 143, 144, 145, 146, 147, 148, 149, 150, 151, 152, 153, 154, 155, 156, 157, 158, 159, 160, 161, 162, 163, 164, 165, 166, 167, 168, 169, 170, 171, 172, 173, 174, 175, 176, 177, 178, 179, 180, 181, 182, 183, 184, 185, 186, 187, 188, 189, 190, 191, 192, 193, 194, 195, 196, 197, 198, 199, 200, 201, 202, 203, 204, 205, 206, 207, 208, 209, 210, 211, 212, 213, 214, 215, 216, 217, 218, 219, 220, 221, 222, 223, 224, 225, 226, 227, 228, 229, 230, 231, 232, 233, 234, 235, 236, 237, 238, 239, 240, 241, 242, 243, 244, 245, 246, 247, 248, 249, 250, 251, 252, 253, 254, 255, 256, 257, 258, 259, 260, 261, 262, 263, 264, 265, 266, 267, 268, 269, 270, 271, 272, 273, 274, 275, 276, 277, 278, 279, 280, 281, 282, 283, 284, 285, 286, 287, 288, 289, 290, 291, 292, 293, 294, 295, 296, 297, 298, 299, 300, 301, 302, 303, 304, 305, 306, 307, 308, 309, 310, 311, 312, 313, 314, 315, 316, 317, 318, 319, 320, 321, 322, 323, 324, 325, 326, 327, 328, 329, 330, 331, 332, 333, 334, 335, 336, 337, 338, 339, 340, 341, 342, 343, 344, 345, 346, 347, 348, 349, 350, 351, 352, 353, 354, 355, 356, 357, 358, 359, 360, 361, 362, 363, 364, 365, 366, 367, 368, 369, 370, 371, 372, 373, 374, 375, 376, 377, 378, 379, 380, 381, 382, 383, 384, 385, 386, 387, 388, 389, 390, 391, 392, 393, 394, 395, 396, 397, 398, 399, 400, 401, 402, 403, 404, 405, 406, 407, 408, 409, 410, 411, 412, 413, 414, 415.416, 417, 418, 419, 420, 421, 422, 423, 424, 425, 426, 427, 428, 429, 430, 431, 432, 433, 434, 435, 436, 437, 438, 439, 440, 441, 442, 443, 444, 445, 446, 447, 448, 449, 450, 451, 452, 453, 454, 455, 456, 457, 458, 459, 460, 461, 462, 463, 464, 465, 466, 467, 468, 469, 470, 471, 472, 473.474, 475, 476, 477, 478, 479, 480, 481, 482, 483, 484, 485, 486, 487, 488, 489, 490, 491, 492, 493, 494, 495, 496, 497, 498, 499, 500, 501, 502, 503, 504, 505, 506, 507, 508, 509, 510, 511, 512, 513, 514, 515, 516, 517, 518, 519, 520, 521, 522, 523, 524, 525, 526, 527, 528, 529, 530, 531, 532, 533, 534, 535, 536, 537, 538, 539, 540, 541, 542, 543, 544, 545, 546, 547, 548, 549, 550, 551, 552, 553, 554, 555, 556, 557, 558, 559, 560, 561, 562, 563, 564, 565, 566, 567, 568, 569, 570, 571, 572, 573, 574, 575, 576, 577, 578, 579, 580, 581, 582, 583, 584, 585, 586, 587, 588, 589, 590, 591, 592, 593, 594, 595, 596, 597, 598, 599, and 600 nucleotides. The length of the polyadenylation signal sequence region for the viral genome may be 4-10, 10-20, 10-50, 20-30, 30-40, 40-50, 50-60, 50-100, 60-70, 70-80, 80-90, 90-100, 100-110, 100-150, 110-120, 120-130, 130-140, 140-150, 150-160, 150-200, 160-170, 170-180, 180-190, 190-200, 200-210, 200-250, 210-220, 220-230, 230-240, 240-250, 250-260, 250-300, 260-270, 270-280, 280-290, 290-300, 300-310, 300-350, 310-320, 320-330, 330-340, 340-350, 350-360, 350-400, 360-370, 370-380, 380-390, 390-400, 400-410, 400-450, 410-420, 420-430, 430-440, 440-450, 450-460, 450-500, 460-470, 470-480, 480-490, 490-500, 500-510, 500-550, 510-520, 520-530, 530-540, 540-550, 550-560, 550-600, 560-570, 570-580, 580-590, and 590-600 nucleotides. As a non-limiting example, the viral genome comprises a polyadenylation signal sequence region that is about 127 nucleotides in length. As a non-limiting example, the viral genome comprises a polyadenylation signal sequence region that is about 225 nucleotides in length. As a non-limiting example, the viral genome comprises a polyadenylation signal sequence region that is about 476 nucleotides in length. As a non-limiting example, the viral genome comprises a polyadenylation signal sequence region that is about 477 nucleotides in length.

[0522] In one embodiment, the AAV particle viral genome comprises at least one polyadenylation (polyA) signal sequence region. Non-limiting examples of polyA signal sequence regions are described in Table 20.

TABLE 20
PolyA Signal Sequence Regions

| Sequence Region | |
|---|---|
| Name | SEQ ID NO |
| PolyA1 | 1420 |
| PolyA2 | 1421 |
| PolyA3 | 1422 |
| Po1yA4 | 1423 |

[0523] In one embodiment, the AAV particle viral genome comprises one polyA signal sequence region. In one embodiment, the polyA signal sequence regions is the PolyA1 sequence region. In one embodiment, the polyA signal sequence regions is the PolyA2 sequence region. In one embodiment, the polyA signal sequence regions is the PolyA3 sequence region. In one embodiment, the polyA signal sequence regions is the PolyA4 sequence region.

[0524] In one embodiment, the AAV particle viral genome comprises more than one polyA signal sequence region.

[0525] In one embodiment, the AAV particle viral genome comprises at least one inverted terminal repeat (ITR) sequence region, at least one multiple cloning site (MCS) sequence region, at least one enhancer sequence region, at least one promoter sequence region, at least one exon sequence region, at least one intron sequence region, at least one modulatory polynucleotide region, at least one polyadenylation signal sequence region, and at least one filler sequence region.

[0526] In one embodiment, the AAV particle viral genome comprises a 5′ inverted terminal repeat (ITR) sequence region and a 3′ ITR sequence region, two multiple cloning site (MCS) sequence regions, an enhancer sequence region, a promoter sequence region, an intron sequence region, a modulatory polynucleotide region, a polyadenylation signal sequence region, and a filler sequence region.

[0527] In one embodiment, the AAV particle viral genome comprises a 5′ inverted terminal repeat (ITR) sequence region and a 3′ ITR sequence region, two multiple cloning site (MCS) sequence regions, a CMV enhancer sequence region, a CBA promoter sequence region, an SV40 intron sequence region, a modulatory polynucleotide region, a rabbit globin polyadenylation signal sequence region, and a filler sequence region. Non-limiting examples of ITR to ITR sequences for use in the AAV particles of the present invention having all of the sequence modules above are described in Table 21. In Table 21, the sequence identifier or sequence of the sequence region (Region SEQ ID NO) and the length of the sequence region (Region length) are described as well as the name and sequence identifier of the ITR to ITR sequence (e.g., VOYHT1 (SEQ ID NO: 1352)).

TABLE 21
Sequence Regions in ITR to ITR Sequences

| | VOYHT1 | | VOYHT2 | | VOYHT3 | | VOYHT4 | |
|---|---|---|---|---|---|---|---|---|
| | (SEQ ID NO: 1352) | | (SEQ ID NO: 1353) | | (SEQ ID NO: 1354) | | (SEQ ID NO: 1355) | |
| Sequence | Region | Region | Region | Region | Region | Region | Region | Region |
| Regions | SEQ ID NO | length | SEQ ID NO | length | SEQ ID NO | length | SEQ ID NO | length |
| 5′ ITR | 1380 | 141 | 1380 | 141 | 1380 | 141 | 1380 | 141 |
| MCS | 1384 | 10 | 1384 | 10 | 1384 | 10 | 1384 | 10 |
| CMV enhancer | 1408 | 382 | 1408 | 382 | 1408 | 382 | 1408 | 382 |
| CBA Promoter | 1410 | 260 | 1410 | 260 | 1410 | 260 | 1410 | 260 |
| SV40 Intron | 1417 | 172 | 1417 | 172 | 1417 | 172 | 1417 | 172 |
| Modulatory | 1262 | 163 | 1262 | 163 | 1250 | 158 | 1347 | 163 |
| Polynucleotide | | | | | | | | |
| MCS | TCGAG | 5 | TCGAG | 5 | TCGAG | 5 | TCGAG | 5 |
| Rabbit globin | 1420 | 127 | 1420 | 127 | 1420 | 127 | 1420 | 127 |
| PolyA Signal | | | | | | | | |
| Filler | 1400 | 714 | 1401 | 3021 | 1400 | 714 | 1400 | 714 |
| 3′ ITR | 1382 | 141 | 1382 | 141 | 1382 | 141 | 1382 | 141 |

[0528] In one embodiment, the AAV particle viral genome comprises SEQ ID NO: 1352 (VOYHT1) which comprises a 5′ inverted terminal repeat (ITR) sequence region and a 3′ ITR sequence region, two multiple cloning site (MCS) sequence regions, a CMV enhancer sequence region, a CBA promoter sequence region, an SV40 intron sequence region, a modulatory polynucleotide region, a rabbit globin polyadenylation signal sequence region, and a filler sequence region.

[0529] In one embodiment, the AAV particle viral genome comprises SEQ ID NO: 1353 (VOYHT2) which comprises a 5′ inverted terminal repeat (ITR) sequence region and a 3′ ITR sequence region, two multiple cloning site (MCS) sequence regions, a CMV enhancer sequence region, a CBA promoter sequence region, an SV40 intron sequence region, a modulatory polynucleotide region, a rabbit globin polyadenylation signal sequence region, and a filler sequence region.

[0530] In one embodiment, the AAV particle viral genome comprises SEQ ID NO: 1354 (VOYHT3) which comprises a 5′ inverted terminal repeat (ITR) sequence region and a 3′ ITR sequence region, two multiple cloning site (MCS) sequence regions, a CMV enhancer sequence region, a CBA promoter sequence region, an SV40 intron sequence region, a modulatory polynucleotide region, a rabbit globin polyadenylation signal sequence region, and a filler sequence region.

[0531] In one embodiment, the AAV particle viral genome comprises SEQ ID NO: 1355 (VOYHT4) which comprises a 5′ inverted terminal repeat (ITR) sequence region and a 3′ ITR sequence region, two multiple cloning site (MCS) sequence regions, a CMV enhancer sequence region, a CBA promoter sequence region, an SV40 intron sequence region, a modulatory polynucleotide region, a rabbit globin polyadenylation signal sequence region, and a filler sequence region.

[0532] In one embodiment, the AAV particle viral genome comprises a 5′ inverted terminal repeat (ITR) sequence region and a 3′ ITR sequence region, two multiple cloning site (MCS) sequence regions, a CMV enhancer sequence region, a CBA promoter sequence region, an SV40 intron sequence region, a modulatory polynucleotide region, a rabbit globin polyadenylation signal sequence region, and a filler sequence region. Non-limiting examples of ITR to ITR sequences for use in the AAV particles of the present invention having all of the sequence modules above are described in Table 22. In Table 22, the sequence identifier or sequence of the sequence region (Region SEQ ID NO) and the length of the sequence region (Region length) are described as well as the name and sequence identifier of the ITR to ITR sequence (e.g., VOYHT5 (SEQ ID NO: 1356)).

TABLE 22
Sequence Regions in ITR to ITR Sequences

| | VOYHT5 | | VOYHT6 | | VOYHT7 | | VOYHT8 | |
|---|---|---|---|---|---|---|---|---|
| | (SEQ ID NO: 1356) | | (SEQ ID NO: 1357) | | (SEQ ID NO: 1358) | | (SEQ ID NO: 1359) | |
| Sequence | Region | Region | Region | Region | Region | Region | Region | Region |
| Regions | SEQ ID NO | length | SEQ ID NO | length | SEQ ID NO | length | SEQ ID NO | length |
| 5′ ITR | 1380 | 141 | 1380 | 141 | 1380 | 141 | 1380 | 141 |
| MCS | 1384 | 10 | 1384 | 10 | 1384 | 10 | 1384 | 10 |
| Filler | 1390 | 3013 | 1391 | 712 | 1391 | 717 | 1391 | 712 |
| CMV | 1408 | 382 | 1408 | 382 | 1408 | 382 | 1408 | 382 |
| enhancer | | | | | | | | |
| CBA Promoter | 1410 | 260 | 1410 | 260 | 1410 | 260 | 1410 | 260 |
| SV40 Intron | 1417 | 172 | 1417 | 172 | 1417 | 172 | 1417 | 172 |
| Modulatory | 1262 | 163 | 1262 | 163 | 1250 | 158 | 1347 | 163 |
| Polynucleotide | | | | | | | | |
| MCS | TCGAG | 5 | TCGAG | 5 | TCGAG | 5 | TCGAG | 5 |
| Rabbit globin | 1420 | 127 | 1420 | 127 | 1420 | 127 | 1420 | 127 |
| PolyA Signal | | | | | | | | |
| 3′ ITR | 1382 | 141 | 1382 | 141 | 1382 | 141 | 1382 | 141 |

[0533] In one embodiment, the AAV particle viral genome comprises SEQ ID NO: 1357 (VOYHT6) which comprises a 5′ inverted terminal repeat (ITR) sequence region and a 3′ ITR sequence region, two multiple cloning site (MCS) sequence regions, a CMV enhancer sequence region, a CBA promoter sequence region, an SV40 intron sequence region, a modulatory polynucleotide region, a rabbit globin polyadenylation signal sequence region, and a filler sequence region.

[0534] In one embodiment, the AAV particle viral genome comprises SEQ ID NO: 1358 (VOYHT7) which comprises a 5′ inverted terminal repeat (ITR) sequence region and a 3′ ITR sequence region, two multiple cloning site (MCS) sequence regions, a CMV enhancer sequence region, a CBA promoter sequence region, an SV40 intron sequence region, a modulatory polynucleotide region, a rabbit globin polyadenylation signal sequence region, and a filler sequence region.

[0535] In one embodiment, the AAV particle viral genome comprises SEQ ID NO: 1359 (VOYHT8) which comprises a 5′ inverted terminal repeat (ITR) sequence region and a 3′ ITR sequence region, two multiple cloning site (MCS) sequence regions, a CMV enhancer sequence region, a CBA promoter sequence region, an SV40 intron sequence region, a modulatory polynucleotide region, a rabbit globin polyadenylation signal sequence region, and a filler sequence region.

[0536] In one embodiment, the AAV particle viral genome comprises a 5′ inverted terminal repeat (ITR) sequence region and a 3′ ITR sequence region, two multiple cloning site (MCS) sequence regions, an enhancer sequence region, a promoter sequence region, an intron sequence region, a modulatory polynucleotide region, a polyadenylation signal sequence region, and two filler sequence regions.

[0537] In one embodiment, the AAV particle viral genome comprises a 5′ inverted terminal repeat (ITR) sequence region and a 3′ ITR sequence region, two multiple cloning site (MCS) sequence regions, a CMV enhancer sequence region, a CBA promoter sequence region, an SV40 intron sequence region, a modulatory polynucleotide region, a rabbit globin polyadenylation signal sequence region, and two filler sequence regions. Non-limiting examples of ITR to ITR sequences for use in the AAV particles of the present invention having all of the sequence modules above are described in Table 23. In Table 23, the sequence identifier or sequence of the sequence region (Region SEQ ID NO) and the length of the sequence region (Region length) are described as well as the name and sequence identifier of the ITR to ITR sequence (e.g., VOYHT9 (SEQ ID NO: 1360)).

TABLE 23
Sequence Regions in ITR to ITR Sequences

| | VOYHT9 | | VOYHT10 | | VOYHT11 | | VOYHT12 | |
|---|---|---|---|---|---|---|---|---|
| | (SEQ ID NO: 1360) | | (SEQ ID NO: 1361) | | (SEQ ID NO: 1362) | | (SEQ ID NO: 1363) | |
| Sequence | Region | Region | Region | Region | Region | Region | Region | Region |
| Regions | SEQ ID NO | length | SEQ ID NO | length | SEQ ID NO | length | SEQ ID NO | length |
| 5′ ITR | 1380 | 141 | 1380 | 141 | 1380 | 141 | 1380 | 141 |
| MCS | 1384 | 10 | 1384 | 10 | 1384 | 10 | 1384 | 10 |
| Filler | 1396 | 1512 | 1397 | 363 | 1397 | 363 | 1397 | 363 |
| CMV | 1408 | 382 | 1408 | 382 | 1408 | 382 | 1408 | 382 |
| enhancer | | | | | | | | |
| CBA Promoter | 1410 | 260 | 1410 | 260 | 1410 | 260 | 1410 | 260 |
| SV40 Intron | 1417 | 172 | 1417 | 172 | 1417 | 172 | 1417 | 172 |
| Modulatory | 1262 | 163 | 1262 | 163 | 1250 | 158 | 1347 | 163 |
| Polynucleotide | | | | | | | | |
| MCS | TCGAG | 5 | TCGAG | 5 | TCGAG | 5 | TCGAG | 5 |
| Rabbit globin | 1420 | 127 | 1420 | 127 | 1420 | 127 | 1420 | 127 |
| PolyA Signal | | | | | | | | |
| Filler | 1404 | 1519 | 1405 | 357 | 1405 | 357 | 1405 | 357 |
| 3′ ITR | 1382 | 141 | 1382 | 141 | 1382 | 141 | 1382 | 141 |

[0538] In one embodiment, the AAV particle viral genome comprises SEQ ID NO: 1362 (VOYHT11) which comprises a 5′ inverted terminal repeat (ITR) sequence region and a 3′ ITR sequence region, two multiple cloning site (MCS) sequence regions, a CMV enhancer sequence region, a CBA promoter sequence region, an SV40 intron sequence region, a modulatory polynucleotide region, a rabbit globin polyadenylation signal sequence region, and two filler sequence regions.

[0539] In one embodiment, the AAV particle viral genome comprises SEQ ID NO: 1363 (VOYHT12) which comprises a 5′ inverted terminal repeat (ITR) sequence region and a 3′ ITR sequence region, two multiple cloning site (MCS) sequence regions, a CMV enhancer sequence region, a CBA promoter sequence region, an SV40 intron sequence region, a modulatory polynucleotide region, a rabbit globin polyadenylation signal sequence region, and two filler sequence regions.

[0540] In one embodiment, the AAV particle viral genome comprises a 5′ inverted terminal repeat (ITR) sequence region and a 3′ ITR sequence region, two multiple cloning site (MCS) sequence regions, an enhancer sequence region, a promoter sequence region, an intron sequence region, a modulatory polynucleotide region, and a polyadenylation signal sequence region.

[0541] In one embodiment, the AAV particle viral genome comprises a 5′ inverted terminal repeat (ITR) sequence region and a 3′ ITR sequence region, two multiple cloning site (MCS) sequence regions, a CMV enhancer sequence region, a CBA promoter sequence region, an SV40 intron sequence region, a modulatory polynucleotide region, and a rabbit globin polyadenylation signal sequence region. Non-limiting examples of ITR to ITR sequences for use in the AAV particles of the present invention having all of the sequence modules above are described in Table 24. In Table 24, the sequence identifier or sequence of the sequence region (Region SEQ ID NO) and the length of the sequence region (Region length) are described as well as the name and sequence identifier of the ITR to ITR sequence (e.g., VOYHT13 (SEQ ID NO: 1364)).

TABLE 24
Sequence Regions in ITR to ITR Sequences

| | VOYHT13 | | VOYHT14 | |
|---|---|---|---|---|
| | (SEQ ID NO: 1364) | | (SEQ ID NO: 1365) | |
| Sequence | Region | Region | Region | Region |
| Regions | SEQ ID NO | length | SEQ ID NO | length |
| 5′ ITR | 1380 | 141 | 1380 | 141 |
| MCS | 1384 | 10 | 1384 | 10 |
| CMV | 1408 | 382 | 1408 | 382 |
| enhancer | | | | |
| CBA | 1410 | 260 | 1410 | 260 |
| Promoter | | | | |
| SV40 | 1417 | 172 | 1417 | 172 |
| Intron | | | | |
| Modulatory | 1262 | 163 | 1249 | 158 |
| Poly- | | | | |
| nucleotide | | | | |
| MCS | TCGAG | 5 | TCGAG | 5 |
| Rabbit | 1420 | 127 | 1420 | 127 |
| globin | | | | |
| PolyA | | | | |
| Signal | | | | |
| 3′ ITR | 1382 | 141 | 1382 | 141 |

[0542] In one embodiment, the AAV particle viral genome comprises SEQ ID NO: 1364 (VOYHT13) which comprises a 5′ inverted terminal repeat (ITR) sequence region and a 3′ ITR sequence region, two multiple cloning site (MCS) sequence regions, a CMV enhancer sequence region, a CBA promoter sequence region, an SV40 intron sequence region, a modulatory polynucleotide region, and a rabbit globin polyadenylation signal sequence region.

[0543] In one embodiment, the AAV particle viral genome comprises SEQ ID NO: 1365 (VOYHT14) which comprises a 5′ inverted terminal repeat (ITR) sequence region and a 3′ ITR sequence region, two multiple cloning site (MCS) sequence regions, a CMV enhancer sequence region, a CBA promoter sequence region, an SV40 intron sequence region, a modulatory polynucleotide region, and a rabbit globin polyadenylation signal sequence region.

[0544] In one embodiment, the AAV particle viral genome comprises a 5′ inverted terminal repeat (ITR) sequence region and a 3′ ITR sequence region, an enhancer sequence region, a promoter sequence region, an intron sequence region, a modulatory polynucleotide region, and a polyadenylation signal sequence region.

[0545] In one embodiment, the AAV particle viral genome comprises a 5′ inverted terminal repeat (ITR) sequence region and a 3′ ITR sequence region, a CMV enhancer sequence region, a CBA promoter sequence region, an SV40 intron sequence region, a modulatory polynucleotide region, and a rabbit globin polyadenylation signal sequence region. Non-limiting examples of ITR to ITR sequences for use in the AAV particles of the present invention having all of the sequence modules above are described in Tables 25-29. In Tables 25-29, the sequence identifier or sequence of the sequence region (Region SEQ ID NO) and the length of the sequence region (Region length) are described as well as the name and sequence identifier of the ITR to ITR sequence (e.g., VOYHT15 (SEQ ID NO: 1366)).

TABLE 25
Sequence Regions in ITR to ITR Sequences

| | VOYHT15 | | VOYHT16 | |
|---|---|---|---|---|
| | (SEQ ID NO: 1366) | | (SEQ ID NO: 1367) | |
| | Region | Region | Region | Region |
| Sequence Regions | SEQ ID NO | length | SEQ ID NO | length |
| 5′ ITR | 1381 | 105 | 1381 | 105 |
| CMV enhancer | 1408 | 382 | 1408 | 382 |
| CBA Promoter | 1410 | 260 | 1410 | 260 |
| SV40 Intron | 1417 | 172 | 1417 | 172 |
| Modulatory Polynucleotide | 1259 | 260 | 1249 | 158 |
| Rabbit globin PolyA Signal | 1420 | 127 | 1420 | 127 |
| 3′ ITR | 1383 | 130 | 1383 | 130 |

TABLE 26
Sequence Regions in ITR to ITR Sequences

| | VOYHT35 | | VOYHT36 | | VOYHT37 | | VOYHT38 | |
|---|---|---|---|---|---|---|---|---|
| | (SEQ ID NO: | | (SEQ ID NO: | | (SEQ ID NO: | | (SEQ ID NO: | |
| | 1388) | | 1426) | | 1427) | | 1428) | |
| | Region | | Region | | Region | | Region | |
| | SEQ | Region | SEQ | Region | SEQ ID | Region | SEQ ID | Region |
| Sequence Regions | ID NO | length | ID NO | length | NO | length | NO | length |
| 5′ ITR | 1381 | 105 | 1381 | 105 | 1381 | 105 | 1381 | 105 |
| CMV enhancer | 1408 | 382 | 1408 | 382 | 1408 | 382 | 1408 | 382 |
| CBA Promoter | 1410 | 260 | 1410 | 260 | 1410 | 260 | 1410 | 260 |
| SV40 Intron | 1417 | 172 | 1417 | 172 | 1417 | 172 | 1417 | 172 |
| Modulatory Polynucleotide | 1255 | 158 | 1248 | 158 | 1231 | 158 | 1219 | 158 |
| Rabbit globin PolyA Signal | 1420 | 127 | 1420 | 127 | 1420 | 127 | 1420 | 127 |
| 3′ ITR | 1383 | 130 | 1383 | 130 | 1383 | 130 | 1383 | 130 |

TABLE 27
Sequence Regions in ITR to ITR Sequences

| | VOYHT39 | | VOYHT40 | | VOYHT41 | | VOYHT42 | |
|---|---|---|---|---|---|---|---|---|
| | (SEQ ID NO: | | (SEQ ID NO: | | (SEQ ID NO: | | (SEQ ID NO: | |
| | 1429) | | 1430) | | 1431) | | 1432) | |
| | Region | | Region | | Region | | Region | |
| | SEQ | Region | SEQ | Region | SEQ ID | Region | SEQ ID | Region |
| Sequence Regions | ID NO | length | ID NO | length | NO | length | NO | length |
| 5′ ITR | 1381 | 105 | 1381 | 105 | 1381 | 105 | 1381 | 105 |
| CMV enhancer | 1408 | 382 | 1408 | 382 | 1408 | 387 | 1408 | 382 |
| CBA Promoter | 1410 | 260 | 1410 | 260 | 1410 | 260 | 1410 | 260 |
| SV40 Intron | 1417 | 172 | 1417 | 172 | 1417 | 172 | 1417 | 172 |
| Modulatory Polynucleotide | 1207 | 158 | 1250 | 158 | 1251 | 158 | 1252 | 158 |
| Rabbit globin PolyA Signal | 1420 | 127 | 1420 | 127 | 1420 | 127 | 1420 | 127 |
| 3′ ITR | 1383 | 130 | 1383 | 130 | 1383 | 130 | 1383 | 130 |

TABLE 28
Sequence Regions in ITR to ITR Sequences

| | VOYHT43 | | VOYHT44 | | VOYHT45 | | VOYHT46 | |
|---|---|---|---|---|---|---|---|---|
| | (SEQ ID NO: | | (SEQ ID NO: | | (SEQ ID NO: | | (SEQ ID NO: | |
| | 1433) | | 1434) | | 1435) | | 1436) | |
| | Region | | Region | | Region | | Region | |
| | SEQ | Region | SEQ | Region | SEQ ID | Region | SEQ ID | Region |
| Sequence Regions | ID NO | length | ID NO | length | NO | length | NO | length |
| 5′ ITR | 1381 | 105 | 1381 | 105 | 1381 | 105 | 1381 | 105 |
| CMV enhancer | 1408 | 382 | 1408 | 382 | 1408 | 387 | 1408 | 382 |
| CBA Promoter | 1410 | 260 | 1410 | 260 | 1410 | 260 | 1410 | 260 |
| SV40 Intron | 1417 | 172 | 1417 | 172 | 1417 | 172 | 1417 | 172 |
| Modulatory Polynucleotide | 1253 | 260 | 1194 | 260 | 1223 | 260 | 1211 | 260 |
| Rabbit globin PolyA Signal | 1420 | 127 | 1420 | 127 | 1420 | 127 | 1420 | 127 |
| 3′ ITR | 1383 | 130 | 1383 | 130 | 1383 | 130 | 1383 | 130 |

TABLE 29
Sequence Regions in ITR to ITR Sequences

| | VOYHT47 | | VOYHT48 | |
|---|---|---|---|---|
| | (SEQ ID NO: 1437) | | (SEQ ID NO: 1438) | |
| | Region | Region | Region | Region |
| Sequence Regions | SEQ ID NO | length | SEQ ID NO | length |
| 5′ ITR | 1381 | 105 | 1381 | 105 |
| CMV enhancer | 1408 | 382 | 1408 | 382 |
| CBA Promoter | 1410 | 260 | 1410 | 260 |
| SV40 Intron | 1417 | 172 | 1417 | 172 |
| Modulatory Polynucleotide | 1262 | 163 | 1347 | 163 |
| Rabbit globin PolyA Signal | 1420 | 127 | 1420 | 127 |
| 3′ ITR | 1383 | 130 | 1383 | 130 |

[0546] In one embodiment, the AAV particle viral genome comprises SEQ ID NO: 1366 (VOYHT15) which comprises a 5′ inverted terminal repeat (ITR) sequence region and a 3′ ITR sequence region, a CMV enhancer sequence region, a CBA promoter sequence region, an SV40 intron sequence region, a modulatory polynucleotide region, and a rabbit globin polyadenylation signal sequence region.

[0547] In one embodiment, the AAV particle viral genome comprises SEQ ID NO: 1367 (VOYHT16) which comprises a 5′ inverted terminal repeat (ITR) sequence region and a 3′ ITR sequence region, a CMV enhancer sequence region, a CBA promoter sequence region, an SV40 intron sequence region, a modulatory polynucleotide region, and a rabbit globin polyadenylation signal sequence region.

[0548] In one embodiment, the AAV particle viral genome comprises SEQ ID NO: 1388 (VOYHT35) which comprises a 5′ inverted terminal repeat (ITR) sequence region and a 3′ ITR sequence region, a CMV enhancer sequence region, a CBA promoter sequence region, an SV40 intron sequence region, a modulatory polynucleotide region, and a rabbit globin polyadenylation signal sequence region.

[0549] In one embodiment, the AAV particle viral genome comprises SEQ ID NO: 1426 (VOYHT36) which comprises a 5′ inverted terminal repeat (ITR) sequence region and a 3′ ITR sequence region, a CMV enhancer sequence region, a CBA promoter sequence region, an SV40 intron sequence region, a modulatory polynucleotide region, and a rabbit globin polyadenylation signal sequence region.

[0550] In one embodiment, the AAV particle viral genome comprises SEQ ID NO: 1427 (VOYHT37) which comprises a 5′ inverted terminal repeat (ITR) sequence region and a 3′ ITR sequence region, a CMV enhancer sequence region, a CBA promoter sequence region, an SV40 intron sequence region, a modulatory polynucleotide region, and a rabbit globin polyadenylation signal sequence region.

[0551] In one embodiment, the AAV particle viral genome comprises SEQ ID NO: 1428 (VOYHT38) which comprises a 5′ inverted terminal repeat (ITR) sequence region and a 3′ ITR sequence region, a CMV enhancer sequence region, a CBA promoter sequence region, an SV40 intron sequence region, a modulatory polynucleotide region, and a rabbit globin polyadenylation signal sequence region.

[0552] In one embodiment, the AAV particle viral genome comprises SEQ ID NO: 1429 (VOYHT39) which comprises a 5′ inverted terminal repeat (ITR) sequence region and a 3′ ITR sequence region, a CMV enhancer sequence region, a CBA promoter sequence region, an SV40 intron sequence region, a modulatory polynucleotide region, and a rabbit globin polyadenylation signal sequence region.

[0553] In one embodiment, the AAV particle viral genome comprises SEQ ID NO: 1430 (VOYHT40) which comprises a 5′ inverted terminal repeat (ITR) sequence region and a 3′ ITR sequence region, a CMV enhancer sequence region, a CBA promoter sequence region, an SV40 intron sequence region, a modulatory polynucleotide region, and a rabbit globin polyadenylation signal sequence region.

[0554] In one embodiment, the AAV particle viral genome comprises SEQ ID NO: 1431 (VOYHT41) which comprises a 5′ inverted terminal repeat (ITR) sequence region and a 3′ ITR sequence region, a CMV enhancer sequence region, a CBA promoter sequence region, an SV40 intron sequence region, a modulatory polynucleotide region, and a rabbit globin polyadenylation signal sequence region.

[0555] In one embodiment, the AAV particle viral genome comprises SEQ ID NO: 1432 (VOYHT42) which comprises a 5′ inverted terminal repeat (ITR) sequence region and a 3′ ITR sequence region, a CMV enhancer sequence region, a CBA promoter sequence region, an SV40 intron sequence region, a modulatory polynucleotide region, and a rabbit globin polyadenylation signal sequence region.

[0556] In one embodiment, the AAV particle viral genome comprises SEQ ID NO: 1433 (VOYHT43) which comprises a 5′ inverted terminal repeat (ITR) sequence region and a 3′ ITR sequence region, a CMV enhancer sequence region, a CBA promoter sequence region, an SV40 intron sequence region, a modulatory polynucleotide region, and a rabbit globin polyadenylation signal sequence region.

[0557] In one embodiment, the AAV particle viral genome comprises SEQ ID NO: 1434 (VOYHT44) which comprises a 5′ inverted terminal repeat (ITR) sequence region and a 3′ ITR sequence region, a CMV enhancer sequence region, a CBA promoter sequence region, an SV40 intron sequence region, a modulatory polynucleotide region, and a rabbit globin polyadenylation signal sequence region.

[0558] In one embodiment, the AAV particle viral genome comprises SEQ ID NO: 1435 (VOYHT45) which comprises a 5′ inverted terminal repeat (ITR) sequence region and a 3′ ITR sequence region, a CMV enhancer sequence region, a CBA promoter sequence region, an SV40 intron sequence region, a modulatory polynucleotide region, and a rabbit globin polyadenylation signal sequence region.

[0559] In one embodiment, the AAV particle viral genome comprises SEQ ID NO: 1436 (VOYHT46) which comprises a 5′ inverted terminal repeat (ITR) sequence region and a 3′ ITR sequence region, a CMV enhancer sequence region, a CBA promoter sequence region, an SV40 intron sequence region, a modulatory polynucleotide region, and a rabbit globin polyadenylation signal sequence region.

[0560] In one embodiment, the AAV particle viral genome comprises SEQ ID NO: 1437 (VOYHT47) which comprises a 5′ inverted terminal repeat (ITR) sequence region and a 3′ ITR sequence region, a CMV enhancer sequence region, a CBA promoter sequence region, an SV40 intron sequence region, a modulatory) polynucleotide region, and a rabbit globin polyadenylation signal sequence region.

[0561] In one embodiment, the AAV particle viral genome comprises SEQ ID NO: 1438 (VOYHT48) which comprises a 5′ inverted terminal repeat (ITR) sequence region and a 3′ ITR sequence region, a CMV enhancer sequence region, a CBA promoter sequence region, an SV40 intron sequence region, a modulatory polynucleotide region, and a rabbit globin polyadenylation signal sequence region.

[0562] In one embodiment, the AAV particle viral genome comprises a 5′ inverted terminal repeat (ITR) sequence region and a 3′ ITR sequence region, a MCS sequence region, an enhancer sequence region, a promoter sequence region, two exon sequence regions, two intron sequence regions, a modulatory polynucleotide region, a polyadenylation signal sequence region, and a filler sequence region.

[0563] In one embodiment, the AAV particle viral genome comprises a 5′ inverted terminal repeat (ITR) sequence region and a 3′ ITR sequence region, a MCS sequence region, a CMV enhancer sequence region, a CMV promoter sequence region, two exon sequence regions (ie1 exon 1 and human beta globin (hbglobin) exon 3 or fragments thereof), two intron sequence regions (ie1 intron 1 and hbglobin intron 2 or fragments thereof), a modulatory polynucleotide region, a human growth hormone (hGH) polyadenylation signal sequence region, and a filler sequence region. A non-limiting example of an ITR to ITR sequence for use in the AAV particles of the present invention having all of the sequence modules above are described in Table 30. In Table 30, the sequence identifier or sequence of the sequence region (Region SEQ ID NO) and the length of the sequence region (Region length) are described as well as the name and sequence identifier of the ITR to ITR sequence (e.g., VOYHT17 (SEQ ID NO: 1368)).

TABLE 30
Sequence Regions in ITR to ITR Sequences

| | VOYHT17 (SEQ ID NO: 1368) | |
|---|---|---|
| Sequence Regions | Region SEQ ID NO | Region length |
| 5′ ITR | 1380 | 141 |
| MCS | 1387 | 18 |
| CMV enhancer | 1409 | 303 |
| CMV Promoter | 1412 | 204 |
| Ie1 exon1 | 1415 | 134 |
| Ie1 intron1 | 1418 | 32 |
| hbglobin intron2 | 1419 | 347 |
| hbglobin exon3 | 1416 | 53 |
| Modulatory Polynucleotide | 1262 | 163 |
| hGH PolyA Signal | 1422 | 477 |
| Filler | 1406 | 2403 |
| 3′ ITR | 1382 | 141 |

[0564] In one embodiment, the AAV particle viral genome comprises SEQ ID NO: 1368 (VOYHT17) which comprises a 5′ inverted terminal repeat (ITR) sequence region and a 3′ ITR sequence region, a MCS sequence region, a CMV enhancer sequence region, a CMV promoter sequence region, two exon sequence regions (ie1 exon 1 and human beta globin (hbglobin) exon 3 or fragments thereof), two intron sequence regions (ie1 intron 1 and hbglobin intron 2 or fragments thereof), a modulatory polynucleotide region, a human growth hormone (hGH) polyadenylation signal sequence region, and a filler sequence region.

[0565] In one embodiment, the AAV particle viral genome comprises a 5′ inverted terminal repeat (ITR) sequence region and a 3′ ITR sequence region, a MCS sequence region, a CMV enhancer sequence region, a CMV promoter sequence region, two exon sequence regions (ie1 exon 1 and human beta globin (hbglobin) exon 3 or fragments thereof), two intron sequence regions (ie1 intron 1 and hbglobin intron 2 or fragments thereof), a modulatory polynucleotide region, a human growth hormone (hGH) polyadenylation signal sequence region, and a filler sequence region. A non-limiting example of an ITR to ITR sequence for use in the AAV particles of the present invention having all of the sequence modules above are described in Table 31. In Table 31, the sequence identifier or sequence of the sequence region (Region SEQ ID NO) and the length of the sequence region (Region length) are described as well as the name and sequence identifier of the ITR to ITR sequence (e.g., VOYHT19 (SEQ ID NO: 1370)).

TABLE 31
Sequence Regions in ITR to ITR Sequences

| | VOYHT19 (SEQ ID NO: 1370) | |
|---|---|---|
| Sequence Regions | Region SEQ ID NO | Region length |
| 5′ ITR | 1380 | 141 |
| Filler | 1392 | 2405 |
| CMV enhancer | 1409 | 303 |
| CMV Promoter | 1412 | 204 |
| Ie1 exon1 | 1415 | 134 |
| Ie1 intron1 | 1418 | 32 |
| hbglobin intron2 | 1419 | 347 |
| hbglobin exon3 | 1416 | 53 |
| Modulatory Polynucleotide | 1262 | 163 |
| hGH PolyA Signal | 1389 | 14 |
| MCS | 1422 | 477 |
| 3′ ITR | 1382 | 141 |

[0566] In one embodiment, the AAV particle viral genome comprises SEQ ID NO: 1370 (VOYHT19) which comprises a 5′ inverted terminal repeat (ITR) sequence region and a 3′ ITR sequence region, a MCS sequence region, a CMV enhancer sequence region, a CMV promoter sequence region, two exon sequence regions (ie1 exon 1 and human beta globin (hbglobin) exon 3 or fragments thereof), two intron sequence regions (ie1 intron 1 and hbglobin exon 3 or fragments thereof), a modulatory polynucleotide region, a human growth hormone (hGH) polyadenylation signal sequence region, and a filler sequence region.

[0567] In one embodiment, the AAV particle viral genome comprises a 5′ inverted terminal repeat (ITR) sequence region and a 3′ ITR sequence region, two MCS sequence regions, an enhancer sequence region, a promoter sequence region, two exon sequence regions, two intron sequence regions, a modulatory polynucleotide region, a polyadenylation signal sequence region, and a filler sequence region.

[0568] In one embodiment, the AAV particle viral genome comprises a 5′ inverted terminal repeat (ITR) sequence region and a 3′ ITR sequence region, two MCS sequence regions, a CMV enhancer sequence region, a CMV promoter sequence region, two exon sequence regions (ie1 exon 1 and human beta globin (hbglobin) exon 3 or fragments thereof), two intron sequence regions (ie1 intron 1 and hbglobin exon 3 or fragments thereof), a modulatory polynucleotide region, a human growth hormone (hGH) polyadenylation signal sequence region, and a filler sequence region. A non-limiting example of an ITR to ITR sequence for use in the AAV particles of the present invention having all of the sequence modules above are described in Table 32. In Table 32, the sequence identifier or sequence of the sequence region (Region SEQ ID NO) and the length of the sequence region (Region length) are described as well as the name and sequence identifier of the ITR to ITR sequence (e.g., VOYHT18 (SEQ ID NO: 1369)).

TABLE 32
Sequence Regions in ITR to ITR Sequences

| | VOYHT18 (SEQ ID NO: 1369) | |
|---|---|---|
| Sequence Regions | Region SEQ ID NO | Region length |
| 5′ ITR | 1380 | 141 |
| MCS | 1387 | 18 |
| CMV enhancer | 1409 | 303 |
| CMV Promoter | 1412 | 204 |
| Ie1 exon1 | 1415 | 134 |
| Ie1 intron1 | 1418 | 32 |
| hbglobin intron2 | 1419 | 347 |
| hbglobin exon3 | 1416 | 53 |
| Modulatory Polynucleotide | 1262 | 163 |
| MCS | 1389 | 14 |
| hGH PolyA Signal | 1422 | 477 |
| Filler | 1407 | 105 |
| 3′ ITR | 1382 | 141 |

[0569] In one embodiment, the AAV particle viral genome comprises SEQ ID NO: 1369 (VOYHT18) which comprises a 5′ inverted terminal repeat (ITR) sequence region and a 3′ ITR sequence region, two MCS sequence regions, a CMV enhancer sequence region, a CMV promoter sequence region, two exon sequence regions (ie1 exon 1 and human beta globin (hbglobin) exon 3 or fragments thereof), two intron sequence regions (ie1 intron 1 and hbglobin exon 3 or fragments thereof), a modulatory polynucleotide region, a human growth hormone (hGH) polyadenylation signal sequence region, and a filler sequence region.

[0570] In one embodiment, the AAV particle viral genome comprises a 5′ inverted terminal repeat (ITR) sequence region and a 3′ ITR sequence region, two MCS sequence regions, a CMV enhancer sequence region, a CMV promoter sequence region, two exon sequence regions (ie1 exon 1 and human beta globin (hbglobin) exon 3 or fragments thereof), two intron sequence regions (ie1 intron 1 and hbglobin exon 3 or fragments thereof), a modulatory polynucleotide region, a human growth hormone (hGH) polyadenylation signal sequence region, and a filler sequence region. A non-limiting example of an ITR to ITR sequence for use in the AAV particles of the present invention having all of the sequence modules above are described in Table 33. In Table 33, the sequence identifier or sequence of the sequence region (Region SEQ ID NO) and the length of the sequence region (Region length) are described as well as the name and sequence identifier of the ITR to ITR sequence (e.g., VOYHT20 (SEQ ID NO: 1371)).

TABLE 33
Sequence Regions in ITR to ITR Sequences

| | VOYHT20 (SEQ ID NO: 1371) | |
|---|---|---|
| Sequence Regions | Region SEQ ID NO | Region length |
| 5′ ITR | 1380 | 141 |
| MCS | 1385 | 121 |
| Filler | 1394 | 103 |
| CMV enhancer | 1409 | 303 |
| CMV Promoter | 1412 | 204 |
| Ie1 exon1 | 1415 | 134 |
| Ie1 intron1 | 1418 | 32 |
| hbglobin intron2 | 1419 | 347 |
| hbglobin exon3 | 1416 | 53 |
| Modulatory Polynucleotide | 1262 | 163 |
| MCS | 1389 | 14 |
| hGH PolyA Signal | 1422 | 477 |
| 3′ ITR | 1382 | 141 |

[0571] In one embodiment, the AAV particle viral genome comprises SEQ ID NO: 1371 (VOYHT20) which comprises a 5′ inverted terminal repeat (ITR) sequence region and a 3′ ITR sequence region, two MCS sequence regions, a CMV enhancer sequence region, a CMV promoter sequence region, two exon sequence regions (ie1 exon 1 and human beta globin (hbglobin) exon 3 or fragments thereof), two intron sequence regions (ie1 intron 1 and hbglobin exon 3 or fragments thereof), a modulatory polynucleotide region, a human growth hormone (hGH) polyadenylation signal sequence region, and a filler sequence region.

[0572] In one embodiment, the AAV particle viral genome comprises a 5′ inverted terminal repeat (ITR) sequence region and a 3′ ITR sequence region, two MCS sequence regions, a CMV enhancer sequence region, a CMV promoter sequence region, two exon sequence regions (ie1 exon 1 and human beta globin (hbglobin) exon 3 or fragments thereof), two intron sequence regions (ie1 intron 1 and hbglobin exon 3 or fragments thereof), a modulatory polynucleotide region, a human growth hormone (hGH) polyadenylation signal sequence region, and a filler sequence region. Non-limiting examples of ITR to ITR sequences for use in the AAV particles of the present invention having all of the sequence modules above are described in Table 34. In Table 34, the sequence identifier or sequence of the sequence region (Region SEQ ID NO) and the length of the sequence region (Region length) are described as well as the name and sequence identifier of the ITR to ITR sequence (e.g., VOYHT21 (SEQ ID NO: 1372)).

TABLE 34
Sequence Regions in ITR to ITR Sequences

| | VOYHT21 | | VOYHT22 | |
|---|---|---|---|---|
| | (SEQ ID NO: 1372) | | (SEQ ID NO: 1373) | |
| Sequence | Region | Region | Region | Region |
| Regions | SEQ ID NO | length | SEQ ID NO | length |
| 5′ ITR | 1380 | 141 | 1380 | 141 |
| MCS | 1387 | 18 | 1387 | 18 |
| CMV enhancer | 1409 | 303 | 1409 | 303 |
| CMV Promoter | 1412 | 204 | 1412 | 204 |
| Ie1 exon1 | 1415 | 134 | 1415 | 134 |
| Ie1 intron1 | 1418 | 32 | 1418 | 32 |
| Filler | 1398 | 2395 | 1399 | 97 |
| hbglobin intron2 | 1419 | 347 | 1419 | 347 |
| hbglobin exon3 | 1416 | 53 | 1416 | 53 |
| Modulatory | 1262 | 163 | 1262 | 163 |
| Polynucleotide | | | | |
| MCS | 1389 | 14 | 1389 | 14 |
| hGH PolyA Signal | 1422 | 477 | 1422 | 477 |
| 3′ ITR | 1382 | 141 | 1382 | 141 |

[0573] In one embodiment, the AAV particle viral genome comprises SEQ ID NO 1372 (VOYHT21) which comprises a 5′ inverted terminal repeat (ITR) sequence region and a 3′ ITR sequence region, two MCS sequence regions, a CMV enhancer sequence region, a CMV promoter sequence region, two exon sequence regions (ie1 exon 1 and human beta globin (hbglobin) exon 3 or fragments thereof), two intron sequence regions (ie1 intron 1 and hbglobin exon 3 or fragments thereof), a modulatory polynucleotide region, a human growth hormone (hGH) polyadenylation signal sequence region, and a filler sequence region.

[0574] In one embodiment, the AAV particle viral genome comprises SEQ ID NO: 1373 (VOYHT22) which comprises a 5′ inverted terminal repeat (ITR) sequence region and a 3′ ITR sequence region, two MCS sequence regions, a CMV enhancer sequence region, a CMV promoter sequence region, two exon sequence regions (ie1 exon 1 and human beta globin (hbglobin) exon 3 or fragments thereof), two intron sequence regions (ie1 intron 1 and hbglobin exon 3 or fragments thereof), a modulatory polynucleotide region, a human growth hormone (hGH) polyadenylation signal sequence region, and a filler sequence region.

[0575] In one embodiment, the AAV particle viral genome comprises a 5′ inverted terminal repeat (ITR) sequence region and a 3′ ITR sequence region, a MCS sequence region, an enhancer sequence region, a promoter sequence region, two exon sequence regions, two intron sequence regions, a modulatory polynucleotide region, a polyadenylation signal sequence region, and two filler sequence regions.

[0576] In one embodiment, the AAV particle viral genome comprises a 5′ inverted terminal repeat (ITR) sequence region and a 3′ ITR sequence region, a MCS sequence region, a CMV enhancer sequence region, a CMV promoter sequence region, two exon sequence regions (ie1 exon 1 and human beta globin (hbglobin) exon 3 or fragments thereof), two intron sequence regions (ie1 intron 1 and hbglobin exon 3 or fragments thereof), a modulatory polynucleotide region, a human growth hormone (hGH) polyadenylation signal sequence region, and two filler sequence regions. A non-limiting example of an ITR to ITR sequence for use in the AAV particles of the present invention having all of the sequence modules above are described in Table 35. In Table 35, the sequence identifier or sequence of the sequence region (Region SEQ ID NO) and the length of the sequence region (Region length) are described as well as the name and sequence identifier of the ITR to ITR sequence (e.g., VOYHT23 (SEQ ID NO: 1374)).

TABLE 35
Sequence Regions in ITR to ITR Sequences

| | VOYHT23 (SEQ ID NO: 1374) | |
|---|---|---|
| Sequence Regions | Region SEQ ID NO | Region length |
| 5′ ITR | 1380 | 141 |
| Filler | 1393 | 1203 |
| CMV enhancer | 1409 | 303 |
| CMV Promoter | 1412 | 204 |
| Ie1 exon1 | 1415 | 134 |
| Ie1 intron1 | 1418 | 32 |
| hbglobin intron2 | 1419 | 347 |
| hbglobin exon3 | 1416 | 53 |
| Modulatory | 1262 | 163 |
| Polynucleotide | | |
| MCS | 1389 | 14 |
| hGH PolyA Signal | 1422 | 477 |
| Filler | 1402 | 1209 |
| 3′ ITR | 1382 | 141 |

[0577] In one embodiment, the AAV particle viral genome comprises SEQ ID NO: 1374 (VOYHT23) which comprises a 5′ inverted terminal repeat (ITR) sequence region and a 3′ ITR sequence region, a MCS sequence region, a CMV enhancer sequence region, a CMV promoter sequence region, two exon sequence regions (ie1 exon 1 and human beta globin (hbglobin) exon 3 or fragments thereof), two intron sequence regions (ie1 intron 1 and hbglobin exon 3 or fragments thereof), a modulatory polynucleotide region, a human growth hormone (hGH) polyadenylation signal sequence region, and two filler sequence regions.

[0578] In one embodiment, the AAV particle viral genome comprises a 5′ inverted terminal repeat (ITR) sequence region and a 3′ ITR sequence region, two MCS sequence regions, an enhancer sequence region, a promoter sequence region, two exon sequence regions, two intron sequence regions, a modulatory polynucleotide region, a polyadenylation signal sequence region, and two filler sequence regions.

[0579] In one embodiment, the AAV particle viral genome comprises a 5′ inverted terminal repeat (ITR) sequence region and a 3′ ITR sequence region, two MCS sequence regions, a CMV enhancer sequence region, a CMV promoter sequence region, two exon sequence regions (ie1 exon 1 and human beta globin (hbglobin) exon 3 or fragments thereof), two intron sequence regions (ie1 intron 1 and hbglobin exon 3 or fragments thereof), a modulatory polynucleotide region, a human growth hormone (hGH) polyadenylation signal sequence region, and two filler sequence regions. A non-limiting example of an ITR to ITR sequence for use in the AAV particles of the present invention having all of the sequence modules above are described in Table 36. In Table 36, the sequence identifier or sequence of the sequence region (Region SEQ ID NO) and the length of the sequence region (Region length) are described as well as the name and sequence identifier of the ITR to ITR sequence (e.g., VOYHT24 (SEQ ID NO: 1375)).

TABLE 36
Sequence Regions in ITR to ITR Sequences

| | VOYHT24 (SEQ ID NO: 1375) | |
|---|---|---|
| Sequence Regions | Region SEQ ID NO | Region length |
| 5′ ITR | 1380 | 141 |
| MCS | 1386 | 73 |
| Filler | 1395 | 55 |
| CMV enhancer | 1409 | 303 |
| CMV Promoter | 1412 | 204 |
| Ie1 exon1 | 1415 | 134 |
| Ie1 intron1 | 1418 | 32 |
| hbglobin intron2 | 1419 | 347 |
| hbglobin exon3 | 1416 | 53 |
| Modulatory | 1262 | 163 |
| Polynucleotide | | |
| MCS | 1389 | 14 |
| hGH PolyA Signal | 1423 | 476 |
| Filler | 1403 | 56 |
| 3′ ITR | 1382 | 141 |

[0580] In one embodiment, the AAV particle viral genome comprises SEQ ID NO: 1375 (VOYHT24) which comprises a 5′ inverted terminal repeat (ITR) sequence region and a 3′ ITR sequence region, two MCS sequence regions, a CMV enhancer sequence region, a CMV promoter sequence region, two exon sequence regions (ie1 exon 1 and human beta globin (hbglobin) exon 3 or fragments thereof), two intron sequence regions (ie1 intron 1 and hbglobin exon 3 or fragments thereof), a modulatory polynucleotide region, a human growth hormone (hGH) polyadenylation signal sequence region, and two filler sequence regions.

[0581] In one embodiment, the AAV particle viral genome comprises a 5′ inverted terminal repeat (ITR) sequence region and a 3′ ITR sequence region, two MCS sequence regions, an enhancer sequence region, a promoter sequence region, two exon sequence regions, two intron sequence regions, a modulatory polynucleotide region, and a polyadenylation signal sequence region.

[0582] In one embodiment, the AAV particle viral genome comprises a 5′ inverted terminal repeat (ITR) sequence region and a 3′ ITR sequence region, two MCS sequence regions, a CMV enhancer sequence region, a CMV promoter sequence region, two exon sequence regions (ie1 exon 1 and human beta globin (hbglobin) exon 3 or fragments thereof), two intron sequence regions (ie1 intron 1 and hbglobin exon 3 or fragments thereof), a modulatory polynucleotide region, and a human growth hormone (hGH) polyadenylation signal sequence region. Non-limiting examples of an ITR to ITR sequences for use in the AAV particles of the present invention having all of the sequence modules above are described in Table 37. In Table 37, the sequence identifier or sequence of the sequence region (Region SEQ ID NO) and the length of the sequence region (Region length) are described as well as the name and sequence identifier of the ITR to ITR sequence (e.g., VOYHT25 (SEQ ID NO: 1376)).

TABLE 37
Sequence Regions in ITR to ITR Sequences

| | VOYHT25 | | VOYHT26 | |
|---|---|---|---|---|
| | (SEQ ID NO: 1376) | | (SEQ ID NO: 1377) | |
| Sequence | Region | Region | Region | Region |
| Regions | SEQ ID NO | length | SEQ ID NO | length |
| 5′ ITR | 1380 | 141 | 1380 | 141 |
| MCS | 1387 | 18 | 1387 | 18 |
| CMV enhancer | 1409 | 303 | 1409 | 303 |
| CMV Promoter | 1412 | 204 | 1412 | 204 |
| Ie1 exon1 | 1415 | 134 | 1415 | 134 |
| Ie1 intron1 | 1418 | 32 | 1418 | 32 |
| hbglobin intron2 | 1419 | 347 | 1419 | 347 |
| hbglobin exon3 | 1416 | 53 | 1416 | 53 |
| Modulatory | 1249 | 158 | 1262 | 163 |
| Polynucleotide | | | | |
| MCS | 1389 | 14 | 1389 | 14 |
| hGH PolyA Signal | 1422 | 477 | 1422 | 477 |
| 3′ ITR | 1382 | 141 | 1382 | 141 |

[0583] In one embodiment, the AAV particle viral genome comprises SEQ ID NO: 1376 (VOYHT25) which comprises a 5′ inverted terminal repeat (ITR) sequence region and a 3′ ITR sequence region, two MCS sequence regions, a CMV enhancer sequence region, a CMV promoter sequence region, two exon sequence regions (ie1 exon 1 and human beta globin (hbglobin) exon 3 or fragments thereof), two intron sequence regions (ie1 intron 1 and hbglobin exon 3 or fragments thereof), a modulatory polynucleotide region, and a human growth hormone (hGH) polyadenylation signal sequence region.

[0584] In one embodiment, the AAV particle viral genome comprises SEQ ID NO: 1377 (VOYHT26) which comprises a 5′ inverted terminal repeat (ITR) sequence region and a 3′ ITR sequence region, two MCS sequence regions, a CMV enhancer sequence region, a CMV promoter sequence region, two exon sequence regions (ie1 exon 1 and human beta globin (hbglobin) exon 3 or fragments thereof), two intron sequence regions (ie1 intron 1 and hbglobin exon 3 or fragments thereof), a modulatory polynucleotide region, and a human growth hormone (hGH) polyadenylation signal sequence region.

[0585] In one embodiment, the AAV particle viral genome comprises a 5′ inverted terminal repeat (ITR) sequence region and a 3′ ITR sequence region, a promoter sequence region, and a modulatory polynucleotide region.

[0586] In one embodiment, the AAV particle viral genome comprises a 5′ inverted terminal repeat (ITR) sequence region and a 3′ ITR sequence region, an H1 promoter sequence region, and a modulatory polynucleotide region. Non-limiting examples of an ITR to ITR sequences for use in the AAV particles of the present invention having all of the sequence modules above are described in Table 38. In Table 38, the sequence identifier or sequence of the sequence region (Region SEQ ID NO) and the length of the sequence region (Region length) are described as well as the name and sequence identifier of the ITR to ITR sequence (e.g., VOYHT27 (SEQ ID NO: 1378)).

TABLE 38
Sequence Regions in ITR to ITR Sequences

| | VOYHT27 | | VOYHT28 | |
|---|---|---|---|---|
| | (SEQ ID NO: 1378) | | (SEQ ID NO: 1379) | |
| Sequence | Region | Region | Region | Region |
| Regions | SEQ ID NO | length | SEQ ID NO | length |
| 5′ ITR | 1381 | 105 | 1381 | 105 |
| H1 Promoter | 1413 | 219 | 1413 | 219 |
| Modulatory | 1259 | 260 | 1249 | 158 |
| Polynucleotide | | | | |
| 3′ ITR | 1383 | 130 | 1383 | 130 |

[0587] In one embodiment, the AAV particle viral genome comprises SEQ ID NO: 1378 (VOYHT27) which comprises a 5′ inverted terminal repeat (ITR) sequence region and a 3′ ITR sequence region, an H1 promoter sequence region, and a modulatory polynucleotide region.

[0588] In one embodiment, the AAV particle viral genome comprises SEQ ID NO: 1379 (VOYHT28) which comprises a 5′ inverted terminal repeat (ITR) sequence region and a 3′ ITR sequence region, an H1 promoter sequence region, and a modulatory polynucleotide region.

[0589] In one embodiment, the AAV particle viral genome comprises one or two promoter sequence regions, a modulatory polynucleotide sequence region, and a bovine growth hormone (bGH) polyadenylation signal sequence region.

[0590] In one embodiment, the AAV particle viral genome comprises a two promoter sequence regions, a modulatory polynucleotide region, and a polyadenylation signal sequence region.

[0591] In one embodiment, the AAV particle viral genome comprises a CMV and T7 promoter sequence region, a modulatory polynucleotide region, and a bGH polyadenylation signal sequence region. Non-limiting examples of sequences for use in the AAV particles of the present invention having all of the sequence modules above are described in Table 39. In Table 39, the sequence identifier or sequence of the sequence region (Region SEQ ID NO) and the length of the sequence region (Region length) are described as well as the name of the sequence (e.g., VOYHT29).

TABLE 39
Sequence Regions

| | VOYHT29 | | VOYHT30 | | VOYHT31 | | VOYHT32 | |
|---|---|---|---|---|---|---|---|---|
| | Region | | Region | | Region | | Region | |
| Sequence | SEQ ID | Region | SEQ ID | Region | SEQ ID | Region | SEQ ID | Region |
| Regions | NO | length | NO | length | NO | length | NO | length |
| CMV | 1411 | 588 | 1411 | 588 | 1411 | 588 | 1411 | 588 |
| Promoter | | | | | | | | |
| T7 promoter | 1414 | 17 | 1414 | 17 | 1414 | 17 | 1414 | 17 |
| Modulatory | 1249 | 158 | 1259 | 260 | 1255 | 158 | 1253 | 260 |
| Poly nucleotide | | | | | | | | |
| bGH PolyA | 1421 | 225 | 1421 | 225 | 1421 | 225 | 1421 | 225 |
| Signal | | | | | | | | |

[0592] In one embodiment, the AAV particle viral genome comprises a CMV promoter sequence region (SEQ ID NO: 1411), a T7 promoter sequence region (SEQ ID NO: 1414), a modulatory polynucleotide sequence region (SEQ ID NO: 1249), and a bGH polyadenylation signal sequence region (SEQ ID NO: 1421).

[0593] In one embodiment, the AAV particle viral genome comprises a CMV promoter sequence region (SEQ ID NO: 1411), a T7 promoter sequence region (SEQ ID NO: 1414), a modulatory polynucleotide sequence region (SEQ ID NO: 1259), and a bGH polyadenylation signal sequence region (SEQ ID NO: 1421).

[0594] In one embodiment, the AAV particle viral genome comprises a CMV promoter sequence region (SEQ ID NO: 1411), a T7 promoter sequence region (SEQ ID NO: 1414), a modulatory polynucleotide sequence region (SEQ ID NO: 1255), and a bGH polyadenylation signal sequence region (SEQ ID NO: 1421).

[0595] In one embodiment, the AAV particle viral genome comprises a CMV promoter sequence region (SEQ ID NO: 1411), a T7 promoter sequence region (SEQ ID NO: 1414), a modulatory polynucleotide sequence region (SEQ ID NO: 1253), and a bGH polyadenylation signal sequence region (SEQ ID NO: 1421).

[0596] In one embodiment, the AAV particle viral genome comprises one or two promoter sequence regions, and a modulatory polynucleotide sequence region.

[0597] In one embodiment, the AAV particle viral genome comprises a CMV and T7 promoter sequence region, and a modulatory polynucleotide region. Non-limiting examples of sequences for use in the AAV particles of the present invention having all of the sequence modules above are described in Table 40. In Table 40, the sequence identifier or sequence of the sequence region (Region SEQ ID NO) and the length of the sequence region (Region length) are described as well as the name of the sequence (e.g., VOYHT33).

TABLE 40
Sequence Regions

| | VOYHT33 | | VOYHT34 | |
|---|---|---|---|---|
| Sequence | Region | Region | Region | Region |
| Regions | SEQ ID NO | length | SEQ ID NO | length |
| CMV Promoter | GTTG | 4 | — | — |
| H1 Promoter | 1413 | 219 | 1413 | 219 |
| Modulatory | 1249 | 158 | 1259 | 260 |
| Polynucleotide | | | | |

[0598] In one embodiment, the AAV particle viral genome comprises a CMV promoter sequence region (Sequence: GTTG), a H1 promoter sequence region (SEQ ID NO: 1413), and a modulatory polynucleotide sequence region (SEQ ID NO: 1249).

[0599] In one embodiment, the AAV particle viral genome comprises a H1 promoter sequence region (SEQ ID NO: 1413), and a modulatory polynucleotide sequence region (SEQ ID NO: 1259).

[0600] AAV particles may be modified to enhance the efficiency of delivery. Such modified AAV particles comprising the nucleic acid sequence encoding the siRNA molecules of the present invention can be packaged efficiently and can be used to successfully infect the target cells at high frequency and with minimal toxicity.

[0601] In some embodiments, the AAV particle comprising a nucleic acid sequence encoding the siRNA molecules of the present invention may be a human serotype AAV particle. Such human AAV particle may be derived from any known serotype, e.g., from any one of serotypes AAV1-AAV11. As non-limiting examples, AAV particles may be vectors comprising an AAV1-derived genome in an AAV1-derived capsid; vectors comprising an AAV2-derived genome in an AAV2-derived capsid; vectors comprising an AAV4-derived genome in an AAV4 derived capsid; vectors comprising an AAV6-derived genome in an AAV6 derived capsid or vectors comprising an AAV9-derived genome in an AAV9 derived capsid.

[0602] In other embodiments, the AAV particle comprising a nucleic acid sequence for encoding siRNA molecules of the present invention may be a pseudotyped hybrid or chimeric AAV particle which contains sequences and/or components originating from at least two different AAV serotypes. Pseudotyped AAV particles may be vectors comprising an AAV genome derived from one AAV serotype and a capsid protein derived at least in part from a different AAV serotype. As non-limiting examples, such pseudotyped AAV particles may be vectors comprising an AAV2-derived genome in an AAV1-derived capsid; or vectors comprising an AAV2-derived genome in an AAV6-derived capsid; or vectors comprising an AAV2-derived genome in an AAV4-derived capsid; or an AAV2-derived genome in an AAV9-derived capsid. In like fashion, the present invention contemplates any hybrid or chimeric AAV particle.

[0603] In other embodiments, AAV particles comprising a nucleic acid sequence encoding the siRNA molecules of the present invention may be used to deliver siRNA molecules to the central nervous system (e.g., U.S. Pat. No. 6,180,613; the contents of which is herein incorporated by reference in its entirety).

[0604] In some aspects, the AAV particles comprising a nucleic acid sequence encoding the siRNA molecules of the present invention may further comprise a modified capsid including peptides from non-viral origin. In other aspects, the AAV particle may contain a CNS specific chimeric capsid to facilitate the delivery of encoded siRNA duplexes into the brain and the spinal cord. For example, an alignment of cap nucleotide sequences from AAV variants exhibiting CNS tropism may be constructed to identify variable region (VR) sequence and structure.

### Viral Production

[0605] The present disclosure provides a method for the generation of parvoviral particles, e.g. AAV particles, by viral genome replication in a viral replication cell comprising contacting the viral replication cell with an AAV polynucleotide or AAV genome.

[0606] The present disclosure provides a method for producing an AAV particle having enhanced (increased, improved) transduction efficiency comprising the steps of: 1) co-transfecting competent bacterial cells with a bacmid vector and either a viral construct vector and/or AAV payload construct vector, 2) isolating the resultant viral construct expression vector and AAV payload construct expression vector and separately transfecting viral replication cells, 3) isolating and purifying resultant payload and viral construct particles comprising viral construct expression vector or AAV payload construct expression vector, 4) co-infecting a viral replication cell with both the AAV payload and viral construct particles comprising viral construct expression vector or AAV payload construct expression vector, 5) harvesting and purifying the viral particle comprising a parvoviral genome.

[0607] In one embodiment, the present invention provides a method for producing an AAV particle comprising the steps of 1) simultaneously co-transfecting mammalian cells, such as, but not limited to HEK293 cells, with a payload region, a construct expressing rep and cap genes and a helper construct, 2) harvesting and purifying the AAV particle comprising a viral genome.

### Cells

[0608] The present disclosure provides a cell comprising an AAV polynucleotide and/or AAV genome.

[0609] Viral production disclosed herein describes processes and methods for producing AAV particles that contact a target cell to deliver a payload construct, e.g. a recombinant viral construct, which comprises a polynucleotide sequence encoding a payload molecule.

[0610] In one embodiment, the AAV particles may be produced in a viral replication cell that comprises an insect cell.

[0611] Growing conditions for insect cells in culture, and production of heterologous products in insect cells in culture are well-known in the art, see U.S. Pat. No. 6,204,059, the contents of which are herein incorporated by reference in their entirety.

[0612] Any insect cell which allows for replication of parvovirus and which can be maintained in culture can be used in accordance with the present invention. Cell lines may be used from Spodoptera frugiperda, including, but not limited to the Sf9 or Sf21 cell lines, Drosophila cell lines, or mosquito cell lines, such as Aedes albopictus derived cell lines. Use of insect cells for expression of heterologous proteins is well documented, as are methods of introducing nucleic acids, such as vectors, e.g., insect-cell compatible vectors, into such cells and methods of maintaining such cells in culture. See, for example, Methods in Molecular Biology, ed. Richard, Humana Press, N J (1995); O'Reilly et al., Baculovirus Expression Vectors, A Laboratory Manual, Oxford Univ. Press (1994); Samulski et al., J. Vir. 63:3822-8 (1989); Kajigaya et al., Proc. Nat'l. Acad. Sci. USA 88: 4646-50 (1991); Ruffing et al., J. Vir. 66:6922-30 (1992); Kimbauer et al., Vir. 219:37-44 (1996); Zhao et al., Vir. 272:382-93 (2000); and Samulski et al., U.S. Pat. No. 6,204,059, the contents of each of which is herein incorporated by reference in its entirety.

[0613] The viral replication cell may be selected from any biological organism, including prokaryotic (e.g., bacterial) cells, and eukaryotic cells, including, insect cells, yeast cells and mammalian cells. Viral replication cells may comprise mammalian cells such as A549, WEH1, 3T3, 10T1/2, BHK, MDCK, COS 1, COS 7, BSC 1, BSC 40, BMT 10, VERO, W138, HeLa, HEK293, Saos, C2C12, L cells, HT1080, HepG2 and primary fibroblast, hepatocyte and myoblast cells derived from mammals. Viral replication cells comprise cells derived from mammalian species including, but not limited to, human, monkey, mouse, rat, rabbit, and hamster or cell type, including but not limited to fibroblast, hepatocyte, tumor cell, cell line transformed cell, etc.

### Small Scale Production of AAV Particles

[0614] Viral production disclosed herein describes processes and methods for producing AAV particles that contact a target cell to deliver a payload, e.g. a recombinant viral construct, which comprises a polynucleotide sequence encoding a payload.

[0615] In one embodiment, the AAV particles may be produced in a viral replication cell that comprises a mammalian cell.

[0616] Viral replication cells commonly used for production of recombinant AAV particles include, but are not limited to 293 cells, COS cells, HeLa cells, KB cells, and other mammalian cell lines as described in U.S. Pat. Nos. 6,156,303, 5,387,484, 5,741,683, 5,691,176, and 5,688,676; U.S. patent application 2002/0081721, and International Patent Applications WO 00/47757, WO 00/24916, and WO 96/17947, the contents of each of which are herein incorporated by reference in their entireties.

[0617] In one embodiment, AAV particles are produced in mammalian-cells wherein all three VP proteins are expressed at a stoichiometry approaching 1:1:10 (VP1:VP2:VP3). The regulatory mechanisms that allow this controlled level of expression include the production of two mRNAs, one for VP1, and the other for VP2 and VP3, produced by differential splicing.

[0618] In another embodiment, AAV particles are produced in mammalian cells using a triple transfection method wherein a payload construct, parvoviral Rep and parvoviral Cap and a helper construct are comprised within three different constructs. The triple transfection method of the three components of AAV particle production may be utilized to produce small lots of virus for assays including transduction efficiency, target tissue (tropism) evaluation, and stability.

### Baculovirus

[0619] Particle production disclosed herein describes processes and methods for producing AAV particles that contact a target cell to deliver a payload construct which comprises a polynucleotide sequence encoding a payload.

[0620] Briefly, the viral construct vector and the AAV payload construct vector are each incorporated by a transposon donor/acceptor system into a bacmid, also known as a baculovirus plasmid, by standard molecular biology techniques known and performed by a person skilled in the art. Transfection of separate viral replication cell populations produces two baculoviruses, one that comprises the viral construct expression vector, and another that comprises the AAV payload construct expression vector. The two baculoviruses may be used to infect a single viral replication cell population for production of AAV particles.

[0621] Baculovirus expression vectors for producing viral particles in insect cells, including but not limited to Spodoptera frugiperda (Sf9) cells, provide high titers of viral particle product. Recombinant baculovirus encoding the viral construct expression vector and AAV payload construct expression vector initiates a productive infection of viral replicating cells. Infectious baculovirus particles released from the primary infection secondarily infect additional cells in the culture, exponentially infecting the entire cell culture population in a number of infection cycles that is a function of the initial multiplicity of infection, see Urabe, M. et al., J Virol. 2006 February; 80 (4):1874-85, the contents of which are herein incorporated by reference in their entirety.

[0622] Production of AAV particles with baculovirus in an insect cell system may address known baculovirus genetic and physical instability. In one embodiment, the production system addresses baculovirus instability over multiple passages by utilizing a titerless infected-cells preservation and scale-up system. Small scale seed cultures of viral producing cells are transfected with viral expression constructs encoding the structural, non-structural, components of the viral particle. Baculovirus-infected viral producing cells are harvested into aliquots that may be cryopreserved in liquid nitrogen; the aliquots retain viability and infectivity for infection of large scale viral producing cell culture Wasilko D J et al., Protein Expr Purif. 2009 June; 65(2):122-32, the contents of which are herein incorporated by reference in their entirety.

[0623] A genetically stable baculovirus may be used to produce source of the one or more of the components for producing AAV particles in invertebrate cells. In one embodiment, defective baculovirus expression vectors may be maintained episomally in insect cells. In such an embodiment the bacmid vector is engineered with replication control elements, including but not limited to promoters, enhancers, and/or cell-cycle regulated replication elements.

[0624] In one embodiment, baculoviruses may be engineered with a (non-) selectable marker for recombination into the chitinase/cathepsin locus. The chia/v-cath locus is non-essential for propagating baculovirus in tissue culture, and the V-cath (EC 3.4.22.50) is a cysteine endoprotease that is most active on Arg-Arg dipeptide containing substrates. The Arg-Arg dipeptide is present in densovirus and parvovirus capsid structural proteins but infrequently occurs in dependovirus VP1.

[0625] In one embodiment, stable viral replication cells permissive for baculovirus infection are engineered with at least one stable integrated copy of any of the elements necessary for AAV replication and viral particle production including, but not limited to, the entire AAV genome, Rep and Cap genes, Rep genes, Cap genes, each Rep protein as a separate transcription cassette, each VP protein as a separate transcription cassette, the AAP (assembly activation protein), or at least one of the baculovirus helper genes with native or non-native promoters.

### Large-Scale Production

[0626] In some embodiments, AAV particle production may be modified to increase the scale of production. Large scale viral production methods according to the present disclosure may include any of those taught in U.S. Pat. Nos. 5,756,283, 6,258,595, 6,261,551, 6,270,996, 6,281,010, 6,365,394, 6,475,769, 6,482,634, 6,485,966, 6,943,019, 6,953,690, 7,022,519, 7,238,526, 7,291,498 and 7,491,508 or International Publication Nos. WO1996039530, WO1998010088, WO1999014354, WO1999015685, WO1999047691, WO2000055342, WO2000075353 and WO2001023597, the contents of each of which are herein incorporated by reference in their entirety. Methods of increasing viral particle production scale typically comprise increasing the number of viral replication cells. In some embodiments, viral replication cells comprise adherent cells. To increase the scale of viral particle production by adherent viral replication cells, larger cell culture surfaces are required. In some cases, large-scale production methods comprise the use of roller bottles to increase cell culture surfaces. Other cell culture substrates with increased surface areas are known in the art. Examples of additional adherent cell culture products with increased surface areas include, but are not limited to CELLSTACK®, CELLCUBE® (Corning Corp., Corning, N.Y.) and NUNC™ CELL FACTORY™ (Thermo Scientific, Waltham, Mass.) In some cases, large-scale adherent cell surfaces may comprise from about 1,000 cm² to about 100,000 cm². In some cases, large-scale adherent cell cultures may comprise from about 10⁷ to about 10⁹ cells, from about 10⁸ to about 10^{1U} cells, from about 10⁹ to about 10¹² cells or at least 10¹² cells. In some cases, large-scale adherent cultures may produce from about 10⁹ to about 10¹², from about 10¹⁰ to about 10¹³, from about 10¹¹ to about 10¹⁴, from about 10¹² to about 10¹⁵ or at least 10¹⁵ viral particles.

[0627] In some embodiments, large-scale viral production methods of the present disclosure may comprise the use of suspension cell cultures. Suspension cell culture allows for significantly increased numbers of cells. Typically, the number of adherent cells that can be grown on about 10-50 cm² of surface area can be grown in about 1 cm³ volume in suspension.

[0628] Transfection of replication cells in large-scale culture formats may be carried out according to any methods known in the art. For large-scale adherent cell cultures, transfection methods may include, but are not limited to the use of inorganic compounds (e.g. calcium phosphate), organic compounds [e.g. polyethyleneimine (PEI)] or the use of non-chemical methods (e.g. electroporation.) With cells grown in suspension, transfection methods may include, but are not limited to the use of calcium phosphate and the use of PEI. In some cases, transfection of large scale suspension cultures may be carried out according to the section entitled “Transfection Procedure” described in Feng, L. et al., 2008. Biotechnol Appl. Biochem. 50:121-32, the contents of which are herein incorporated by reference in their entirety. According to such embodiments, PEI-DNA complexes may be formed for introduction of plasmids to be transfected. In some cases, cells being transfected with PEI-DNA complexes may be ‘shocked’ prior to transfection. This comprises lowering cell culture temperatures to 4° C. for a period of about 1 hour. In some cases, cell cultures may be shocked for a period of from about 10 minutes to about 5 hours. In some cases, cell cultures may be shocked at a temperature of from about 0° C. to about 20° C.

[0629] In some cases, transfections may include one or more vectors for expression of an RNA effector molecule to reduce expression of nucleic acids from one or more AAV payload construct. Such methods may enhance the production of viral particles by reducing cellular resources wasted on expressing payload constructs. In some cases, such methods may be carried according to those taught in US Publication No. US2014/0099666, the contents of which are herein incorporated by reference in their entirety.

### Bioreactors

[0630] In some embodiments, cell culture bioreactors may be used for large scale viral production. In some cases, bioreactors comprise stirred tank reactors. Such reactors generally comprise a vessel, typically cylindrical in shape, with a stirrer (e.g. impeller.) In some embodiments, such bioreactor vessels may be placed within a water jacket to control vessel temperature and/or to minimize effects from ambient temperature changes. Bioreactor vessel volume may range in size from about 500 ml to about 2 L, from about 1 L to about 5 L, from about 2.5 L to about 20 L, from about 10 L to about 50 L, from about 25 L to about 100 L, from about 75 L to about 500 L, from about 250 L to about 2,000 L, from about 1,000 L to about 10,000 L, from about 5,000 L to about 50,000 L or at least 50,000 L. Vessel bottoms may be rounded or flat. In some cases, animal cell cultures may be maintained in bioreactors with rounded vessel bottoms.

[0631] In some cases, bioreactor vessels may be warmed through the use of a thermocirculator. Thermocirculators pump heated water around water jackets. In some cases, heated water may be pumped through pipes (e.g. coiled pipes) that are present within bioreactor vessels. In some cases, warm air may be circulated around bioreactors, including, but not limited to air space directly above culture medium. Additionally, pH and CO₂ levels may be maintained to optimize cell viability.

[0632] In some cases, bioreactors may comprise hollow-fiber reactors. Hollow-fiber bioreactors may support the culture of both anchorage dependent and anchorage independent cells. Further bioreactors may include, but are not limited to packed-bed or fixed-bed bioreactors. Such bioreactors may comprise vessels with glass beads for adherent cell attachment. Further packed-bed reactors may comprise ceramic beads.

[0633] In some cases, viral particles are produced through the use of a disposable bioreactor. In some embodiments, such bioreactors may include WAVE™ disposable bioreactors.

[0634] In some embodiments, AAV particle production in animal cell bioreactor cultures may be carried out according to the methods taught in U.S. Pat. Nos. 5,064,764, 6,194,191, 6,566,118, 8,137,948 or US Patent Application No. US2011/0229971, the contents of each of which are herein incorporated by reference in their entirety.

### Cell Lysis

[0635] Cells of the invention, including, but not limited to viral production cells, may be subjected to cell lysis according to any methods known in the art. Cell lysis may be carried out to obtain one or more agents (e.g. viral particles) present within any cells of the invention. In some embodiments, cell lysis may be carried out according to any of the methods listed in U.S. Pat. Nos. 7,326,555, 7,579,181, 7,048,920, 6,410,300, 6,436,394, 7,732,129, 7,510,875, 7,445,930, 6,726,907, 6,194,191, 7,125,706, 6,995,006, 6,676,935, 7,968,333, 5,756,283, 6,258,595, 6,261,551, 6,270,996, 6,281,010, 6,365,394, 6,475,769, 6,482,634, 6,485,966, 6,943,019, 6,953,690, 7,022,519, 7,238,526, 7,291,498 and 7,491,508 or International Publication Nos. WO 1996039530, WO 1998010088, WO 1999014354, WO 1999015685, WO 1999047691, WO2000055342, WO2000075353 and WO2001023597, the contents of each of which are herein incorporated by reference in their entirety. Cell lysis methods may be chemical or mechanical. Chemical cell lysis typically comprises contacting one or more cells with one or more lysis agent. Mechanical lysis typically comprises subjecting one or more cells to one or more lysis condition and/or one or more lysis force.

[0636] In some embodiments, chemical lysis may be used to lyse cells. As used herein, the term “lysis agent” refers to any agent that may aid in the disruption of a cell. In some cases, lysis agents are introduced in solutions, termed lysis solutions or lysis buffers. As used herein, the term “lysis solution” refers to a solution (typically aqueous) comprising one or more lysis agent. In addition to lysis agents, lysis solutions may include one or more buffering agents, solubilizing agents, surfactants, preservatives, cryoprotectants, enzymes, enzyme inhibitors and/or chelators. Lysis buffers are lysis solutions comprising one or more buffering agent. Additional components of lysis solutions may include one or more solubilizing agent. As used herein, the term “solubilizing agent” refers to a compound that enhances the solubility of one or more components of a solution and/or the solubility of one or more entities to which solutions are applied. In some cases, solubilizing agents enhance protein solubility. In some cases, solubilizing agents are selected based on their ability to enhance protein solubility while maintaining protein conformation and/or activity.

[0637] Exemplary lysis agents may include any of those described in U.S. Pat. Nos. 8,685,734, 7,901,921, 7,732,129, 7,223,585, 7,125,706, 8,236,495, 8,110,351, 7,419,956, 7,300,797, 6,699,706 and 6,143,567, the contents of each of which are herein incorporated by reference in their entirety. In some cases, lysis agents may be selected from lysis salts, amphoteric agents, cationic agents, ionic detergents and non-ionic detergents. Lysis salts may include, but are not limited to sodium chloride (NaCl) and potassium chloride (KCl.) Further lysis salts may include any of those described in U.S. Pat. Nos. 8,614,101, 7,326,555, 7,579,181, 7,048,920, 6,410,300, 6,436,394, 7,732,129, 7,510,875, 7,445,930, 6,726,907, 6,194,191, 7,125,706, 6,995,006, 6,676,935 and 7,968,333, the contents of each of which are herein incorporated by reference in their entirety. Concentrations of salts may be increased or decreased to obtain an effective concentration for rupture of cell membranes. Amphoteric agents, as referred to herein, are compounds capable of reacting as an acid or a base. Amphoteric agents may include, but are not limited to lysophosphatidylcholine, 3-((3-Cholamidopropyl) dimethylammonium)-1-propanesulfonate (CHAPS), ZWITTERGENT® and the like. Cationic agents may include, but are not limited to cetyltrimethylammonium bromide (C (16) TAB) and Benzalkonium chloride. Lysis agents comprising detergents may include ionic detergents or non-ionic detergents. Detergents may function to break apart or dissolve cell structures including, but not limited to cell membranes, cell walls, lipids, carbohydrates, lipoproteins and glycoproteins. Exemplary ionic detergents include any of those taught in U.S. Pat. Nos. 7,625,570 and 6,593,123 or US Publication No. US2014/0087361, the contents of each of which are herein incorporated by reference in their entirety. Some ionic detergents may include, but are not limited to sodium dodecyl sulfate (SDS), cholate and deoxycholate. In some cases, ionic detergents may be included in lysis solutions as a solubilizing agent. Non-ionic detergents may include, but are not limited to octylglucoside, digitonin, lubrol, C12E8, TWEEN®-20, TWEEN®-80, Triton X-100 and Noniodet P-40. Non-ionic detergents are typically weaker lysis agents, but may be included as solubilizing agents for solubilizing cellular and/or viral proteins. Further lysis agents may include enzymes and urea. In some cases, one or more lysis agents may be combined in a lysis solution in order to enhance one or more of cell lysis and protein solubility. In some cases, enzyme inhibitors may be included in lysis solutions in order to prevent proteolysis that may be triggered by cell membrane disruption.

[0638] In some embodiments, mechanical cell lysis is carried out. Mechanical cell lysis methods may include the use of one or more lysis condition and/or one or more lysis force. As used herein, the term “lysis condition” refers to a state or circumstance that promotes cellular disruption. Lysis conditions may comprise certain temperatures, pressures, osmotic purity, salinity and the like. In some cases, lysis conditions comprise increased or decreased temperatures. According to some embodiments, lysis conditions comprise changes in temperature to promote cellular disruption. Cell lysis carried out according to such embodiments may include freeze-thaw lysis. As used herein, the term “freeze-thaw lysis” refers to cellular lysis in which a cell solution is subjected to one or more freeze-thaw cycle. According to freeze-thaw lysis methods, cells in solution are frozen to induce a mechanical disruption of cellular membranes caused by the formation and expansion of ice crystals. Cell solutions used according freeze-thaw lysis methods, may further comprise one or more lysis agents, solubilizing agents, buffering agents, cryoprotectants, surfactants, preservatives, enzymes, enzyme inhibitors and/or chelators. Once cell solutions subjected to freezing are thawed, such components may enhance the recovery of desired cellular products. In some cases, one or more cryoprotectants are included in cell solutions undergoing freeze-thaw lysis. As used herein, the term “cryoprotectant” refers to an agent used to protect one or more substance from damage due to freezing. Cryoprotectants may include any of those taught in US Publication No. US2013/0323302 or U.S. Pat. Nos. 6,503,888, 6,180,613, 7,888,096, 7,091,030, the contents of each of which are herein incorporated by reference in their entirety. In some cases, cryoprotectants may include, but are not limited to dimethyl sulfoxide, 1,2-propanediol, 2,3-butanediol, formamide, glycerol, ethylene glycol, 1,3-propanediol and n-dimethyl formamide, polyvinylpyrrolidone, hydroxyethyl starch, agarose, dextrans, inositol, glucose, hydroxyethylstarch, lactose, sorbitol, methyl glucose, sucrose and urea. In some embodiments, freeze-thaw lysis may be carried out according to any of the methods described in U.S. Pat. No. 7,704,721, the contents of which are herein incorporated by reference in their entirety.

[0639] As used herein, the term “lysis force” refers to a physical activity used to disrupt a cell. Lysis forces may include, but are not limited to mechanical forces, sonic forces, gravitational forces, optical forces, electrical forces and the like. Cell lysis carried out by mechanical force is referred to herein as “mechanical lysis.” Mechanical forces that may be used according to mechanical lysis may include high shear fluid forces. According to such methods of mechanical lysis, a microfluidizer may be used. Microfluidizers typically comprise an inlet reservoir where cell solutions may be applied. Cell solutions may then be pumped into an interaction chamber via a pump (e.g. high-pressure pump) at high speed and/or pressure to produce shear fluid forces. Resulting lysates may then be collected in one or more output reservoir. Pump speed and/or pressure may be adjusted to modulate cell lysis and enhance recovery of products (e.g. viral particles.) Other mechanical lysis methods may include physical disruption of cells by scraping.

[0640] Cell lysis methods may be selected based on the cell culture format of cells to be lysed. For example, with adherent cell cultures, some chemical and mechanical lysis methods may be used. Such mechanical lysis methods may include freeze-thaw lysis or scraping. In another example, chemical lysis of adherent cell cultures may be carried out through incubation with lysis solutions comprising surfactant, such as Triton-X-100. In some cases, cell lysates generated from adherent cell cultures may be treated with one more nuclease to lower the viscosity of the lysates caused by liberated DNA.

[0641] In one embodiment, a method for harvesting AAV particles without lysis may be used for efficient and scalable AAV particle production. In a non-limiting example, AAV particles may be produced by culturing an AAV particle lacking a heparin binding site, thereby allowing the AAV particle to pass into the supernatant, in a cell culture, collecting supernatant from the culture; and isolating the AAV particle from the supernatant, as described in US Patent Application 20090275107, the contents of which are incorporated herein by reference in their entirety.

### Clarification

[0642] Cell lysates comprising viral particles may be subjected to clarification. Clarification refers to initial steps taken in purification of viral particles from cell lysates. Clarification serves to prepare lysates for further purification by removing larger, insoluble debris. Clarification steps may include, but are not limited to centrifugation and filtration. During clarification, centrifugation may be carried out at low speeds to remove larger debris only. Similarly, filtration may be carried out using filters with larger pore sizes so that only larger debris is removed. In some cases, tangential flow filtration may be used during clarification. Objectives of viral clarification include high throughput processing of cell lysates and to optimize ultimate viral recovery. Advantages of including a clarification step include scalability for processing of larger volumes of lysate. In some embodiments, clarification may be carried out according to any of the methods presented in U.S. Pat. Nos. 8,524,446, 5,756,283, 6,258,595, 6,261,551, 6,270,996, 6,281,010, 6,365,394, 6,475,769, 6,482,634, 6,485,966, 6,943,019, 6,953,690, 7,022,519, 7,238,526, 7,291,498, 7,491,508, US Publication Nos. US2013/0045186, US2011/0263027, US2011/0151434, US2003/0138772, and International Publication Nos. WO2002012455, WO1996039530, WO1998010088, WO1999014354, WO1999015685, WO1999047691, WO2000055342, WO2000075353 and WO2001023597, the contents of each of which are herein incorporated by reference in their entirety.

[0643] Methods of cell lysate clarification by filtration are well understood in the art and may be carried out according to a variety of available methods including, but not limited to passive filtration and flow filtration. Filters used may comprise a variety of materials and pore sizes. For example, cell lysate filters may comprise pore sizes of from about 1 M to about 5 μM, from about 0.5 μM to about 2 μM, from about 0.1 μM to about 1 μM, from about 0.05 μM to about 0.05 μM and from about 0.001 μM to about 0.1 μM. Exemplary pore sizes for cell lysate filters may include, but are not limited to, 2.0, 1.9, 1.8, 1.7, 1.6, 1.5, 1.4, 1.3, 1.2, 1.1, 1, 0.9, 0.8, 0.7, 0.6, 0.5, 0.4, 0.3, 0.2, 0.1, 0.95, 0.9, 0.85, 0.8, 0.75, 0.7, 0.65, 0.6, 0.55, 0.5, 0.45, 0.4, 0.35, 0.3, 0.25, 0.2, 0.15, 0.1, 0.05, 0.22, 0.21, 0.20, 0.19, 0.18, 0.17, 0.16, 0.15, 0.14, 0.13, 0.12, 0.11, 0.1, 0.09, 0.08, 0.07, 0.06, 0.05, 0.04, 0.03, 0.02, 0.01, 0.02, 0.019, 0.018, 0.017, 0.016, 0.015, 0.014, 0.013, 0.012, 0.011, 0.01, 0.009, 0.008, 0.007, 0.006, 0.005, 0.004, 0.003, 0.002, 0.001 and 0.001 μM. In one embodiment, clarification may comprise filtration through a filter with 2.0 μM pore size to remove large debris, followed by passage through a filter with 0.45 μM pore size to remove intact cells.

[0644] Filter materials may be composed of a variety of materials. Such materials may include, but are not limited to polymeric materials and metal materials (e.g. sintered metal and pored aluminum.) Exemplary materials may include, but are not limited to nylon, cellulose materials (e.g. cellulose acetate), polyvinylidene fluoride (PVDF), polyethersulfone, polyamide, polysulfone, polypropylene, and polyethylene terephthalate. In some cases, filters useful for clarification of cell lysates may include, but are not limited to ULTIPLEAT PROFILE™ filters (Pall Corporation, Port Washington, N.Y.), SUPOR™ membrane filters (Pall Corporation, Port Washington, N.Y.)

[0645] In some cases, flow filtration may be carried out to increase filtration speed and/or effectiveness. In some cases, flow filtration may comprise vacuum filtration. According to such methods, a vacuum is created on the side of the filter opposite that of cell lysate to be filtered. In some cases, cell lysates may be passed through filters by centrifugal forces. In some cases, a pump is used to force cell lysate through clarification filters. Flow rate of cell lysate through one or more filters may be modulated by adjusting one of channel size and/or fluid pressure.

[0646] According to some embodiments, cell lysates may be clarified by centrifugation. Centrifugation may be used to pellet insoluble particles in the lysate. During clarification, centrifugation strength [expressed in terms of gravitational units (g), which represents multiples of standard gravitational force] may be lower than in subsequent purification steps. In some cases, centrifugation may be carried out on cell lysates at from about 200 g to about 800 g, from about 500 g to about 1500 g, from about 1000 g to about 5000 g, from about 1200 g to about 10000 g or from about 8000 g to about 15000 g. In some embodiments, cell lysate centrifugation is carried out at 8000 g for 15 minutes. In some cases, density gradient centrifugation may be carried out in order to partition particulates in the cell lysate by sedimentation rate. Gradients used according to methods of the present disclosure may include, but are not limited to cesium chloride gradients and iodixanol step gradients.

### Purification: Chromatography

[0647] In some cases, AAV particles may be purified from clarified cell lysates by one or more methods of chromatography. Chromatography refers to any number of methods known in the art for separating out one or more elements from a mixture. Such methods may include, but are not limited to ion exchange chromatography (e.g. cation exchange chromatography and anion exchange chromatography), immunoaffinity chromatography and size-exclusion chromatography. In some embodiments, methods of viral chromatography may include any of those taught in U.S. Pat. Nos. 5,756,283, 6,258,595, 6,261,551, 6,270,996, 6,281,010, 6,365,394, 6,475,769, 6,482,634, 6,485,966, 6,943,019, 6,953,690, 7,022,519, 7,238,526, 7,291,498 and 7,491,508 or International Publication Nos. WO1996039530, WO1998010088, WO 1999014354, WO 1999015685, WO 1999047691, WO2000055342, WO2000075353 and WO2001023597, the contents of each of which are herein incorporated by reference in their entirety.

[0648] In some embodiments, ion exchange chromatography may be used to isolate viral particles. Ion exchange chromatography is used to bind viral particles based on charge-charge interactions between capsid proteins and charged sites present on a stationary phase, typically a column through which viral preparations (e.g. clarified lysates) are passed. After application of viral preparations, bound viral particles may then be eluted by applying an elution solution to disrupt the charge-charge interactions. Elution solutions may be optimized by adjusting salt concentration and/or pH to enhance recovery of bound viral particles. Depending on the charge of viral capsids being isolated, cation or anion exchange chromatography methods may be selected. Methods of ion exchange chromatography may include, but are not limited to any of those taught in U.S. Pat. Nos. 7,419,817, 6,143,548, 7,094,604, 6,593,123, 7,015,026 and 8,137,948, the contents of each of which are herein incorporated by reference in their entirety.

[0649] In some embodiments, immunoaffinity chromatography may be used. Immunoaffinity chromatography is a form of chromatography that utilizes one or more immune compounds (e.g. antibodies or antibody-related structures) to retain viral particles. Immune compounds may bind specifically to one or more structures on viral particle surfaces, including, but not limited to one or more viral coat protein. In some cases, immune compounds may be specific for a particular viral variant. In some cases, immune compounds may bind to multiple viral variants. In some embodiments, immune compounds may include recombinant single-chain antibodies. Such recombinant single chain antibodies may include those described in Smith, R. H. et al., 2009. Mol. Ther. 17(11):1888-96, the contents of which are herein incorporated by reference in their entirety. Such immune compounds are capable of binding to several AAV capsid variants, including, but not limited to AAV1, AAV2, AAV6 and AAV8.

[0650] In some embodiments, size-exclusion chromatography (SEC) may be used. SEC may comprise the use of a gel to separate particles according to size. In viral particle purification, SEC filtration is sometimes referred to as “polishing.” In some cases. SEC may be carried out to generate a final product that is near-homogenous. Such final products may in some cases be used in pre-clinical studies and/or clinical studies (Kotin, R. M. 2011. Human Molecular Genetics. 20(1):R2-R6, the contents of which are herein incorporated by reference in their entirety.) In some cases, SEC may be carried out according to any of the methods taught in U.S. Pat. Nos. 6,143,548, 7,015,026, 8,476,418, 6,410,300, 8,476,418, 7,419,817, 7,094,604, 6,593,123, and 8,137,948, the contents of each of which are herein incorporated by reference in their entirety.

[0651] In one embodiment, the compositions comprising at least one AAV particle may be isolated or purified using the methods described in U.S. Pat. No. 6,146,874, the contents of which are herein incorporated by reference in its entirety.

[0652] In one embodiment, the compositions comprising at least one AAV particle may be isolated or purified using the methods described in U.S. Pat. No. 6,660,514, the contents of which are herein incorporated by reference in its entirety.

[0653] In one embodiment, the compositions comprising at least one AAV particle may be isolated or purified using the methods described in U.S. Pat. No. 8,283,151, the contents of which are herein incorporated by reference in its entirety.

[0654] In one embodiment, the compositions comprising at least one AAV particle may be isolated or purified using the methods described in U.S. Pat. No. 8,524,446, the contents of which are herein incorporated by reference in its entirety.

### II. Formulation and Delivery

### Pharmaceutical Compositions and Formulation

[0655] In addition to the pharmaceutical compositions (AAV particles comprising a modulatory polynucleotide sequence encoding the siRNA molecules), provided herein are pharmaceutical compositions which are suitable for administration to humans, it will be understood by the skilled artisan that such compositions are generally suitable for administration to any other animal, e.g., to non-human animals, e.g. non-human mammals. Modification of pharmaceutical compositions suitable for administration to humans in order to render the compositions suitable for administration to various animals is well understood, and the ordinarily skilled veterinary pharmacologist can design and/or perform such modification with merely ordinary, if any, experimentation. Subjects to which administration of the pharmaceutical compositions is contemplated include, but are not limited to, humans and/or other primates; mammals, including commercially relevant mammals such as cattle, pigs, horses, sheep, cats, dogs, mice, and/or rats; and/or birds, including commercially relevant birds such as poultry, chickens, ducks, geese, and/or turkeys.

[0656] In some embodiments, compositions are administered to humans, human patients or subjects. For the purposes of the present disclosure, the phrase “active ingredient” generally refers either to the synthetic siRNA duplexes, the modulatory polynucleotide encoding the siRNA duplex, or the AAV particle comprising a modulatory polynucleotide encoding the siRNA duplex described herein.

[0657] Formulations of the pharmaceutical compositions described herein may be prepared by any method known or hereafter developed in the art of pharmacology. In general, such preparatory methods include the step of bringing the active ingredient into association with an excipient and/or one or more other accessory ingredients, and then, if necessary and/or desirable, dividing, shaping and/or packaging the product into a desired single- or multi-dose unit.

[0658] Relative amounts of the active ingredient, the pharmaceutically acceptable excipient, and/or any additional ingredients in a pharmaceutical composition in accordance with the invention will vary, depending upon the identity, size, and/or condition of the subject treated and further depending upon the route by which the composition is to be administered.

[0659] The AAV particles comprising the modulatory polynucleotide sequence encoding the siRNA molecules of the present invention can be formulated using one or more excipients to: (1) increase stability; (2) increase cell transfection or transduction; (3) permit the sustained or delayed release; or (4) alter the biodistribution (e.g., target the AAV particle to specific tissues or cell types such as brain and neurons).

[0660] Formulations of the present invention can include, without limitation, saline, lipidoids, liposomes, lipid nanoparticles, polymers, lipoplexes, core-shell nanoparticles, peptides, proteins, cells transfected with AAV particles (e.g., for transplantation into a subject), nanoparticle mimics and combinations thereof. Further, the AAV particles of the present invention may be formulated using self-assembled nucleic acid nanoparticles.

[0661] Formulations of the pharmaceutical compositions described herein may be prepared by any method known or hereafter developed in the art of pharmacology. In general, such preparatory methods include the step of associating the active ingredient with an excipient and/or one or more other accessory ingredients.

[0662] A pharmaceutical composition in accordance with the present disclosure may be prepared, packaged, and/or sold in bulk, as a single unit dose, and/or as a plurality of single unit doses. As used herein, a “unit dose” refers to a discrete amount of the pharmaceutical composition comprising a predetermined amount of the active ingredient. The amount of the active ingredient is generally equal to the dosage of the active ingredient which would be administered to a subject and/or a convenient fraction of such a dosage such as, for example, one-half or one-third of such a dosage.

[0663] Relative amounts of the active ingredient, the pharmaceutically acceptable excipient, and/or any additional ingredients in a pharmaceutical composition in accordance with the present disclosure may vary, depending upon the identity, size, and/or condition of the subject being treated and further depending upon the route by which the composition is to be administered. For example, the composition may comprise between 0.1% and 99% (w/w) of the active ingredient. By way of example, the composition may comprise between 0.1% and 100%, e.g., between 0.5 and 50%, between 1-30%, between 5-80%, at least 80% (w/w) active ingredient.

[0664] In some embodiments, a pharmaceutically acceptable excipient may be at least 95%, at least 96%, at least 97%, at least 98%, at least 99%, or 100% pure. In some embodiments, an excipient is approved for use for humans and for veterinary use. In some embodiments, an excipient may be approved by United States Food and Drug Administration. In some embodiments, an excipient may be of pharmaceutical grade. In some embodiments, an excipient may meet the standards of the United States Pharmacopoeia (USP), the European Pharmacopoeia (EP), the British Pharmacopoeia, and/or the International Pharmacopoeia.

[0665] Excipients, which, as used herein, includes, but is not limited to, any and all solvents, dispersion media, diluents, or other liquid vehicles, dispersion or suspension aids, surface active agents, isotonic agents, thickening or emulsifying agents, preservatives, and the like, as suited to the particular dosage form desired. Various excipients for formulating pharmaceutical compositions and techniques for preparing the composition are known in the art (see Remington: The Science and Practice of Pharmacy, 21^{st} Edition, A. R. Gennaro, Lippincott, Williams & Wilkins, Baltimore, Md., 2006; incorporated herein by reference in its entirety). The use of a conventional excipient medium may be contemplated within the scope of the present disclosure, except insofar as any conventional excipient medium may be incompatible with a substance or its derivatives, such as by producing any undesirable biological effect or otherwise interacting in a deleterious manner with any other component(s) of the pharmaceutical composition.

[0666] Exemplary diluents include, but are not limited to, calcium carbonate, sodium carbonate, calcium phosphate, dicalcium phosphate, calcium sulfate, calcium hydrogen phosphate, sodium phosphate lactose, sucrose, cellulose, microcrystalline cellulose, kaolin, mannitol, sorbitol, inositol, sodium chloride, dry starch, cornstarch, powdered sugar, etc., and/or combinations thereof.

[0667] In some embodiments, the formulations may comprise at least one inactive ingredient. As used herein, the term “inactive ingredient” refers to one or more inactive agents included in formulations. In some embodiments, all, none or some of the inactive ingredients which may be used in the formulations of the present invention may be approved by the US Food and Drug Administration (FDA).

[0668] Formulations of vectors comprising the nucleic acid sequence for the siRNA molecules of the present invention may include cations or anions. In one embodiment, the formulations include metal cations such as, but not limited to, Zn2+, Ca2+, Cu2+, Mg+ and combinations thereof.

[0669] As used herein, “pharmaceutically acceptable salts” refers to derivatives of the disclosed compounds wherein the parent compound is modified by converting an existing acid or base moiety to its salt form (e.g., by reacting the free base group with a suitable organic acid). Examples of pharmaceutically acceptable salts include, but are not limited to, mineral or organic acid salts of basic residues such as amines; alkali or organic salts of acidic residues such as carboxylic acids; and the like. Representative acid addition salts include acetate, acetic acid, adipate, alginate, ascorbate, aspartate, benzenesulfonate, benzene sulfonic acid, benzoate, bisulfate, borate, butyrate, camphorate, camphorsulfonate, citrate, cyclopentancpropionate, digluconate, dodecylsulfate, ethanesulfonate, fumarate, glucoheptonate, glycerophosphate, hemisulfate, heptonate, hexanoate, hydrobromide, hydrochloride, hydroiodide, 2-hydroxy-ethanesulfonate, lactobionate, lactate, laurate, lauryl sulfate, malate, maleate, malonate, methanesulfonate, 2-naphthalenesulfonate, nicotinate, nitrate, oleate, oxalate, palmitate, pamoate, pectinate, persulfate, 3-phenylpropionate, phosphate, picrate, pivalate, propionate, stearate, succinate, sulfate, tartrate, thiocyanate, toluenesulfonate, undecanoate, valerate salts, and the like. Representative alkali or alkaline earth metal salts include sodium, lithium, potassium, calcium, magnesium, and the like, as well as nontoxic ammonium, quaternary ammonium, and amine cations, including, but not limited to ammonium, tetramethylammonium, tetraethylammonium, methylamine, dimethylamine, trimethylamine, triethylamine, ethylamine, and the like. The pharmaceutically acceptable salts of the present disclosure include the conventional non-toxic salts of the parent compound formed, for example, from non-toxic inorganic or organic acids. The pharmaceutically acceptable salts of the present disclosure can be synthesized from the parent compound which contains a basic or acidic moiety by conventional chemical methods. Generally, such salts can be prepared by reacting the free acid or base forms of these compounds with a stoichiometric amount of the appropriate base or acid in water or in an organic solvent, or in a mixture of the two; generally, nonaqueous media like ether, ethyl acetate, ethanol, isopropanol, or acetonitrile are preferred. Lists of suitable salts are found in Remington's Pharmaceutical Sciences, 17t ed., Mack Publishing Company, Easton, Pa., 1985, p. 1418, Pharmaceutical Salts: Properties. Selection, and Use, P. H. Stahl and C. G. Wermuth (eds.), Wiley-VCH, 2008, and Berge et al., Journal of Pharmaceutical Science, 66, 1-19 (1977), the content of each of which is incorporated herein by reference in their entirety.

[0670] The term “pharmaceutically acceptable solvate,” as used herein, means a compound of the invention wherein molecules of a suitable solvent are incorporated in the crystal lattice. A suitable solvent is physiologically tolerable at the dosage administered. For example, solvates may be prepared by crystallization, recrystallization, or precipitation from a solution that includes organic solvents, water, or a mixture thereof. Examples of suitable solvents are ethanol, water (for example, mono-, di-, and tri-hydrates), N-methylpyrrolidinone (NMP), dimethyl sulfoxide (DMSO), N,N′-dimethylformamide (DMF), N,N′-dimethylacetamide (DMAC), 1,3-dimethyl-2-imidazolidinone (DMEU), 1,3-dimethyl-3,4,5,6-tetrahydro-2-(1H)-pyrimidinone (DMPU), acetonitrile (ACN), propylene glycol, ethyl acetate, benzyl alcohol, 2-pyrrolidone, benzyl benzoate, and the like. When water is the solvent, the solvate is referred to as a “hydrate.”

[0671] According to the present invention, the AAV particle comprising the modulatory polynucleotide sequence encoding for the siRNA molecules may be formulated for CNS delivery. Agents that cross the brain blood barrier may be used. For example, some cell penetrating peptides that can target siRNA molecules to the brain blood barrier endothelium may be used to formulate the siRNA duplexes targeting the HTT gene.

### Inactive Ingredients

[0672] In some embodiments, formulations may comprise at least one excipient which is an inactive ingredient. As used herein, the term “inactive ingredient” refers to one or more inactive agents included in formulations. In some embodiments, all, none or some of the inactive ingredients which may be used in the formulations of the present disclosure may be approved by the US Food and Drug Administration (FDA).

[0673] Formulations of AAV particles described herein may include cations or anions. In one embodiment, the formulations include metal cations such as, but not limited to, Zn2+, Ca2+, Cu2+, Mg+ and combinations thereof. As a non-limiting example, formulations may include polymers and compositions described herein complexed with a metal cation (See e.g., U.S. Pat. Nos. 6,265,389 and 6,555,525, each of which is herein incorporated by reference in its entirety).

### Delivery

[0674] In one embodiment, the AAV particles described herein may be administered or delivered using the methods for the delivery of AAV virions described in European Patent Application No. EP1857552, the contents of which are herein incorporated by reference in its entirety.

[0675] In one embodiment, the AAV particles described herein may be administered or delivered using the methods for delivering proteins using AAV vectors described in European Patent Application No. EP2678433, the contents of which are herein incorporated by reference in its entirety.

[0676] In one embodiment, the AAV particle described herein may be administered or delivered using the methods for delivering DNA molecules using AAV vectors described in U.S. Pat. No. 5,858,351, the contents of which are herein incorporated by reference in its entirety.

[0677] In one embodiment, the AAV particle described herein may be administered or delivered using the methods for delivering DNA to the bloodstream described in U.S. Pat. No. 6,211,163, the contents of which are herein incorporated by reference in its entirety.

[0678] In one embodiment, the AAV particle described herein may be administered or delivered using the methods for delivering AAV virions described in U.S. Pat. No. 6,325,998, the contents of which are herein incorporated by reference in its entirety.

[0679] In one embodiment, the AAV particle described herein may be administered or delivered using the methods for delivering a payload to the central nervous system described in U.S. Pat. No. 7,588,757, the contents of which are herein incorporated by reference in its entirety.

[0680] In one embodiment, the AAV particle described herein may be administered or delivered using the methods for delivering a payload described in U.S. Pat. No. 8,283,151, the contents of which are herein incorporated by reference in its entirety.

[0681] In one embodiment, the AAV particle described herein may be administered or delivered using the methods for delivering a payload using a glutamic acid decarboxylase (GAD) delivery vector described in International Patent Publication No. WO2001089583, the contents of which are herein incorporated by reference in its entirety.

[0682] In one embodiment, the AAV particle described herein may be administered or delivered using the methods for delivering a payload to neural cells described in International Patent Publication No. WO2012057363, the contents of which are herein incorporated by reference in its entirety.

### Delivery to Cells

[0683] The present disclosure provides a method of delivering to a cell or tissue any of the above-described AAV polynucleotides or AAV genomes, comprising contacting the cell or tissue with said AAV polynucleotide or AAV genomes or contacting the cell or tissue with a particle comprising said AAV polynucleotide or AAV genome, or contacting the cell or tissue with any of the described compositions, including pharmaceutical compositions. The method of delivering the AAV polynucleotide or AAV genome to a cell or tissue can be accomplished in vitro, ex vivo, or in vivo.

Introduction into Cells—Synthetic dsRNA

[0684] To ensure the chemical and biological stability of siRNA molecules (e.g., siRNA duplexes and dsRNA), it is important to deliver siRNA molecules inside the target cells. In some embodiments, the cells may include, but are not limited to, cells of mammalian origin, cells of human origins, embryonic stem cells, induced pluripotent stem cells, neural stem cells, and neural progenitor cells.

[0685] Nucleic acids, including siRNA, carry a net negative charge on the sugar-phosphate backbone under normal physiological conditions. In order to enter the cell, a siRNA molecule must come into contact with a lipid bilayer of the cell membrane, whose head groups are also negatively charged.

[0686] The siRNA duplexes can be complexed with a carrier that allows them to traverse cell membranes such as package particles to facilitate cellular uptake of the siRNA. The package particles may include, but are not limited to, liposomes, nanoparticles, cationic lipids, polyethylenimine derivatives, dendrimers, carbon nanotubes and the combination of carbon-made nanoparticles with dendrimers. Lipids may be cationic lipids and/or neutral lipids. In addition to well established lipophilic complexes between siRNA molecules and cationic carriers, siRNA molecules can be conjugated to a hydrophobic moiety, such as cholesterol (e.g., U.S. Patent Publication No. 20110110937; the content of which is herein incorporated by reference in its entirety). This delivery method holds a potential of improving m vitro cellular uptake and in vivo pharmacological properties of siRNA molecules. The siRNA molecules of the present invention may also be conjugated to certain cationic cell-penetrating peptides (CPPs), such as MPG, transportan or penetratin covalently or non-covalently (e.g., U.S. Patent Publication No. 20110086425; the content of which is herein incorporated by reference in its entirety).

Introduction into Cells—AAV Particles

[0687] The siRNA molecules (e.g., siRNA duplexes) of the present invention may be introduced into cells using any of a variety of approaches such as, but not limited to, AAV particles. These AAV particles are engineered and optimized to facilitate the entry of siRNA molecule into cells that are not readily amendable to transfection. Also, some synthetic AAV particles possess an ability to integrate the shRNA into the cell genome, thereby leading to stable siRNA expression and long-term knockdown of a target gene. In this manner, AAV particles are engineered as vehicles for specific delivery while lacking the deleterious replication and/or integration features found in wild-type virus.

[0688] In some embodiments, the siRNA molecules of the present invention are introduced into a cell by contacting the cell with an AAV particle comprising a modulatory polynucleotide sequence encoding a siRNA molecule, and a lipophilic carrier. In other embodiments, the siRNA molecule is introduced into a cell by transfecting or infecting the cell with an AAV particle comprising a nucleic acid sequence capable of producing the siRNA molecule when transcribed in the cell. In some embodiments, the siRNA molecule is introduced into a cell by injecting into the cell an AAV particle comprising a nucleic acid sequence capable of producing the siRNA molecule when transcribed in the cell.

[0689] In some embodiments, prior to transfection, an AAV particle comprising a nucleic acid sequence encoding the siRNA molecules of the present invention may be transfected into cells.

[0690] In other embodiments, the AAV particles comprising the nucleic acid sequence encoding the siRNA molecules of the present invention may be delivered into cells by electroporation (e.g. U.S. Patent Publication No. 20050014264; the content of which is herein incorporated by reference in its entirety).

[0691] Other methods for introducing AAV particles comprising the nucleic acid sequence encoding the siRNA molecules described herein may include photochemical internalization as described in U.S. Patent publication No. 20120264807; the content of which is herein incorporated by reference in its entirety.

[0692] In some embodiments, the formulations described herein may contain at least one AAV particle comprising the nucleic acid sequence encoding the siRNA molecules described herein. In one embodiment, the siRNA molecules may target the HTT gene at one target site. In another embodiment, the formulation comprises a plurality of AAV particles, each AAV particle comprising a nucleic acid sequence encoding a siRNA molecule targeting the HTT gene at a different target site. The HTT may be targeted at 2, 3, 4, 5 or more than 5 sites.

[0693] In one embodiment, the AAV particles from any relevant species, such as, but not limited to, human, dog, mouse, rat or monkey may be introduced into cells.

[0694] In one embodiment, the AAV particles may be introduced into cells which are relevant to the disease to be treated. As a non-limiting example, the disease is HD and the target cells are neurons and astrocytes. As another non-limiting example, the disease is HD and the target cells are medium spiny neurons, cortical neurons and astrocytes.

[0695] In one embodiment, the AAV particles may be introduced into cells which have a high level of endogenous expression of the target sequence.

[0696] In another embodiment, the AAV particles may be introduced into cells which have a low level of endogenous expression of the target sequence.

[0697] In one embodiment, the cells may be those which have a high efficiency of AAV transduction.

### Delivery to Subjects

[0698] The present disclosure additionally provides a method of delivering to a subject, including a mammalian subject, any of the above-described AAV polynucleotides or AAV genomes comprising administering to the subject said AAV polynucleotide or AAV genome, or administering to the subject a particle comprising said AAV polynucleotide or AAV genome, or administering to the subject any of the described compositions, including pharmaceutical compositions.

[0699] The pharmaceutical compositions of AAV particles described herein may be characterized by one or more of bioavailability, therapeutic window and/or volume of distribution.

### III. Administration and Dosing

### Administration

[0700] The AAV particles comprising a nucleic acid sequence encoding the siRNA molecules of the present invention may be administered by any route which results in a therapeutically effective outcome. These include, but are not limited to, within the parenchyma of an organ such as, but not limited to, a brain (e.g., intraparenchymal), corpus striatum (intrastriatal), enteral (into the intestine), gastroenteral, epidural, oral (by way of the mouth), transdermal, peridural, intracerebral (into the cerebrum), intracerebroventricular (into the cerebral ventricles), subpial (under the pia), epicutaneous (application onto the skin), intradermal, (into the skin itself), subcutaneous (under the skin), nasal administration (through the nose), intravenous (into a vein), intravenous bolus, intravenous drip, intraarterial (into an artery), intramuscular (into a muscle), intracardiac (into the heart), intraosseous infusion (into the bone marrow), intrathecal (into the spinal canal), intraganglionic (into the ganglion), intraperitoneal, (infusion or injection into the peritoneum), intravesical infusion, intravitreal, (through the eye), intravenous injection (into a pathologic cavity) intracavitary (into the base of the penis), intravaginal administration, intrauterine, extra-amniotic administration, transdermal (diffusion through the intact skin for systemic distribution), transmucosal (diffusion through a mucous membrane), transvaginal, insufflation (snorting), sublingual, sublabial, enema, eye drops (onto the conjunctiva), in car drops, auricular (in or by way of the ear), buccal (directed toward the cheek), conjunctival, cutaneous, dental (to a tooth or teeth), electro-osmosis, endocervical, endosinusial, endotracheal, extracorporeal, hemodialysis, infiltration, interstitial, intra-abdominal, intra-amniotic, intra-articular, intrabiliary, intrabronchial, intrabursal, intracartilaginous (within a cartilage), intracaudal (within the cauda equine), intracisternal (within the cisterna magna cerebellomedularis), intracorneal (within the cornea), dental intracornal, intracoronary (within the coronary arteries), intracorporus cavemosum (within the dilatable spaces of the corporus cavernosa of the penis), intradiscal (within a disc), intraductal (within a duct of a gland), intraduodenal (within the duodenum), intradural (within or beneath the dura), intraepidermal (to the epidermis), intraesophageal (to the esophagus), intragastric (within the stomach), intragingival (within the gingivae), intrailcal (within the distal portion of the small intestine), intralesional (within or introduced directly to a localized lesion), intraluminal (within a lumen of a tube), intralymphatic (within the lymph), intramedullary (within the marrow cavity of a bone), intrameningeal (within the meninges), intraocular (within the eye), intraovarian (within the ovary), intrapericardial (within the pericardium), intrapleural (within the pleura), intraprostatic (within the prostate gland), intrapulmonary (within the lungs or its bronchi), intrasinal (within the nasal or periorbital sinuses), intraspinal (within the vertebral column), intrasynovial (within the synovial cavity of a joint), intratendinous (within a tendon), intratesticular (within the testicle), intrathecal (within the cerebrospinal fluid at any level of the cerebrospinal axis), intrathoracic (within the thorax), intratubular (within the tubules of an organ), intratumor (within a tumor), intratympanic (within the aurus media), intravascular (within a vessel or vessels), intraventricular (within a ventricle), iontophoresis (by means of electric current where ions of soluble salts migrate into the tissues of the body), irrigation (to bathe or flush open wounds or body cavities), laryngeal (directly upon the larynx), nasogastric (through the nose and into the stomach), occlusive dressing technique (topical route administration which is then covered by a dressing which occludes the area), ophthalmic (to the external eye), oropharyngeal (directly to the mouth and pharynx), parenteral, percutaneous, periarticular, peridural, perineural, periodontal, rectal, respiratory (within the respiratory tract by inhaling orally or nasally for local or systemic effect), retrobulbar (behind the pons or behind the eyeball), soft tissue, subarachnoid, subconjunctival, submucosal, topical, transplacental (through or across the placenta), transtracheal (through the wall of the trachea), transtympanic (across or through the tympanic cavity), ureteral (to the ureter), urethral (to the urethra), vaginal, caudal block, diagnostic, nerve block, biliary perfusion, cardiac perfusion, photopheresis or spinal.

[0701] In specific embodiments, compositions of AAV particles comprising a nucleic acid sequence encoding the siRNA molecules of the present invention may be administered in a way which facilitates the vectors or siRNA molecule to enter the central nervous system and penetrate into medium spiny and/or cortical neurons and/or astrocytes.

[0702] In some embodiments, the AAV particles comprising a nucleic acid sequence encoding the siRNA molecules of the present invention may be administered by intramuscular injection.

[0703] In one embodiment, the AAV particles comprising a nucleic acid sequence encoding the siRNA molecules of the present invention may be administered via intraparenchymal injection.

[0704] In one embodiment, the AAV particles comprising a nucleic acid sequence encoding the siRNA molecules of the present invention may be administered via intraparenchymal injection and intrathecal injection.

[0705] In one embodiment, the AAV particles comprising a nucleic acid sequence encoding the siRNA molecules of the present invention may be administered via intrastriatal injection.

[0706] In one embodiment, the AAV particles comprising a nucleic acid sequence encoding the siRNA molecules of the present invention may be administered via intrastriatal injection and another route of administration described herein.

[0707] In some embodiments, AAV particles that express siRNA duplexes of the present invention may be administered to a subject by peripheral injections (e.g., intravenous) and/or intranasal delivery. It was disclosed in the art that the peripheral administration of AAV particles for siRNA duplexes can be transported to the central nervous system, for example, to the neurons (e.g., U.S. Patent Publication Nos. 20100240739; and 20100130594; the content of each of which is incorporated herein by reference in their entirety).

[0708] In other embodiments, compositions comprising at least one AAV particle comprising a nucleic acid sequence encoding the siRNA molecules of the present invention may be administered to a subject by intracranial delivery (See, e.g., U.S. Pat. No. 8,119,611; the content of which is incorporated herein by reference in its entirety).

[0709] The AAV particle comprising a nucleic acid sequence encoding the siRNA molecules of the present invention may be administered in any suitable form, either as a liquid solution or suspension, as a solid form suitable for liquid solution or suspension in a liquid solution. The siRNA duplexes may be formulated with any appropriate and pharmaceutically acceptable excipient.

[0710] The AAV particle comprising a nucleic acid sequence encoding the siRNA molecules of the present invention may be administered in a “therapeutically effective” amount, i.e., an amount that is sufficient to alleviate and/or prevent at least one symptom associated with the disease, or provide improvement in the condition of the subject.

[0711] In one embodiment, the AAV particle may be administered to the CNS in a therapeutically effective amount to improve function and/or survival for a subject with Huntington's Disease (HD). As a non-limiting example, the vector may be administered by direct infusion into the striatum.

[0712] In one embodiment, the AAV particle may be administered to a subject (e.g., to the CNS of a subject via intrathecal administration) in a therapeutically effective amount for the siRNA duplexes or dsRNA to target the medium spiny neurons, cortical neurons and/or astrocytes. As a non-limiting example, the siRNA duplexes or dsRNA may reduce the expression of HTT protein or mRNA. As another non-limiting example, the siRNA duplexes or dsRNA can suppress HTT and reduce HTT mediated toxicity. The reduction of HTT protein and/or mRNA as well as HTT mediated toxicity may be accomplished with almost no enhanced inflammation.

[0713] In one embodiment, the AAV particle may be administered to a subject (e.g., to the CNS of a subject) in a therapeutically effective amount to slow the functional decline of a subject (e.g., determined using a known evaluation method such as the unified Huntington's disease rating scale (UHDRS)). As a non-limiting example, the vector may be administered via intraparenchymal injection.

[0714] In one embodiment, the AAV particle may be administered to the cisterna magna in a therapeutically effective amount to transduce medium spiny neurons, cortical neurons and/or astrocytes. As a non-limiting example, the vector may be administered intrathecally.

[0715] In one embodiment, the AAV particle may be administered using intrathecal infusion in a therapeutically effective amount to transduce medium spiny neurons, cortical neurons and/or astrocytes. As a non-limiting example, the vector may be administered intrathecally.

[0716] In one embodiment, the AAV particle may be administered to the cisterna magna in a therapeutically effective amount to transduce medium spiny neurons, cortical neurons and/or astrocytes. As a non-limiting example, the vector may be administered by intraparenchymal injection.

[0717] In one embodiment, the AAV particle comprising a modulatory polynucleotide may be formulated. As a non-limiting example the baricity and/or osmolality of the formulation may be optimized to ensure optimal drug distribution in the central nervous system or a region or component of the central nervous system.

[0718] In one embodiment, the AAV particle comprising a modulatory polynucleotide may be delivered to a subject via a single route administration.

[0719] In one embodiment, the AAV particle comprising a modulatory polynucleotide may be delivered to a subject via a multi-site route of administration. A subject may be administered the AAV particle comprising a modulatory polynucleotide at 2, 3, 4, 5 or more than 5 sites.

[0720] In one embodiment, a subject may be administered the AAV particle comprising a modulatory polynucleotide described herein using a bolus injection.

[0721] In one embodiment, a subject may be administered the AAV particle comprising a modulatory polynucleotide described herein using sustained delivery over a period of minutes, hours or days. The infusion rate may be changed depending on the subject, distribution, formulation or another delivery parameter.

[0722] In one embodiment, the AAV particle described herein is administered via putamen and caudate infusion. As a non-limiting example, the dual infusion provides a broad striatal distribution as well as a frontal and temporal cortical distribution.

[0723] In one embodiment, the AAV particle is AAV-DJ8 which is administered via unilateral putamen infusion. As a non-limiting example, the distribution of the administered AAV-DJ8 is similar to the distribution of AAV1 delivered via unilateral putamen infusion.

[0724] In one embodiment, the AAV particle described herein is administered via intrathecal (IT) infusion at C1. The infusion may be for 1, 2, 3, 4, 6, 7, 8, 9, 10, 11, 12, 13, 14, 15 or more than 15 hours.

[0725] In one embodiment, the selection of subjects for administration of the AAV particle described herein and/or the effectiveness of the dose, route of administration and/or volume of administration may be evaluated using imaging of the perivascular spaces (PVS) which are also known as Virchow-Robin spaces. PVS surround the arterioles and venules as they perforate brain parenchyma and are filled with cerebrospinal fluid (CSF)/interstitial fluid. PVS are common in the midbrain, basal ganglia, and centrum semiovale. While not wishing to be bound by theory. PVS may play a role in the normal clearance of metabolites and have been associated with worse cognition and several disease states including Parkinson's disease. PVS are usually are normal in size but they can increase in size in a number of disease states. Potter et al. (Cerebrovase Dis. 2015 January, 39(4): 224-231; the contents of which are herein incorporated by reference in its entirety) developed a grading method where they studied a full range of PVS and rated basal ganglia, centrum semiovale and midbrain PVS. They used the frequency and range of PVS used by Mac and Lullich et al. (J Neurol Neurosurg Psychiatry. 2004 November; 75(11):1519-23; the contents of which are herein incorporated by reference in its entirety) and Potter et al. gave 5 ratings to basal ganglia and centrum semiovale PVS: 0 (none), 1 (1-10), 2 (11-20), 3 (21-40) and 4 (>40) and 2 ratings to midbrain PVS: 0 (non visible) or 1 (visible). The user guide for the rating system by Potter et al. can be found at: www.sbirc.ed.ac.uk/documents/epvs-rating-scale-user-guide.pdf.

### Dosing

[0726] The pharmaceutical compositions of the present invention may be administered to a subject using any amount effective for reducing, preventing and/or treating a HTT associated disorder (e.g., Huntington' Disease (HD)). The exact amount required will vary from subject to subject, depending on the species, age, and general condition of the subject, the severity of the disease, the particular composition, its mode of administration, its mode of activity, and the like.

[0727] The compositions of the present invention are typically formulated in unit dosage form for ease of administration and uniformity of dosage. It will be understood, however, that the total daily usage of the compositions of the present invention may be decided by the attending physician within the scope of sound medical judgment. The specific therapeutic effectiveness for any particular patient will depend upon a variety of factors including the disorder being treated and the severity of the disorder; the activity of the specific compound employed; the specific composition employed, the age, body weight, general health, sex and diet of the patient; the time of administration, route of administration, and rate of excretion of the siRNA duplexes employed; the duration of the treatment; drugs used in combination or coincidental with the specific compound employed; and like factors well known in the medical arts.

[0728] In one embodiment, the age and sex of a subject may be used to determine the dose of the compositions of the present invention. As a non-limiting example, a subject who is older may receive a larger dose (e.g., 5-10%, 10-20%, 15-30%, 20-50%, 25-50% or at least 1%, 2%, 3%, 4%, 5%, 10%, 20%, 30%, 40%, 50%, 60%, 70%, 80%, 90% or more than 90% more) of the composition as compared to a younger subject. As another non-limiting example, a subject who is younger may receive a larger dose (e.g., 5-10%, 10-20%, 15-30%, 20-50%, 25-50% or at least 1%, 2%, 3%, 4%, 5%, 10%, 20%, 30%, 40%, 50%, 60%, 70%, 80%, 90% or more than 90% more) of the composition as compared to an older subject. As yet another non-limiting example, a subject who is female may receive a larger dose (e.g., 5-10%, 10-20%, 15-30%,20-50%, 25-50% or at least 1%, 2%, 3%, 4%, 5%, 10%, 20%, 30%, 40%, 50%, 60%, 70%, 80%, 90% or more than 90% more) of the composition as compared to a male subject. As yet another non-limiting example, a subject who is male may receive a larger dose (e.g., 5-10%, 10-20%, 15-30%, 20-50%, 25-50% or at least 1%, 2%, 3%, 4%, 5%, 10%, 20%, 30%, 40%, 50%, 60%, 70%, 80%, 90% or more than 90% more) of the composition as compared to a female subject

[0729] In some specific embodiments, the doses of AAV particles for delivering siRNA duplexes of the present invention may be adapted depending on the disease condition, the subject and the treatment strategy.

[0730] In one embodiment, delivery of the compositions in accordance with the present invention to cells comprises a rate of delivery defined by [VG/hour=mL/hour*VG/mL] wherein VG is viral genomes, VG/mL is composition concentration, and mL/hour is rate of prolonged delivery.

[0731] In one embodiment, delivery of compositions in accordance with the present invention to cells may comprise a total concentration per subject between about 1×10⁶ VG and about 1×10¹⁶ VG. In some embodiments, delivery may comprise a composition concentration of about 1×10⁶, 2×10⁶, 3×10⁶, 4×10⁶, 5×10⁶, 6×10⁶, 7×10⁶, 8×10⁶, 9×10⁶, 1×10⁷, 2×10⁷, 3×10⁷, 4×10⁷, 5×10⁷, 6×10⁷, 7×10⁷, 8×10⁷, 9×10⁷, 1×10⁸, 2×10⁸, 3×10⁸, 4×10⁸, 5×10⁸, 6×10⁸, 7×10⁸, 8×10⁸, 9×10⁸, 1×10⁹, 2×10⁹, 3×10⁹, 4×10⁹, 5×10⁹, 6×10⁹, 7×10⁹, 8×10⁹, 9×10⁹, 1×10¹⁰, 2×10¹⁰, 3×10¹⁰, 4×10¹⁰, 5×10¹⁰, 6×10¹⁰, 7×10¹⁰, 8×10¹⁰, 9×10¹⁰, 1×10¹¹, 1.1×10¹¹, 1.2×10¹¹, 1.3×10¹¹, 1.4×10¹¹, 1.5×10¹¹, 1.6×10¹¹, 1.7×10¹¹, 1.8×10¹¹, 1.9×10¹¹, 2×10¹¹, 2.1×10¹¹, 2.2×10¹¹, 2.3×10¹¹, 2.4×10¹¹, 2.5×10¹¹, 2.6×10¹¹, 2.7×10¹¹, 2.8×10¹¹, 2.9×10¹¹, 3×10¹¹, 4×10¹¹, 5×10¹¹, 6×10¹¹, 7×10¹¹, 7.1×10¹¹, 7.2×10¹¹, 7.3×10¹¹, 7.4×10¹¹, 7.5×10¹¹, 7.6×10¹¹, 7.7×10¹¹, 7.8×10¹¹, 7.9×10¹¹, 8×10¹¹, 9×10¹¹, 1×10¹², 1.1×10¹², 1.2×10¹², 1.3×10¹², 1.4×10¹², 1.5×10¹², 1.6×10¹², 1.7×10¹², 1.8×10¹², 1.9×10¹², 2×10¹², 2.1×10¹², 2.2×10¹², 2.3×10¹², 2.4×10¹², 2.5×10¹², 2.6×10¹², 2.7×10¹², 2.8×10¹², 2.9×10¹², 3×10¹², 3.1×10¹², 3.2×10¹², 3.3×10¹², 3.4×10¹², 3.5×10¹², 3.6×10¹², 3.7×10¹², 3.8×10¹², 3.9×10¹², 4×10¹², 4.1×10¹², 4.2×10¹², 4.3×10¹², 4.4×10¹², 4.5×10¹², 4.6×10¹², 4.7×10¹², 4.8×10¹², 4.9×10¹², 5×10¹², 6×10¹², 6.1×10¹², 6.2×10¹², 6.3×10¹², 6.4×10¹², 6.5×10¹², 6.6×10¹², 6.7×10¹², 6.8×10¹², 6.9×10¹², 7×10¹², 8×10¹², 8.1×10¹², 8.2×10¹², 8.3×10¹², 8.4×10¹², 8.5×10¹², 8.6×10¹², 8.7×10¹², 8.8×10¹², 8.9×10¹², 9×10¹², 1×10¹³, 1.1×10¹³, 1.2×10¹³, 1.3×10¹³, 1.4×10¹³, 1.5×10¹³, 1.6×10¹³, 1.7×10¹³, 1.8×10¹³, 1.9×10¹³, 2×10¹³, 3×10¹³, 4×10¹³, 5×10¹³, 6×10¹³, 6.7×10¹³, 7×10¹³, 8×10¹³, 9×10¹³, 1×10¹⁴, 2×10¹⁴, 3×10¹⁴, 4×10¹⁴, 5×10¹⁴, 6×10¹⁴, 7×10¹⁴, 8×10¹⁴, 9×10¹⁴, 1×10¹⁵, 2×10¹⁵, 3×10¹⁵, 4×10¹⁵, 5×10¹⁵, 6×10¹⁵, 7×10¹⁵, 8×10¹⁵, 9×10¹⁵, or 1×10¹⁶ VG/subject.

[0732] In one embodiment, delivery of compositions in accordance with the present invention to cells may comprise a total concentration per subject between about 1×10⁶ VG/kg and about 1×10¹⁶ VG/kg. In some embodiments, delivery may comprise a composition concentration of about 1×10⁶, 2×10⁶, 3×10⁶, 4×10⁶, 5×10⁶, 6×10⁶, 7×10⁶, 8×10⁶, 9×10⁶, 1×10⁷, 2×10⁷, 3×10⁷, 4×10⁷, 5×10⁷, 6×10⁷, 7×10⁷, 8×10⁷, 9×10⁷, 1×10⁸, 2×10⁸, 3×10⁸, 4×10⁸, 5×10⁸, 6×10⁸, 7×10⁸, 8×10⁸, 9×10⁸, 1×10⁹, 2×10⁹, 3×10⁹, 4×10⁹, 5×10⁹, 6×10⁹, 7×10⁹, 8×10⁹, 9×10⁹, 1×10¹⁰, 2×10¹⁰, 3×10¹⁰, 4×10¹⁰, 5×10¹⁰, 6×10¹⁰, 7×10¹⁰, 8×10¹⁰, 9×10¹⁰, 1×10¹¹, 1.1×10¹¹, 1.2×10¹¹, 1.3×10¹¹, 1.4×10¹¹, 1.5×10¹¹, 1.6×10¹¹, 1.7×10¹¹, 1.8×10¹¹, 1.9×10¹¹, 2×10¹¹, 2.1×10¹¹, 2.2×10¹¹, 2.3×10¹¹, 2.4×10¹¹, 2.5×10¹¹, 2.6×10¹¹, 2.7×10¹¹, 2.8×10¹¹, 2.9×10¹¹, 3×10¹¹, 4×10¹¹, 5×10¹¹, 6×10¹¹, 7×10¹¹, 7.1×10¹¹, 7.2×10¹¹, 7.3×10¹¹, 7.4×10¹¹, 7.5×10¹¹, 7.6×10¹¹, 7.7×10¹¹, 7.8×10¹¹, 7.9×10¹¹, 8×10¹¹, 9×10¹¹, 1×10¹², 1.1×10¹², 1.2×10¹², 1.3×10¹², 1.4×10¹², 1.5×10¹², 1.6×10¹², 1.7×10¹², 1.8×10¹², 1.9×10¹², 2×10¹², 2.1×10¹², 2.2×10¹², 2.3×10¹², 2.4×10¹², 2.5×10¹², 2.6×10¹², 2.7×10¹², 2.8×10¹², 2.9×10¹², 3×10¹², 3.1×10¹², 3.2×10¹², 3.3×10¹², 3.4×10¹², 3.5×10¹², 3.6×10¹², 3.7×10¹², 3.8×10¹², 3.9×10¹², 4×10¹², 4.1×10¹², 4.2×10¹², 4.3×10¹², 4.4×10¹², 4.5×10¹², 4.6×10¹², 4.7×10¹², 4.8×10¹², 4.9×10¹², 5×10¹², 6×10¹², 6.1×10¹², 6.2×10¹², 6.3×10¹², 6.4×10¹², 6.5×10¹², 6.6×10¹², 6.7×10¹², 6.8×10¹², 6.9×10¹², 7×10¹², 8×10¹², 8.1×10¹², 8.2×10¹², 8.3×10¹², 8.4×10¹², 8.5×10¹², 8.6×10¹², 8.7×10¹², 8.8×10¹², 8.9×10¹², 9×10¹², 1×10¹³, 1.1×10¹³, 1.2×10¹³, 1.3×10¹³, 1.4×10¹³, 1.5×10¹³, 1.6×10¹³, 1.7×10¹³, 1.8×10¹³, 1.9×10¹³, 2×10¹³, 3×10¹³, 4×10¹³, 5×10¹³, 6×10¹³, 6.7×10¹³, 7×10¹³, 8×10¹³, 9×10¹³, 1×10¹⁴, 2×10¹⁴, 3×10¹⁴, 4×10¹⁴, 5×10¹⁴, 6×10¹⁴, 7×10¹⁴, 8×10¹⁴, 9×10¹⁴, 1×10¹⁵, 2×10¹⁵, 3×10¹⁵, 4×10¹⁵, 5×10¹⁵, 6×10¹⁵, 7×10¹⁵, 8×10¹⁵, 9×10¹⁵, or 1×10¹⁶ VG/kg.

[0733] In one embodiment, about 10⁵ to 10⁶ viral genome (unit) may be administered per dose.

[0734] In one embodiment, delivery of the compositions in accordance with the present invention to cells may comprise a total concentration between about 1×10⁶ VG/mL and about 1×10¹⁶ VG/mL. In some embodiments, delivery may comprise a composition concentration of about 1×10⁶, 2×10⁶, 3×10⁶, 4×10⁶, 5×10⁶, 6×10⁶, 7×10⁶, 8×10⁶, 9×10⁶, 1×10⁷, 2×10⁷, 3×10⁷, 4×10⁷, 5×10⁷, 6×10⁷, 7×10⁷, 8×10⁷, 9×10⁷, 1×10⁸, 2×10⁸, 3×10⁸, 4×10⁸, 5×10⁸, 6×10⁸, 7×10⁸, 8×10⁸, 9×10⁸, 1×10⁹, 2×10⁹, 3×10⁹, 4×10⁹, 5×10⁹, 6×10⁹, 7×10⁹, 8×10⁹, 9×10⁹, 1×10¹⁰, 2×10¹⁰, 3×10¹⁰, 4×10¹⁰, 5×10¹⁰, 6×10¹⁰, 7×10¹⁰, 8×10¹⁰, 9×10¹⁰, 1×10¹¹, 1.1×10¹¹, 1.2×10¹¹, 1.3×10¹¹, 1.4×10¹¹, 1.5×10¹¹, 1.6×10¹¹, 1.7×10¹¹, 1.8×10¹¹, 1.9×10¹¹, 2×10¹¹, 3×10¹¹, 4×10¹¹, 5×10¹¹, 6×10¹¹, 7×10¹¹, 8×10¹¹, 9×10¹¹, 1×10¹², 1.1×10¹², 1.2×10¹², 1.3×10¹², 1.4×10¹², 1.5×10¹², 1.6×10¹², 1.7×10¹², 1.8×10¹², 1.9×10¹², 2×10¹², 2.1×10¹², 2.2×10¹², 2.3×10¹², 2.4×10¹², 2.5×10¹², 2.6×10¹², 2.7×10¹², 2.8×10¹², 2.9×10¹², 3×10¹², 3.1×10¹², 3.2×10¹², 3.3×10¹², 3.4×10¹², 3.5×10¹², 3.6×10¹², 3.7×10¹², 3.8×10¹², 3.9×10¹², 4×10¹², 4.1×10¹², 4.2×10¹², 4.3×10¹², 4.4×10¹², 4.5×10¹², 4.6×10¹², 4.7×10¹², 4.8×10¹², 4.9×10¹², 5×10¹², 6×10¹², 6.1×10¹², 6.2×10¹², 6.3×10¹², 6.4×10¹², 6.5×10¹², 6.6×10¹², 6.7×10¹², 6.8×10¹², 6.9×10¹², 7×10¹², 8×10¹², 9×10¹², 1×10¹³, 1.1×10¹³, 1.2×10¹³, 1.3×10¹³, 1.4×10¹³, 1.5×10¹³, 1.6×10¹³, 1.7×10¹³, 1.8×10¹³, 1.9×10¹³, 2×10¹³, 3×10¹³, 4×10¹³, 5×10¹³, 6×10¹³, 6.7×10¹³, 7×10¹³, 8×10¹³, 9×10¹³, 1×10¹⁴, 2×10¹⁴, 3×10¹⁴, 4×10¹⁴, 5×10¹⁴, 6×10¹⁴, 7×10¹⁴, 8×10¹⁴, 9×10¹⁴, 1×10¹⁵, 2×10¹⁵, 3×10¹⁵, 4×10¹⁵, 5×10¹⁵, 6×10¹⁵, 7×10¹⁵, 8×10¹⁵, 9×10¹⁵, or 1×10¹⁶ VG/mL.

[0735] In certain embodiments, the desired siRNA duplex dosage may be delivered using multiple administrations (e.g., two, three, four, five, six, seven, eight, nine, ten, eleven, twelve, thirteen, fourteen, or more administrations). When multiple administrations are employed, split dosing regimens such as those described herein may be used. As used herein, a “split dose” is the division of single unit dose or total daily dose into two or more doses, e.g., two or more administrations of the single unit dose. As used herein, a “single unit dose” is a dose of any modulatory polynucleotide therapeutic administered in one dose/at one time/single route/single point of contact, i.e., single administration event. As used herein, a “total daily dose” is an amount given or prescribed in a 24 hour period. It may be administered as a single unit dose. In one embodiment, the AAV particles comprising the modulatory polynucleotides of the present invention are administered to a subject in split doses. They may be formulated in buffer only or in a formulation described herein.

[0736] In one embodiment, the dose, concentration and/or volume of the composition described herein may be adjusted depending on the contribution of the caudate or putamen to cortical and subcortical distribution after administration. The administration may be intracerebroventricular, intraputamenal, intrathalamic, intraparenchymal, subpial, and/or intrathecal administration.

[0737] In one embodiment, the dose, concentration and/or volume of the composition described herein may be adjusted depending on the cortical and neuraxial distribution following administration by intracerebroventricular, intraputamenal, intrathalamic, intraparenchymal, subpial, and/or intrathecal delivery.

### IV. Methods and Uses of the Compositions of the Invention

### Huntington's Disease (HD)

[0738] Huntington's Disease (HD) is a monogenic fatal neurodegenerative disease characterized by progressive chorea, neuropsychiatric and cognitive dysfunction. Huntington's disease is known to be caused by an autosomal dominant triplet (CAG) repeat expansion in the huntingtin (HTT) gene, which encodes poly-glutamine at the N-terminus of the HTT protein. This repeat expansion results in a toxic gain of function of HTT and ultimately leads to striatal neurodegeneration which progresses to widespread brain atrophy. Medium spiny neurons of the striatum appear to be especially vulnerable in HD with up to 95% loss, whereas interneurons are largely spared.

[0739] Huntington's Disease has a profound impact on quality of life. Symptoms typically appear between the ages of 35-44 and life expectancy subsequent to onset is 10-25 years. In a small percentage of the HD population (˜6%), disease onset occurs prior to the age of 21 with appearance of an akinetic-rigid syndrome. These cases tend to progress faster than those of the later onset variety and have been classified as juvenile or Westphal variant HD. It is estimated that approximately 35,000-70,000 patients are currently suffering from HD in the US and Europe. Currently, only symptomatic relief and supportive therapies are available for treatment of HD, with a cure yet to be identified. Ultimately, individuals with HD succumb to pneumonia, heart failure or other complications such as physical injury from falls.

[0740] While not wishing to be bound by theory, the function of the wild type HTT protein may serve as a scaffold to coordinate complexes of other proteins. HTT is a very large protein (67 exons, 3144 amino acids, −350 kDa) that undergoes extensive post-translational modification and has numerous sites for interaction with other proteins, particularly at its N-terminus (coincidently the region that carries the repeats in HD). HTT localizes primarily to the cytoplasm but has been shown to shuttle into the nucleus where it may regulate gene transcription. It has also been suggested that HTT has a role in vesicular transport and regulating RNA trafficking.

[0741] As a non-limiting example, the HTT protein sequence is SEQ ID NO: 1424 (NCBI NP_002102.4) and the HTT nucleic acid sequence is SEQ ID NO: 1425 (NCBI NM_002111.7).

[0742] The mechanisms by which CAG-expanded HTT disrupts normal HTT function and results in neurotoxicity were initially thought to be a disease of haploinsufficiency, this theory was disproven when terminal deletion of the HTT gene in man did not lead to development of HD, suggesting that fully expressed HTT protein is not critical to survival. However, conditional knockout of HTT in mouse led to neurodegeneration, indicating that some amount of HTT is necessary for cell survival. Huntingtin protein is expressed in all cells, though its concentration is highest in the brain where large aggregates of abnormal HTT are found in neuronal nuclei. In the brains of HD patients, HTT aggregates into abnormal nuclear inclusions. It is now believed that it is this process of misfolding and aggregating along with the associated protein intermediates (i.e. the soluble species and toxic N-terminal fragments) that result in neurotoxicity. In fact, HD belongs to a family of nine additional human genetic disorders all of which are characterized by CAG-expanded genes and resultant polyglutamine (poly-Q) protein products with subsequent formation of intraneuronal aggregates. Interestingly, in all of these diseases the length of the expansion correlates with both age of onset and rate of disease progression, with longer expansions linked to greater severity of disease.

[0743] Hypotheses on the molecular mechanisms underlying the neurotoxicity of CAG-expanded HTT and its resultant aggregates have been wide ranging, but include, caspase activation, dysregulation of transcriptional pathways, increased production of reactive oxygen species, mitochondrial dysfunction, disrupted axonal transport and/or inhibition of protein degradation systems within the cell. CAG-expanded HTT may not only have a toxic gain of function, but also exert a dominant negative effect by interfering with the normal function of other cellular proteins and processes. HTT has also been implicated in non-cell autonomous neurotoxicity, whereby a cell hosting HTT spreads the HTT to other neurons nearby.

[0744] In one embodiment, a subject has fully penetrant HD where the HTT gene has 41 or more CAG repeats (e.g., 41, 42, 43, 44, 45, 46, 47, 48, 49, 50, 51, 52, 53, 54, 55, 56, 57, 58, 59, 60, 61, 62, 63, 64, 65, 66, 67, 68, 69, 70, 71, 72, 73, 74, 75, 76, 77, 78, 79, 80, 81, 82, 83, 84, 85, 86, 87, 88, 89, 90 or more than 90 CAG repeats).

[0745] In one embodiment, a subject has incomplete penetrance where the HTT gene has between 36 and 40 CAG repeats (e.g., 36, 37, 38, 39 and 40 CAG repeats).

[0746] Symptoms of HD may include features attributed to CNS degeneration such as, but are not limited to, chorea, dystonia, bradykinesia incoordination, irritability and depression, problem solving difficulties, reduction in the ability of a person to function in their normal day to day life, diminished speech, and difficulty swallowing, as well as features not attributed to CNS degeneration such as, but not limited to, weight loss, muscle wasting, metabolic dysfunction and endocrine disturbances.

[0747] Model systems for studying Huntington's Disease which may be used with the modulatory polynucleotides and AAV particles described herein include, but are not limited to, cell models (e.g., primary neurons and induced pluripotent stem cells), invertebrate models (e.g., drosophila or Caenorhabditis elegans), mouse models (e.g., YAC128 mouse model; R6/2 mouse model; BAC, YAC and knock-in mouse model), rat models (e.g., BAC) and large mammal models (e.g., pigs, sheep or monkeys).

[0748] Studies in animal models of HD have suggested that phenotypic reversal is feasible, for example, subsequent to gene shut off in regulated-expression models. In a mouse model allowing shut off of expression of a 94-polyglutamine repeat HTT protein, not only was the clinical syndrome reversed but also the intracellular aggregates were resolved. Further, animal models in which silencing of HTT was tested, demonstrated promising results with the therapy being both well tolerated and showing potential therapeutic benefit.

[0749] Such siRNA mediated HTT expression inhibition may be used for treating HD. According to the present invention, methods for treating and/or ameliorating HD in a patient comprises administering to the patient an effective amount of AAV particles comprising a nucleic acid sequence encoding the siRNA molecules of the present invention into cells. The administration of the AAV particles comprising such a nucleic acid sequence will encode the siRNA molecules which cause the inhibition/silence of HTT gene expression.

[0750] In one embodiment, the AAV particles described herein may be used to reduce the amount of HTT in a subject in need thereof and thus provides a therapeutic benefit as described herein.

[0751] In certain aspects, the symptoms of HD include behavioral difficulties and symptoms such as, but not limited to, apathy or lack of initiative, dysphoria, irritability, agitation or anxiety, poor self-care, poor judgment, inflexibility, disinhibition, depression, suicidal ideation euphoria, aggression, delusions, compulsions, hypersexuality, hallucinations, speech deterioration, slurred speech, difficulty swallowing, weight loss, cognitive dysfunction which impairs executive functions (e.g., organizing, planning, checking or adapting alternatives, and delays in the acquisition of new motor skills), unsteady gait and involuntary movements (chorea). In other aspects, the composition of the present invention is applied to one or both of the brain and the spinal cord. In one embodiment, the survival of the subject is prolonged by treating any of the symptoms of HD described herein.

[0752] Disclosed in the present invention are methods for treating Huntington's Disease (HD) associated with HTT protein in a subject in need of treatment. The method optionally comprises administering to the subject a therapeutically effective amount of a composition comprising at least AAV particles comprising a nucleic acid sequence encoding the siRNA molecules of the present invention. As a non-limiting example, the siRNA molecules can silence HTT gene expression, inhibit HTT protein production, and reduce one or more symptoms of HD in the subject such that HD is therapeutically treated.

### Method of Treatment of Huntington's Disease

[0753] The present invention provides AAV particles comprising modulatory polynucleotides encoding siRNA molecules targeting the HTT gene, and methods for their design and manufacture. While not wishing to be bound by a single theory of operability, the invention provides modulatory polynucleotides, including siRNAs, that interfere with HTT expression, including HTT mutant and/or wild-type HTT gene expression. Particularly, the present invention employs viral genomes such as adeno-associated viral (AAV) viral genomes comprising modulatory polynucleotide sequences encoding the siRNA molecules of the present invention. The AAV vectors comprising the modulatory polynucleotides encoding the siRNA molecules of the present invention may increase the delivery of active agents into neurons of interest such as medium spiny neurons of the striatum and cortical neurons. The siRNA duplexes or encoded dsRNA targeting the HTT gene may be able to inhibit HTT gene expression (e.g., mRNA level) significantly inside cells; therefore, reducing HTT expression induced stress inside the cells such as aggregation of protein and formation of inclusions, increased free radicals, mitochondrial dysfunction and RNA metabolism.

[0754] Provided in the present invention are methods for introducing the AAV particles comprising a modulatory polynucleotide sequence encoding the siRNA molecules of the present invention into cells, the method comprising introducing into said cells any of the AAV particles in an amount sufficient for degradation of target HTT mRNA to occur, thereby activating target-specific RNAi in the cells. In some aspects, the cells may be stem cells, neurons such as medium spiny or cortical neurons, muscle cells and glial cells such as astrocytes.

[0755] In some embodiments, the present invention provides methods for treating or ameliorating Huntington's Disease (HD) by administering to a subject in need thereof a therapeutically effective amount of a plasmid or AAV vector described herein.

[0756] In some embodiments, the AAV particles comprising modulatory polynucleotides encoding the siRNA molecules of the present invention may be used to treat and/or ameliorate for HD.

[0757] In one embodiment, the AAV particles comprising modulatory polynucleotides encoding the siRNA molecules of the present invention may be used to reduce the cognitive and/or motor decline of a subject with HD, where the amount of decline is determined by a standard evaluation system such as, but not limited to, Unified Huntington's Disease Ratings Scale (UHDRS) and subscores, and cognitive testing.

[0758] In one embodiment, the AAV particles comprising modulatory polynucleotides encoding the siRNA molecules of the present invention may be used to reduce the decline of functional capacity and activities of daily living as measured by a standard evaluation system such as, but not limited to, the total functional capacity (TFC) scale.

[0759] In some embodiments, the present invention provides methods for treating, or ameliorating Huntington's Disease associated with HTT gene and/or HTT protein in a subject in need of treatment, the method comprising administering to the subject a pharmaceutically effective amount of AAV particles comprising modulatory polynucleotides encoding at least one siRNA duplex targeting the HTT gene, inhibiting HTT gene expression and protein production, and ameliorating symptoms of HD in the subject.

[0760] In one embodiment, the AAV vectors of the present invention may be used as a method of treating Huntington's disease in a subject in need of treatment. Any method known in the art for defining a subject in need of treatment may be used to identify said subject(s). A subject may have a clinical diagnosis of Huntington's disease, or may be pre-symptomatic. Any known method for diagnosing HD may be utilized, including, but not limited to, cognitive assessments and/or neurological or neuropsychiatric examinations, motor tests, sensory tests, psychiatric evaluations, brain imaging, family history and/or genetic testing.

[0761] In one embodiment, HD subject selection is determined with the use of the Prognostic Index for Huntington's Disease, or a derivative thereof (Long J D et al., Movement Disorders, 2017, 32(2), 256-263, the contents of which are herein incorporated by reference in their entirety). This prognostic index uses four components to predict probability of motor diagnosis, (1) total motor score (TMS) from the Unified Huntington's Disease Rating Scale (UHDRS), (2) Symbol Digit Modality Test (SDMT), (3) base-line age, and (4) cytosine-adenine-guanine (CAG) expansion.

[0762] In one embodiment, the prognostic index for Huntington's Disease is calculated with the following formula: PI_{HD}=51×TMS+(−34)×SDMT+7×Age×(CAG-34), wherein larger values for PI_{HD} indicate greater risk of diagnosis or onset of symptoms.

[0763] In another embodiment, the prognostic index for Huntington's Disease is calculated with the following normalized formula that gives standard deviation units to be interpreted in the context of 50% 10-year survival: PIN_{HD}=(PI_{HD}−883)/1044, wherein PIN_{HD}<0 indicates greater than 50% 10-year survival, and PIN_{HD}>0 suggests less than 50% 10-year survival.

[0764] In one embodiment, the prognostic index may be used to identify subjects whom will develop symptoms of HD within several years, but that do not yet have clinically diagnosable symptoms. Further, these asymptomatic patients may be selected for and receive treatment using the AAV vectors and compositions of the present invention during the asymptomatic period.

[0765] In one embodiment, the AAV particles may be administered to a subject who has undergone biomarker assessment. Potential biomarkers in blood for premanifest and early progression of HD include, but are not limited to, 8-OhdG oxidative stress marker, metabolic markers (e.g., creatine kinase, branched-chain amino acids), cholesterol metabolites (e.g., 24-OH cholesterol), immune and inflammatory proteins (e.g., clusterin, complement components, interleukins 6 and 8), gene expression changes (e.g., transcriptomic markers), endocrine markers (e.g., cortisol, ghrelin and leptin), BDNF, adenosine 2A receptors. Potential biomarkers for brain imaging for premanifest and early progression of HD include, but are not limited to, striatal volume, subcortical white-matter volume, cortical thickness, whole brain and ventricular volumes, functional imaging (e.g., functional MRI), PET (e.g., with fluorodeoxyglucose), and magnetic resonance spectroscopy (e.g., lactate). Potential biomarkers for quantitative clinical tools for premanifest and early progression of HD include, but are not limited to, quantitative motor assessments, motor physiological assessments (e.g., transcranial magnetic stimulation), and quantitative eye movement measurements. Non-limiting examples of quantitative clinical biomarker assessments include tongue force variability, metronome-guided tapping, grip force, oculomotor assessments and cognitive tests. Non-limiting examples of multicenter observational studies include PREDICT-HD and TRACK-HD. A subject may have symptoms of HD, diagnosed with HD or may be asymptomatic for HD.

[0766] In one embodiment, the AAV particles may be administered to a subject who has undergone biomarker assessment using neuroimaging. A subject may have symptoms of HD, diagnosed with HD or may be asymptomatic for HD.

[0767] In one embodiment, the AAV particles may be administered to a subject who is asymptomatic for HD. A subject may be asymptomatic but may have undergone predictive genetic testing or biomarker assessment to determine if they are at risk for HD and/or a subject may have a family member (e.g., mother, father, brother, sister, aunt, uncle, grandparent) who has been diagnosed with HD.

[0768] In one embodiment, the AAV particles may be administered to a subject who is in the early stages of HD. In the early stage a subject has subtle changes in coordination, some involuntary movements (chorea), changes in mood such as irritability and depression, problem solving difficulties, reduction in the ability of a person to function in their normal day to day life.

[0769] In one embodiment, the AAV particles may be administered to a subject who is in the middle stages of HD. In the middle stage a subject has an increase in the movement disorder, diminished speech, difficulty swallowing, and ordinary activities will become harder to do. At this stage a subject may have occupational and physical therapists to help maintain control of voluntary movements and a subject may have a speech language pathologist.

[0770] In one embodiment, the AAV particles may be administered to a subject who is in the late stages of HD. In the late stage, a subject with HD is almost completely or completely dependent on others for care as the subject can no longer walk and is unable to speak. A subject can generally still comprehend language and is aware of family and friends but choking is a major concern.

[0771] In one embodiment, the AAV particles may be used to treat a subject who has the juvenile form of HD which is the onset of HD before the age of 20 years and as early as 2 years.

[0772] In one embodiment, the AAV particles may be used to treat a subject with HD who has fully penetrant HD where the HTT gene has 41 or more CAG repeats (e.g., 41, 42, 43, 44, 45, 46, 47, 48, 49, 50, 51, 52, 53, 54, 55, 56, 57, 58, 59, 60, 61, 62, 63, 64, 65, 66, 67, 68, 69, 70, 71, 72, 73, 74, 75, 76, 77, 78, 79, 80, 81, 82, 83, 84, 85, 86, 87, 88, 89, 90 or more than 90 CAG repeats).

[0773] In one embodiment, the AAV particles may be used to treat a subject with HD who has incomplete penetrance where the HTT gene has between 36 and 40 CAG repeats (e.g., 36, 37, 38, 39 and 40 CAG repeats).

[0774] In some embodiments, the composition comprising the AAV particles comprising modulatory polynucleotides encoding the siRNA molecules of the present invention is administered to the central nervous system of the subject. In other embodiments, the composition comprising the AAV particles comprising modulatory polynucleotides encoding the siRNA molecules of the present invention is administered to a tissue of a subject (e.g., brain of the subject).

[0775] In one embodiment, the AAV particles comprising modulatory polynucleotides encoding the siRNA molecules of the present invention may be delivered into specific types of targeted cells, including, but not limited to, neurons including medium spiny or cortical neurons; glial cells including oligodendrocytes, astrocytes and microglia; and/or other cells surrounding neurons such as T cells.

[0776] In one embodiment, the AAV particles comprising modulatory polynucleotides encoding the siRNA molecules of the present invention may be delivered to neurons in the striatum and/or neurons of the cortex.

[0777] In some embodiments, the composition of the present invention for treating HD is administered to the subject in need intravenously, intramuscularly, subcutaneously, intraperitoneally, intraparenchymally, subpially, intrathecally and/or intraventricularly, allowing the siRNA molecules or vectors comprising the siRNA molecules to pass through one or both the blood-brain barrier and the blood spinal cord barrier, or directly access the brain and/or spinal cord. In some aspects, the method includes administering (e.g., intraparenchymal administration, subpial administration, intraventricular administration and/or intrathecal administration) directly to the central nervous system (CNS) of a subject (using, e.g., an infusion pump and/or a delivery scaffold) a therapeutically effective amount of a composition comprising AAV particles encoding the nucleic acid sequence for the siRNA molecules of the present invention. The vectors may be used to silence or suppress HTT gene expression, and/or reducing one or more symptoms of HD in the subject such that HD is therapeutically treated.

[0778] In some embodiments, the siRNA molecules or the AAV vectors comprising such siRNA molecules may be introduced directly into the central nervous system of the subject, for example, by infusion to the white matter a subject. While not wishing to be bound by theory, distribution via direct white matter infusion may be independent of axonal transport mechanisms which may be impaired in subjects with Huntington's Disease which means white matter infusion may allow for more transport of the AAV vectors.

[0779] In one embodiment, the composition comprising the AAV particles comprising modulatory polynucleotides encoding the siRNA molecules of the present invention is administered to the central nervous system of the subject via intraparenchymal injection.

[0780] In one embodiment, the AAV particle composition comprising modulatory polynucleotides encoding the siRNA molecules of the present invention is administered to the central nervous system of the subject via intraparenchymal injection and intrathecal injection.

[0781] In one embodiment, the AAV particle composition comprising modulatory polynuclcotides encoding the siRNA molecules of the present invention is administered to the central nervous system of the subject via intraparenchymal injection and intracerebroventricular injection.

[0782] In some embodiments, the composition of the present invention for treating HD is administered to the subject in need by intraparenchymal administration.

[0783] In some embodiments, the AAV particle composition comprising modulatory polynucleotides encoding the siRNA molecules of the present invention may be introduced directly into the central nervous system of the subject, for example, by infusion into the putamen.

[0784] In some embodiments, the AAV particle composition comprising modulatory polynucleotides encoding the siRNA molecules of the present invention may be introduced directly into the central nervous system of the subject, for example, by infusion into the thalamus of a subject. While not wishing to be bound by theory, the thalamus is an area of the brain which is relatively spared in subjects with Huntington's Disease which means it may allow for more widespread cortical transduction via axonal transport of the AAV vectors.

[0785] In some embodiments, the AAV particle composition comprising modulatory polynuclcotides encoding the siRNA molecules of the present invention may be introduced indirectly into the central nervous system of the subject, for example, by intravenous administration.

### Modulate HTT Expression

[0786] In one embodiment, administration of the AAV particles to a subject will reduce the expression of HTT in a subject and the reduction of expression of the HTT will reduce the effects of HD in a subject.

[0787] In one embodiment, the encoded dsRNA once expressed and contacts a cell expressing HTT protein, inhibits the expression of HTT protein by at least 10%, at least 20%, at least 25%, at least 30%, at least 35% or at least 40% or more, such as when assayed by a method as described herein.

[0788] In one embodiment, administration of the AAV particles comprising a modulatory polynucleotide sequence encoding a siRNA of the invention, to a subject may lower HTT (e.g., mutant HTT, wild-type HTT and/or mutant and wild-type HTT) in a subject. In one embodiment, administration of the AAV particles to a subject may lower wild-type HTT in a subject. In yet another embodiment, administration of the AAV particles to a subject may lower both mutant HTT and wild-type HTT in a subject. The mutant and/or wild-type HTT may be lowered by about 20%, 30%, 40%, 50%, 60%, 70%, 80%, 85%, 90%, 95% and 100%, or at least 20-30%, 20-40%, 20-50%, 20-60%, 20-70%, 20-80%, 20-90%, 20-950%, 20-100%, 30-40%, 30-50%, 30-60%, 30-70%, 30-80%, 30-90%, 30-95%, 30-100%, 40-50%, 40-60%, 40-70%, 40-80%, 40-90%, 40-95%, 40-100%, 50-60%, 50-70%, 50-80%, 50-90%, 50-95%, 50-100%, 60-70%, 60-80%, 60-90%, 60-95%, 60-100%, 70-80%, 70-90%, 70-95%, 70-100%, 80-90%, 80-95%, 80-100%, 90-95%, 90-100% or 95-100% in a subject such as, but not limited to, the CNS, a region of the CNS, or a specific cell of the CNS of a subject. The mutant HTT may be lowered by about 20%, 30%, 40%, 50%, 60%, 70%, 80%, 85%, 90%, 95% and 100%, or at least 20-30%, 20-40%, 20-50%, 20-60%, 20-70%, 20-80%, 20-90%, 20-95%, 20-100%, 30-40%, 30-50%, 30-60%, 30-70%, 30-80%, 30-90%, 30-95%, 30-100%, 40-50%, 40-60%, 40-70%, 40-80%, 40-90%, 40-95%, 40-100%, 50-60%, 50-70%, 50-80%, 50-90%, 50-95%, 50-100%, 60-70%, 60-80%, 60-90%, 60-95%, 60-100%, 70-80%, 70-90%, 70-95%, 70-100%, 80-90%, 80-95%, 80-100%, 90-95%, 90-100% or 95-100% in a subject such as, but not limited to, the CNS, a region of the CNS, or a specific cell of the CNS of a subject. The wild-type HTT may be lowered by about 20%, 30%, 40%, 50%, 60%, 70%, 80%, 85%, 90%, 95% and 100%, or at least 20-30%, 20-40%, 20-50%, 20-60%, 20-70%, 20-80%, 20-90%, 20-95%, 20-100%, 30-40%, 30-50%, 30-60%, 30-70%, 30-80%, 30-90%, 30-95%, 30-100%, 40-50%, 40-60%, 40-70%, 40-80%, 40-90%, 40-95%, 40-100%, 50-60%, 50-70%, 50-80%, 50-90%, 50-95%, 50-100%, 60-70%, 60-80%, 60-90%, 60-95%, 60-100%, 70-80%, 70-90%, 70-95%, 70-100%, 80-90%, 80-95%, 80-100%, 90-95%, 90-100% or 95-100% in a subject such as, but not limited to, the CNS, a region of the CNS, or a specific cell of the CNS of a subject. The mutant and wild-type HTT may be lowered by about 20%, 30%, 40%, 50%, 60%, 70%, 80%, 85%, 90%, 95% and 100%, or at least 20-30%, 20-40%, 20-50%, 20-60%, 20-70%, 20-80%, 20-90%, 20-95%, 20-100%, 30-40%, 30-50%, 30-60%, 30-70%, 30-80%, 30-90%, 30-95%, 30-100%, 40-50%, 40-60%, 40-70%, 40-80%, 40-90%, 40-95%, 40-100%, 50-60%, 50-70%, 50-80%, 50-90%, 50-95%, 50-100%, 60-70%, 60-80%, 60-90%, 60-95%, 60-100%, 70-80%, 70-90%, 70-95%, 70-100%, 80-90%, 80-95%, 80-100%, 90-95%, 90-100% or 95-100% in a subject such as, but not limited to, the CNS, a region of the CNS, or a specific cell of the CNS of a subject. As a non-limiting example, the AAV particles may lower the expression of HTT by at least 50% in the medium spiny neurons. As a non-limiting example, the vectors, e.g., AAV vectors may lower the expression of HTT by at least 40% in the medium spiny neurons. As a non-limiting example, the AAV particles may lower the expression of HTT by at least 40% in the medium spiny neurons of the putamen. As a non-limiting example, AAV particles may lower the expression of HTT by at least 30% in the medium spiny neurons of the putamen. As yet another non-limiting example, the AAV particles may lower the expression of HTT in the putamen and cortex by at least 40%. As yet another non-limiting example, the AAV particles may lower the expression of HTT in the putamen and cortex by at least 30%. As yet another non-limiting example, the AAV particles may lower the expression of HTT in the putamen by at least 30%. As yet another non-limiting example, the AAV particles may lower the expression of HTT in the putamen by at least 30% and cortex by at least 15%.

[0789] In one embodiment, the AAV particles may be used to reduce the expression of HTT protein by at least about 30%, 31%, 32%, 33%, 34%, 35%, 36%, 37%, 38%, 39%, 40%, 41%, 42%, 43%, 44%, 45%, 46%, 47%, 48%, 49%, 50%, 51%, 52%, 53%, 54%, 55%, 56%, 57%, 58%, 59%, 60%, 61%, 62%, 63%, 64%, 65%, 66%, 67%, 68%, 69%, 70%, 71%, 72%, 73%, 74%, 75%, 76%, 77%, 78%, 79%, 80%, 85%, 90%, 95% and 100%, or at least 20-30%, 20-40%, 20-50%, 20-60%, 20-70%, 20-80%, 20-90%, 20-95%, 20-100%, 30-40%, 30-50%, 30-60%, 30-70%, 30-80%, 30-90%, 30-95%, 30-100%, 40-50%, 40-60%, 40-70%, 40-80%, 40-90%, 40-95%, 40-100%, 50-60%, 50-70%, 50-80%, 50-90%, 50-95%, 50-100%, 55-60%, 55-70%, 55-80%, 55-90%, 55-95%, 55-100%, 60-70%, 60-80%, 60-90%, 60-95%, 60-100%, 70-80%, 70-90%, 70-95%, 70-100%, 80-90%, 80-95%, 80-100%, 90-95%, 90-100% or 95-100%. As a non-limiting example, the expression of HTT protein expression may be reduced by 50-90%. As a non-limiting example, the expression of HTT protein expression may be reduced by 30-70%.

[0790] In one embodiment, the siRNA duplexes or encoded dsRNA may be used to reduce the expression of HTT mRNA by at least about 30%, 31%, 32%, 33%, 34%, 35%, 36%, 37%, 38%, 39%, 40%, 41%, 42%, 43%, 44%, 45%, 46%, 47%, 48%, 49%, 50%, 51%, 52%, 53%, 54%, 55%, 56%, 57%, 58%, 59%, 60%, 61%, 62%, 63%, 64%, 65%, 66%, 67%, 68%, 69%, 70%, 71%, 72%, 73%, 74%, 75%, 76%, 77%, 78%, 79%, 80%, 85%, 90%, 95% and 100%, or at least 20-30%, 20-40%, 20-50%, 20-600%, 20-70%, 20-80%, 20-90%, 20-95%, 20-100%, 30-40%, 30-50%, 30-60%, 30-70%, 30-80%, 30-90%, 30-95%, 30-100%, 40-50%, 40-60%, 40-70%, 40-80%, 40-90%, 40-95%, 40-100%, 50-60%, 50-70%, 50-80%, 50-90%, 50-95%, 50-100%, 55-60%, 55-70%, 55-80%, 55-90%, 55-95%, 55-100%, 60-70%, 60-80%, 60-90%, 60-95%, 60-100%, 70-80%, 70-90%, 70-95%, 70-100%, 80-90%, 80-95%, 80-100%, 90-95%, 90-100% or 95-100%. As a non-limiting example, the expression of HTT mRNA may be reduced 50-90%.

[0791] In one embodiment, the AAV particles may be used to decrease HTT protein in a subject. The decrease may independently be 5%, 10%, 15%, 20%, 25%, 30%, 35%, 40%, 45%, 50%, 55%, 60%, 65%, 70%, 75%, 80%, 85%, 90%, 95%, or more than 95%, 5-15%, 5-20%, 5-25%, 5-30%, 5-35%, 5-40%, 5-45%, 5-50%, 5-55%, 5-60%, 5-65%, 5-70%, 5-75%, 5-80%, 5-85%, 5-90%, 5-95%, 10-20%, 10-25%, 10-30%, 10-35%, 10-40%, 10-45%, 10-50%, 10-55%, 10-60%, 10-65%, 10-70%, 10-75%, 10-80%, 10-85%, 10-90%, 10-95%, 15-25%, 15-30%, 15-35%, 15-40%, 15-45%, 15-50%, 15-55%, 15-60%, 15-65%, 15-70%, 15-75%, 15-80%, 15-85%, 15-90%, 15-95%, 20-30%, 20-35%, 20-40%, 2045%, 20-50%, 20-55%, 20-60%, 20-65%, 20-70%, 20-75%, 20-80%, 20-85%, 20-90%, 20-95%, 25-35%, 25-40%, 25-45%, 25-50%, 25-55%, 25-60%, 25-65%, 25-70%, 25-75%, 25-80%, 25-85%, 25-90%, 25-95%, 30-40%, 30-45%, 30-50%, 30-55%, 30-60%, 30-65%, 30-70%, 30-75%, 30-80%, 30-85%, 30-90%, 30-95%, 35-45%, 35-50%, 35-55%, 35-60%, 35-65%, 35-70%, 35-75%, 35-80%, 35-85%, 35-90%, 35-95%, 40-50%, 40-55%, 40-60%, 40-65%, 40-70%, 40-75%, 40-80%, 40-85%, 40-90%, 40-95%, 45-50%, 45-60%, 45-65%, 45-70%, 45-75%, 45-80%, 45-85%, 45-90%, 45-95%, 50-60%, 50-65%, 50-70%, 50-75%, 50-80%, 50-85%, 50-90%, 50-95%, 55-65%, 55-70%, 55-75%, 55-80%, 55-85%, 55-90%, 55-95%, 60-70%, 60-75%, 60-80%, 60-85%, 60-90%, 60-95%, 65-75%, 65-80%, 65-85%, 65-90%, 65-95%, 70-80%, 70-85%, 70-90%, 70-95%, 75-85%, 75-90%, 75-95%, 80-90%, 80-95%, or 90-95%. As a non-limiting example, a subject may have a 50% decrease of HTT protein. As a non-limiting example, a subject may have a decrease of 70% of HTT protein and a decrease of 10% of wild type HTT protein. As a non-limiting example, the decrease of HTT in the medium spiny neurons of the putamen may be about 40%. As a non-limiting example, the decrease of HTT in the putamen and cortex may be about 40%. As a non-limiting example, the decrease of HTT in the medium spiny neurons of the putamen may be between 40%-70%. As a non-limiting example, the decrease of HTT in the putamen and cortex may be between 40%-70%.

[0792] In one embodiment, the AAV particles may be used to decrease wild type HTT protein in a subject. The decrease may independently be 5%, 10%, 15%, 20%, 25%, 30%, 35%, 40%, 45%, 50%, 55%, 60%, 65%, 70%, 75%, 80%, 85%, 90%, 95%, or more than 95%, 5-15%, 5-20%, 5-25%, 5-30%, 5-35%, 5-40%, 5-45%, 5-50, 5-55%, 5-60%, 5-65%, 5-70%, 5-75%, 5-80%, 5-85%, 5-90%, 5-95%, 10-20%, 10-25%, 10-30%, 10-35%, 10-40%, 10-45%, 10-50%, 10-55%, 10-60%, 10-65%, 10-70%, 10-75%, 10-80%, 10-85%, 10-90%, 10-95%, 15-25%, 15-30%, 15-35%, 15-40%, 15-45%, 15-50%, 15-55%, 15-60%, 15-65%, 15-70%, 15-75%, 15-80%, 15-85%, 15-90%, 15-95%, 20-30%, 20-35%, 20-40%, 2045%, 20-50%, 20-55%, 20-60%, 20-65%, 20-70%, 20-75%, 20-80%, 20-85%, 20-90%, 20-95%, 25-35%, 25-40%, 25-45%, 25-50%, 25-55%, 25-60%, 25-65%, 25-70%, 25-75%, 25-80%, 25-85%, 25-90%, 25-95%, 30-40%, 30-45%, 30-50%, 30-55%, 30-60%, 30-65%, 30-70%, 30-75%, 30-80%, 30-85%, 30-90%, 30-95%, 35-45%, 35-50%, 35-55%, 35-60%, 35-65%, 35-70%, 35-75%, 35-80%, 35-85%, 35-90%, 35-95%, 40-50%, 40-55%, 40-60%, 40-65%, 40-70%, 40-75%, 40-80%, 40-85%, 40-90%, 40-95%, 45-55%, 45-60%, 45-65%, 45-70%, 45-75%, 45-80%, 45-85%, 45-90%, 45-95%, 50-60%, 50-65%, 50-70%, 50-75%, 50-80%, 50-85%, 50-90%, 50-95%, 55-65%, 55-70%, 55-75%, 55-80%, 55-85%, 55-90%, 55-95%, 60-70%, 60-75%, 60-80%, 60-85%, 60-90%, 60-95%, 65-75%, 65-80%, 65-85%, 65-90%, 65-95%, 70-80%, 70-85%, 70-90%, 70-95%, 75-85%, 75-90%, 75-95%, 80-90%, 80-95%, or 90-95%. As a non-limiting example, a subject may have a 50% decrease of wild type HTT protein. As a non-limiting example, the decrease of wild type HTT in the medium spiny neurons of the putamen may be about 40%. As a non-limiting example, the decrease of wild type HTT in the putamen and cortex may be about 40%. As a non-limiting example, the decrease of wild type HTT in the medium spiny neurons of the putamen may be between 40%-70%. As a non-limiting example, the decrease of wild type HTT in the putamen and cortex may be between 40/6-70%.

[0793] In one embodiment, the AAV particles may be used to decrease mutant HTT protein in a subject. The decrease may independently be 5%, 10%, 15%, 20%, 25%, 30%, 35%, 40%, 45%, 50%, 55%, 60%, 65%, 70%, 75%, 80%, 85%, 90%, 95%, or more than 95%, 5-15%, 5-20%, 5-25%, 5-30%, 5-35%, 5-40%, 5-45%, 5-50%, 5-55%, 5-60%, 5-65%, 5-70%, 5-75%, 5-80%, 5-85%, 5-90%, 5-95%, 10-20%, 10-25%, 10-30%, 10-35%, 1040%, 1045%, 10-50%, 10-55%, 10-60%, 10-65%, 10-70%, 10-75%, 10-80%, 10-85%, 10-90%, 10-95%, 15-25%, 15-30%, 15-35%, 1540%, 1545%, 15-50%, 15-55%, 15-60%, 15-65%, 15-70%, 15-75%, 15-80%, 15-85%, 15-90%, 15-95%, 20-30%, 20-35%, 20-40%, 20-45%, 20-50%, 20-55%, 20-60%, 20-65%, 20-70%, 20-75%, 20-80%, 20-85%, 20-90%, 20-95%, 25-35%, 25-40%, 25-45%, 25-50%, 25-55%, 25-60%, 25-65%, 25-70%, 25-75%, 25-80%, 25-85%, 25-90%, 25-95%, 30-40%, 30-45%, 30-50%, 30-55%, 30-60%, 30-65%, 30-70%, 30-75%, 30-80%, 30-85%, 30-90%, 30-95%, 35-45%, 35-50%, 35-55%, 35-60%, 35-65%, 35-70%, 35-75%, 35-80%, 35-85%, 35-90%, 35-95%, 40-50%, 40-55%, 40-60%, 40-65%, 40-70%, 40-75%, 40-80%, 40-85%, 40-90%, 40-95%, 45-55%, 45-60%, 45-65%, 45-70%, 45-75%, 45-80%, 45-85%, 45-90%, 45-95%, 50-60%, 50-65%, 50-70%, 50-75%, 50-80%, 50-85%, 50-90%, 50-95%, 55-65%, 55-70%, 55-75%, 55-80%, 55-85%, 55-90%, 55-95%, 60-70%, 60-75%, 60-80%, 60-85%, 60-90%, 60-95%, 65-75%, 65-80%, 65-85%, 65-90%, 65-95%, 70-80%, 70-85%, 70-90%, 70-95%, 75-85%, 75-90%, 75-95%, 80-90%, 80-95%, or 90-95%. As a non-limiting example, a subject may have a 50% decrease of mutant HTT protein. As a non-limiting example, the decrease of mutant HTT in the medium spiny neurons of the putamen may be about 40%. As a non-limiting example, the decrease of mutant HTT in the putamen and cortex may be about 40%. As a non-limiting example, the decrease of mutant HTT in the medium spiny neurons of the putamen may be between 40%-70%. As a non-limiting example, the decrease of mutant HTT in the putamen and cortex may be between 40%-70%.

[0794] In some embodiments, the present invention provides methods for inhibiting/silencing HTT gene expression in a cell. Accordingly, the siRNA duplexes or encoded dsRNA can be used to substantially inhibit HTT gene expression in a cell, in particular in a neuron. In some aspects, the inhibition of HTT gene expression refers to an inhibition by at least about 20%, such as by at least about 30%, 31%, 32%, 33%, 34%, 35%, 36%, 37%, 38%, 39%, 40%, 41%, 42%, 43%, 44%, 45%, 46%, 47%, 48%, 49%, 50%, 51%, 52%, 53%, 54%, 55%, 56%, 57%, 58%, 59%, 60%, 61%, 62%, 63%, 64%, 65%, 66%, 67%, 68%, 69%, 70%, 71%, 72%, 73%, 74%, 75%, 76%, 77%, 78%, 79%, 80%, 85%, 90%, 95% and 100%, or at least 20-30%, 20-40%, 20-50%, 20-60%, 20-70%, 20-80%, 20-90%, 20-95%, 20-100%, 30-40%, 30-50%, 30-60%, 30-70%, 30-80%, 30-90%, 30-95%, 30-100%, 40-50%, 40-60%, 40-70%, 40-80%, 40-90%, 40-95%, 40-100%, 50-60%, 50-70%, 50-80%, 50-90%, 50-95%, 50-100%, 55-60%, 55-70%, 55-80%, 55-90%, 55-95%, 55-100%, 60-70%, 60-80%, 60-90%, 60-95%, 60-100%, 70-80%, 70-90%, 70-95%, 70-100%, 80-90%, 80-95%, 80-100%, 90-95%, 90-100% or 95-100%. Accordingly, the protein product of the targeted gene may be inhibited by at least about 20%, preferably by at least about 30%, 31%, 32%, 33%, 34%, 35%, 36%, 37%, 38%, 39%, 40%, 41%, 42%, 43%, 44%, 45%, 46%, 47%, 48%, 49%, 50%, 51%, 52%, 53%, 54%, 55%, 56%, 57%, 58%, 59%, 60%, 61%, 62%, 63%, 64%, 65%, 66%, 67%, 68%, 69%, 70%, 71%, 72%, 73%, 74%, 75%, 76%, 77%, 78%, 79%, 80%, 85%, 90%, 95% and 100%, or at least 20-30%, 20-40%, 20-50%, 20-60%, 20-70%, 20-80%, 20-90%, 20-95%, 20-100%, 30-40%, 30-50%, 30-60%, 30-70%, 30-80%, 30-90%, 30-95%, 30-100%, 40-50%, 40-60%, 40-70%, 40-80%, 40-90%, 40-95%, 40-100%, 50-60%, 50-70%, 50-80%, 50-90%, 50-95%, 50-100%, 60-70%, 60-80%, 60-90%, 60-95%, 60-100%, 70-80%, 70-90%, 70-95%, 70-100%, 80-90%, 80-95%, 80-100%, 90-95%, 90-100% or 95-100%.

[0795] In some embodiments, the present invention provides methods for inhibiting/silencing HTT gene expression in a cell, in particular in a medium spiny neuron. In some aspects, the inhibition of HTT gene expression refers to an inhibition by at least about 20%, such as by at least about 30%, 31%, 32%, 33%, 34%, 35%, 36%, 37%, 38%, 39%, 40%, 41%, 42%, 43%, 44%, 45%, 46%, 47%, 48%, 49%, 50%, 51%, 52%, 53%, 54%, 55%, 56%, 57%, 58%, 59%, 60%, 61%, 62%, 63%, 64%, 65%, 66%, 67%, 68%, 69%, 70%, 71%, 72%, 73%, 74%, 75%, 76%, 77%, 78%, 79%, 80%, 85%, 90%, 95% and 100%, or at least 20-30%, 20-40%, 20-50%, 20-60%, 20-70%, 20-80%, 20-90%, 20-95%, 20-100%, 30-40%, 30-50%, 30-60%, 30-70%, 30-80%, 30-90%, 30-95%, 30-100%, 40-50%, 40-60%, 40-70%, 40-80%, 40-90%, 40-95%, 40-100%, 50-60%, 50-70%, 50-80%, 50-90%, 50-95%, 50-100%, 55-60%, 55-70%, 55-80%, 55-90%, 55-95%, 55-100%, 60-70%, 60-80%, 60-90%, 60-95%, 60-100%, 70-80%, 70-90%, 70-95%, 70-100%, 80-90%, 80-95%, 80-100%, 90-95%, 90-100% or 95-100%. Accordingly, the protein product of the targeted gene may be inhibited by at least about 20%, preferably by at least about 30%, 31%, 32%, 33%, 34%, 35%, 36%, 37%, 38%, 39%, 40%, 41%, 42%, 43%, 44%, 45%, 46%, 47%, 48%, 49%, 50%, 51%, 52%, 53%, 54%, 55%, 56%, 57%, 58%, 59%, 60%, 61%, 62%, 63%, 64%, 65%, 66%, 67%, 68%, 69%, 70%, 71%, 72%, 73%, 74%, 75%, 76%, 77%, 78%, 79%, 80%, 85%, 90%, 95% and 100%, or at least 20-30%, 20-40%, 20-50%, 20-60%, 20-70%, 20-80%, 20-90%, 20-95%, 20-100%, 30-40%, 30-50%, 30-60%, 30-70%, 30-80%, 30-90%, 30-95%, 30-100%, 40-50%, 40-60%, 40-70%, 40-80%, 40-90%, 40-95%, 40-100%, 50-60%, 50-70%, 50-80%, 50-90%, 50-95%, 50-100%, 55-60%, 55-70%, 55-80%, 55-90%, 55-95%, 55-100%, 60-70%, 60-80%, 60-90%, 60-95%, 60-100%, 70-80%, 70-90%, 70-95%, 70-100%, 80-90%, 80-95%, 80-100%, 90-95%, 90-100% or 95-100%.

[0796] In some embodiments, the present invention provides methods for inhibiting/silencing HTT gene expression in a cell, in particular in an astrocyte. In some aspects, the inhibition of HTT gene expression refers to an inhibition by at least about 20%, such as by at least about 30%, 31%, 32%, 33%, 34%, 35%, 36%, 37%, 38%, 39%, 40%, 41%, 42%, 43%, 44%, 45%, 46%, 47%, 48%, 49%, 50%, 51%, 52%, 53%, 54%, 55%, 56%, 57%, 58%, 59%, 60%, 61%, 62%, 63%, 64%, 65%, 66%, 67%, 68%, 69%, 70%, 71%, 72%, 73%, 74%, 75%, 76%, 77%, 78%, 79%, 80%, 85%, 90%, 95% and 100%, or at least 20-30%, 20-40%, 20-50%, 20-60%, 20-70%, 20-80%, 20-90%, 20-95%, 20-100%, 30-40%, 30-50%, 30-60%, 30-70%, 30-80%, 30-90%, 30-95%, 30-100%, 40-50%, 40-60%, 40-70%, 40-80%, 40-90%, 40-95%, 40-100%, 50-60%, 50-70%, 50-80%, 50-90%, 50-95%, 50-100%, 55-60%, 55-70%, 55-80%, 55-90%, 55-95%, 55-100%, 60-70%, 60-80%, 60-90%, 60-95%, 60-100%, 70-80%, 70-90%, 70-95%, 70-100%, 80-90%, 80-95%, 80-100%, 90-95%, 90-100% or 95-100%. Accordingly, the protein product of the targeted gene may be inhibited by at least about 20%, preferably by at least about 30%, 31%, 32%, 33%, 34%, 35%, 36%, 37%, 38%, 39%, 40%, 41%, 42%, 43%, 44%, 45%, 46%, 47%, 48%, 49%, 50%, 51%, 52%, 53%, 54%, 55%, 56%, 57%, 58%, 59%, 60%, 61%, 62%, 63%, 64%, 650%, 66%, 67%, 68%, 69%, 70%, 71%, 72%, 73%, 74%, 75%, 76%, 77%, 78%, 79%, 80%, 85%, 90%, 95% and 100%, or at least 20-30%, 20-40%, 20-50%, 20-60%, 20-70%, 20-80%, 20-90%, 20-95%, 20-100%, 30-40%, 30-50%, 30-60%, 30-70%, 30-80%, 30-90%, 30-95%, 30-100%, 40-50%, 40-60%, 40-70%, 40-80%, 40-90%, 40-95%, 40-100%, 50-60%, 50-70%, 50-80%, 50-90%, 50-95%, 50-100%, 55-60%, 55-70%, 55-80%, 55-90%, 55-95%, 55-100%, 60-70%, 60-80%, 60-90%, 60-95%, 60-100%, 70-80%, 70-90%, 70-95%, 70-100%, 80-90%, 80-95%, 80-100%, 90-95%, 90-100% or 95-100%.

[0797] In one embodiment, the siRNA duplexes or encoded dsRNA may be used to reduce the expression of HTT protein and/or mRNA in at least one region of the CNS such as, but not limited to the midbrain. The expression of HTT protein and/or mRNA is reduced by at least about 30%, 31%, 32%, 33%, 34%, 35%, 36%, 37%, 38%, 39%, 40%, 41%, 42%, 43%, 44%, 45%, 46%, 47%, 48%, 49%, 50%, 51%, 52%, 53%, 54%, 55%, 56%, 57%, 58%, 59%, 60%, 61%, 62%, 63%, 64%, 65%, 66%, 67%, 68%, 69%, 70%, 71%, 72%, 73%, 74%, 75%, 76%, 77%, 78%, 79%, 80%, 85%, 90%, 95% and 100%, or at least 20-30%, 20-40%, 20-50%, 20-60%, 20-70%, 20-80%, 20-90%, 20-95%, 20-100%, 30-40%, 30-50%, 30-60%, 30-70%, 30-80%, 30-90%, 30-95%, 30-100%, 40-50%, 40-60%, 40-70%, 40-80%, 40-90%, 40-95%, 40-100%, 50-60%, 50-70%, 50-80%, 50-90%, 50-95%, 50-100%, 55-60%, 55-70%, 55-80%, 55-90%, 55-95%, 55-100%, 60-70%, 60-80%, 60-90%, 60-95%, 60-100%, 70-80%, 70-90%, 70-95%, 70-100%, 80-90%, 80-95%, 80-100%, 90-95%, 90-100%, or 95-100% in at least one region of the CNS. As a non-limiting example, the expression of HTT protein and mRNA in the striatum and/or cortex is reduced by 50-90%. As a non-limiting example, the expression of HTT protein and mRNA in the striatum is reduced by 40-50%. As a non-limiting example, the expression of HTT protein and mRNA in the cortex is reduced by 40-50%. As a non-limiting example, the expression of HTT protein and mRNA in the cortex is reduced by 30-70%. As a non-limiting example, the expression of HTT protein and mRNA in the striatum and/or cortex is reduced by 40-70%. As a non-limiting example, the expression of HTT protein and mRNA in the striatum and/or cortex is reduced by 40-50%. As a non-limiting example, the expression of HTT protein and mRNA in the striatum and/or cortex is reduced by 50-70%. As a non-limiting example, the expression of HTT protein and mRNA in the striatum and/or cortex is reduced by 50-60%. As a non-limiting example, the expression of HTT protein and mRNA in the striatum and/or cortex is reduced by 50%. As a non-limiting example, the expression of HTT protein and mRNA in the striatum and/or cortex is reduced by 51%. As a non-limiting example, the expression of HTT protein and mRNA in the striatum and/or cortex is reduced by 52%. As a non-limiting example, the expression of HTT protein and mRNA in the striatum and/or cortex is reduced by 53%. As a non-limiting example, the expression of HTT protein and mRNA in the striatum and/or cortex is reduced by 54%. As a non-limiting example, the expression of HTT protein and mRNA in the striatum and/or cortex is reduced by 55%. As a non-limiting example, the expression of HTT protein and mRNA in the striatum and/or cortex is reduced by 56%. As a non-limiting example, the expression of HTT protein and mRNA in the striatum and/or cortex is reduced by 57%. As a non-limiting example, the expression of HTT protein and mRNA in the striatum and/or cortex is reduced by 58%. As a non-limiting example, the expression of HTT protein and mRNA in the striatum and/or cortex is reduced by 59%. As a non-limiting example, the expression of HTT protein and mRNA in the striatum and/or cortex is reduced by 60%.

[0798] In one embodiment, the siRNA duplexes or encoded dsRNA may be used to reduce the expression of HTT protein and/or mRNA in at least one region of the CNS such as, but not limited to the forebrain. The expression of HTT protein and/or mRNA is reduced by at least about 30%, 31%, 32%, 33%, 34%, 35%, 36%, 37%, 38%, 39%, 40%, 41%, 42%, 43%, 44%, 45%, 46%, 47%, 48%, 49%, 50%, 51%, 52%, 53%, 54%, 55%, 56%, 57%, 58%, 59%, 60%, 61%, 62%, 63%, 64%, 65%, 66%, 67%, 68%, 69%, 70%, 71%, 72%, 73%, 74%, 75%, 76%, 77%, 78%, 79%, 80%, 85%, 90%, 95% and 100%, or at least 20-30%, 20-40%, 20-50%, 20-60%, 20-70%, 20-80%, 20-90%, 20-95%, 20-100%, 30-40%, 30-50%, 30-60%, 30-70%, 30-80%, 30-90%, 30-95%, 30-100%, 40-50%, 40-60%, 40-70%, 40-80%, 40-90%, 40-95%, 40-100%, 50-60%, 50-70%, 50-80%, 50-90%, 50-95%, 50-100%, 55-60%, 55-70%, 55-80%, 55-90%, 55-95%, 55-100%, 60-70%, 60-80%, 60-90%, 60-95%, 60-100%, 70-80%, 70-90%, 70-95%, 70-100%, 80-90%, 80-95%, 80-100%, 90-95%, 90-100% or 95-100% in at least one region of the CNS. As a non-limiting example, the expression of HTT protein and mRNA in the putamen is reduced by 50-90%. As a non-limiting example, the expression of HTT protein and mRNA in the striatum is reduced by 40-50%. As a non-limiting example, the expression of HTT protein and mRNA in the cortex is reduced by 40-50%. As a non-limiting example, the expression of HTT protein and mRNA in the cortex is reduced by 30-70%. As a non-limiting example, the expression of HTT protein and mRNA in the striatum and/or cortex is reduced by 40-70%. As a non-limiting example, the expression of HTT protein and mRNA in the striatum and/or cortex is reduced by 40-50%. As a non-limiting example, the expression of HTT protein and mRNA in the striatum and/or cortex is reduced by 50-70%. As a non-limiting example, the expression of HTT protein and mRNA in the striatum and/or cortex is reduced by 50-60%. As a non-limiting example, the expression of HTT protein and mRNA in the striatum and/or cortex is reduced by 50%. As a non-limiting example, the expression of HTT protein and mRNA in the striatum and/or cortex is reduced by 51%. As a non-limiting example, the expression of HTT protein and mRNA in the striatum and/or cortex is reduced by 52%. As a non-limiting example, the expression of HTT protein and mRNA in the striatum and/or cortex is reduced by 53%. As a non-limiting example, the expression of HTT protein and mRNA in the striatum and/or cortex is reduced by 54%. As a non-limiting example, the expression of HTT protein and mRNA in the striatum and/or cortex is reduced by 55%. As a non-limiting example, the expression of HTT protein and mRNA in the striatum and/or cortex is reduced by 56%. As a non-limiting example, the expression of HTT protein and mRNA in the striatum and/or cortex is reduced by 57%. As a non-limiting example, the expression of HTT protein and mRNA in the striatum and/or cortex is reduced by 58%. As a non-limiting example, the expression of HTT protein and mRNA in the striatum and/or cortex is reduced by 59%. As a non-limiting example, the expression of HTT protein and mRNA in the striatum and/or cortex is reduced by 60%.

[0799] In one embodiment, the siRNA duplexes or encoded dsRNA may be used to reduce the expression of HTT protein and/or mRNA in the striatum. The expression of HTT protein and/or mRNA is reduced by at least about 30%, 31%, 32%, 33%, 34%, 35%, 36%, 37%, 38%, 39%, 40%, 41%, 42%, 43%, 44%, 45%, 46%, 47%, 48%, 49%, 50%, 51%, 52%, 53%, 54%, 55%, 56%, 57%, 58%, 59%, 60%, 61%, 62%, 63%, 64%, 65%, 66%, 67%, 68%, 69%, 70%, 71%, 72%, 73%, 74%, 75%, 76%, 77%, 78%, 79%, 80%, 85%, 90%, 95% and 100%, or at least 20-30%, 20-40%, 20-50%, 20-60%, 20-70%, 20-80%, 20-90%, 20-95%, 20-100%, 30-40%, 30-50%, 30-60%, 30-70%, 30-80%, 30-90%, 30-95%, 30-100%, 40-50%, 40-60%, 40-70%, 40-80%, 40-90%, 40-95%, 40-100%, 50-60%, 50-70%, 50-80%, 50-90%, 50-95%, 50-100%, 60-70%, 60-80%, 60-90%, 60-95%, 60-100%, 70-80%, 70-90%, 70-95%, 70-100%, 80-90%, 80-95%, 80-100%, 90-95%, 90-100% or 95-100%. As a non-limiting example, the expression of HTT protein and mRNA in the striatum is reduced by 40-50%. As a non-limiting example, the expression of HTT protein and mRNA in the striatum is reduced by 30-70%. As a non-limiting example, the expression of HTT protein and mRNA in the striatum is reduced by at least 30%. As a non-limiting example, the expression of HTT protein and mRNA in the striatum is reduced by 40-70%. As a non-limiting example, the expression of HTT protein and mRNA in the striatum is reduced by 40-50%. As a non-limiting example, the expression of HTT protein and mRNA in the striatum is reduced by 50-70%. As a non-limiting example, the expression of HTT protein and mRNA in the striatum is reduced by 50-60%. As a non-limiting example, the expression of HTT protein and mRNA in the striatum is reduced by 50%. As a non-limiting example, the expression of HTT protein and mRNA in the striatum is reduced by 51%. As a non-limiting example, the expression of HTT protein and mRNA in the striatum is reduced by 52%. As a non-limiting example, the expression of HTT protein and mRNA in the striatum is reduced by 53%. As a non-limiting example, the expression of HTT protein and mRNA in the striatum is reduced by 54%. As a non-limiting example, the expression of HTT protein and mRNA in the striatum is reduced by 55%. As a non-limiting example, the expression of HTT protein and mRNA in the striatum is reduced by 56%. As a non-limiting example, the expression of HTT protein and mRNA in the striatum is reduced by 57%. As a non-limiting example, the expression of HTT protein and mRNA in the striatum is reduced by 58%. As a non-limiting example, the expression of HTT protein and mRNA in the striatum is reduced by 59%. As a non-limiting example, the expression of HTT protein and mRNA in the striatum is reduced by 60%.

[0800] In some embodiments, the AAV particles comprising modulatory polynucleotides encoding the siRNA molecules of the present invention may be used to suppress HTT protein in neurons and/or astrocytes of the striatum and/or the cortex. As a non-limiting example, the suppression of HTT protein is in medium spiny neurons of the striatum and/or neurons of the cortex.

[0801] In some embodiments, the AAV particles comprising modulatory polynucleotides encoding the siRNA molecules of the present invention may be used to suppress HTT protein in neurons and/or astrocytes of the striatum and/or the cortex and reduce associated neuronal toxicity. The suppression of HTT protein in the neurons and/or astrocytes of the striatum and/or the cortex may be, independently, suppressed by 5%, 10%, 15%, 20%, 25%, 30%, 35%, 40%, 45%, 50%, 55%, 60%, 65%, 70%, 75%, 80%, 85%, 90%, 95%, or more than 95%, 5-15%, 5-20%, 5-25%, 5-30%, 5-35%, 5-40%, 5-45%, 5-50%, 5-55%, 5-60%, 5-65%, 5-70%, 5-75%, 5-80%, 5-85%, 5-90%, 5-95%, 10-20%, 10-25%, 10-30%, 10-35%, 10-40%, 10-45%, 10-50%, 10-55%, 10-60%, 10-65%, 10-70%, 10-75%, 10-80%, 10-85%, 10-90%, 10-95%, 15-25%, 15-30%, 15-35%, 15-40%, 15-45%, 15-50%, 15-55%, 15-60%, 15-65%, 15-70%, 15-75%, 15-80%, 15-85%, 15-90%, 15-95%, 20-30%, 20-35%, 20-40%, 20-45%, 20-50%, 20-55%, 20-60%, 20-65%, 20-70%, 20-75%, 20-80%, 20-85%, 20-90%, 20-95%, 25-35%, 25-40%, 25-45%, 25-50%, 25-55%, 25-60%, 25-65%, 25-70%, 25-75%, 25-80%, 25-85%, 25-90%, 25-95%, 30-40%, 30-45%, 30-50%, 30-55%, 30-60%, 30-65%, 30-70%, 30-75%, 30-80%, 30-85%, 30-90%, 30-95%, 35-45%, 35-50%, 35-55%, 35-60%, 35-65%, 35-70%, 35-75%, 35-80%, 35-85%, 35-90%, 35-95%, 40-50%, 40-55%, 40-60%, 40-65%, 40-70%, 40-75%, 40-80%, 40-85%, 40-90%, 40-95%, 45-55%, 45-60%, 45-65%, 45-70%, 45-75%, 45-80%, 45-85%, 45-90%, 45-95%, 50-60%, 50-65%, 50-70%, 50-75%, 50-80%, 50-85%, 50-90%, 50-95%, 55-65%, 55-70%, 55-75%, 55-80%, 55-85%, 55-90%, 55-95%, 60-70%, 60-75%, 60-80%, 60-85%, 60-90%, 60-95%, 65-75%, 65-80%, 65-85%, 65-90%, 65-95%, 70-80%, 70-85%, 70-90%, 70-95%, 75-85%, 75-90%, 75-95%, 80-90%, 80-95%, or 90-95%. The reduction of associated neuronal toxicity may be 5%, 10%, 15%, 20%, 25%, 30%, 35%, 40%, 45%, 50%, 55%, 60%, 65%, 70%, 75%, 80%, 85%, 90%, 95%, or more than 95%, 5-15%, 5-20%, 5-25%, 5-30%, 5-35%, 5-40%, 5-45%, 5-50%, 5-55%, 5-60%, 5-65%, 5-70%, 5-75%, 5-80%, 5-85%, 5-90%, 5-95%, 10-20%, 10-25%, 10-30%, 10-35%, 10-40%, 10-45%, 10-50%, 10-55%, 10-60%, 10-65%, 10-70%, 10-75%, 10-80%, 10-85%, 10-90%, 10-95%, 15-25%, 15-30%, 15-35%, 15-40%, 15-45%, 15-50%, 15-55%, 15-60%, 15-65%, 15-70%, 15-75%, 15-80%, 15-85%, 15-90%, 15-95%, 20-30%, 20-35%, 20-40%, 20-45%, 20-50%, 20-55%, 20-60%, 20-65%, 20-70%, 20-75%, 20-80%, 20-85%, 20-90%, 20-95%, 25-35%, 25-40%, 25-45%, 25-50%, 25-55%, 25-60%, 25-65%, 25-70%, 25-75%, 25-80%, 25-85%, 25-900%, 25-95%, 30-40%, 30-45%, 30-50%, 30-55%, 30-60%, 30-65%, 30-70%, 30-75%, 30-80%, 30-85%, 30-90%, 30-95%, 35-45%, 35-50%, 35-55%, 35-60%, 35-65%, 35-70%, 35-75%, 35-80%, 35-85%, 35-90%, 35-95%, 40-50%, 40-55%, 40-60%, 40-65%, 40-70%, 40-75%, 40-80%, 40-85%, 40-90%, 40-95%, 45-55%, 45-60%, 45-65%, 45-70%, 45-75%, 45-80%, 45-85%, 45-90%, 45-95%, 50-60%, 50-65%, 50-70%, 50-75%, 50-80%, 50-85%, 50-90%, 50-95%, 55-65%, 55-70%, 55-75%, 55-80%, 55-85%, 55-90%, 55-95%, 60-70%, 60-75%, 60-80%, 60-85%, 60-90%, 60-95%, 65-75%, 65-80%, 65-85%, 65-90%, 65-95%, 70-80%, 70-85%, 70-90%, 70-95%, 75-85%, 75-90%, 75-95%, 80-90%, 80-95%, or 90-95%.

[0802] In one embodiment, the siRNA duplexes or encoded dsRNA may be used to reduce the expression of HTT protein and/or mRNA in the cortex. The expression of HTT protein and/or mRNA is reduced by at least about 30%, 31%, 32%, 33%, 34%, 35%, 36%, 37%, 38%, 39%, 40%, 41%, 42%, 43%, 44%, 45%, 46%, 47%, 48%, 49%, 50%, 51%, 52%, 53%, 54%, 55%, 56%, 57%, 58%, 59%, 60%, 61%, 62%, 63%, 64%, 65%, 66%, 67%, 68%, 69%, 70%, 71%, 72%, 73%, 74%, 75%, 76%, 77%, 78%, 79%, 80%, 85%, 90%, 95% and 100%, or at least 20-30%, 20-40%, 20-50%, 20-60%, 20-70%, 20-80%, 20-90%, 20-95%, 20-100%, 30-40%, 30-50%, 30-60%, 30-70%, 30-80%, 30-90%, 30-95%, 30-100%, 40-50%, 40-60%, 40-70%, 40-80%, 40-90%, 40-95%, 40-100%, 50-60%, 50-70%, 50-80%, 50-90%, 50-95%, 50-100%, 60-70%, 60-80%, 60-90%, 60-95%, 60-100%, 70-80%, 70-90%, 70-95%, 70-100%, 80-90%, 80-95%, 80-100%, 90-95%, 90-100% or 95-100%. As a non-limiting example, the expression of HTT protein and mRNA in the cortex is reduced by 40-50%. As a non-limiting example, the expression of HTT protein and mRNA in the cortex is reduced by 30-70%. As a non-limiting example, the expression of HTT protein and mRNA in the cortex is reduced by at least 30%. As a non-limiting example, the expression of HTT protein and mRNA in the cortex is reduced by 40-70%. As a non-limiting example, the expression of HTT protein and mRNA in the cortex is reduced by 40-50%. As a non-limiting example, the expression of HTT protein and mRNA in the cortex is reduced by 50-70%. As a non-limiting example, the expression of HTT protein and mRNA in the cortex is reduced by 50-60%. As a non-limiting example, the expression of HTT protein and mRNA in the cortex is reduced by 50%. As a non-limiting example, the expression of HTT protein and mRNA in the cortex is reduced by 51%. As a non-limiting example, the expression of HTT protein and mRNA in the cortex is reduced by 52%. As a non-limiting example, the expression of HTT protein and mRNA in the cortex is reduced by 53%. As a non-limiting example, the expression of HTT protein and mRNA in the cortex is reduced by 54%. As a non-limiting example, the expression of HTT protein and mRNA in the cortex is reduced by 55%. As a non-limiting example, the expression of HTT protein and mRNA in the cortex is reduced by 56%. As a non-limiting example, the expression of HTT protein and mRNA in the cortex is reduced by 57%. As a non-limiting example, the expression of HTT protein and mRNA in the cortex is reduced by 58%. As a non-limiting example, the expression of HTT protein and mRNA in the cortex is reduced by 59%. As a non-limiting example, the expression of HTT protein and mRNA in the cortex is reduced by 60%.

[0803] In one embodiment, the siRNA duplexes or encoded dsRNA may be used to reduce the expression of HTT protein and/or mRNA in the motor cortex. The expression of HTT protein and/or mRNA is reduced by at least about 30%, 31%, 32%, 33%, 34%, 35%, 36%, 37%, 38%, 39%, 40%, 41%, 42%, 43%, 44%, 45%, 46%, 47%, 48%, 49%, 50%, 51%, 52%, 53%, 54%, 55%, 56%, 57%, 58%, 59%, 60%, 61%, 62%, 63%, 64%, 65%, 66%, 67%, 68%, 69%, 70%, 71%, 72%, 73%, 74%, 75%, 76%, 77%, 78%, 79%, 80%, 85%, 90%, 95% and 100%, or at least 20-30%, 20-40%, 20-50%, 20-60%, 20-70%, 20-80%, 20-90%, 20-95%, 20-100%, 30-40%, 30-50%, 30-60%, 30-70%, 30-80%, 30-90%, 30-95%, 30-100%, 40-50%, 40-60%, 40-700%, 40-80%, 40-90%, 40-95%, 40-100%, 50-60%, 50-70%, 50-80%, 50-90%, 50-95%, 50-100%, 60-70%, 60-80%, 60-90%, 60-95%, 60-100%, 70-80%, 70-90%, 70-95%, 70-100%, 80-90%, 80-95%, 80-100%, 90-95%, 90-100% or 95-100%. As a non-limiting example, the expression of HTT protein and mRNA in the motor cortex is reduced by 40-50%. As a non-limiting example, the expression of HTT protein and mRNA in the motor cortex is reduced by 30-70%. As a non-limiting example, the expression of HTT protein and mRNA in the motor cortex is reduced by at least 30%. As a non-limiting example, the expression of HTT protein and mRNA in the motor cortex is reduced by 40-70%. As a non-limiting example, the expression of HTT protein and mRNA in the motor cortex is reduced by 40-50%. As a non-limiting example, the expression of HTT protein and mRNA in the motor cortex is reduced by 50-70%. As a non-limiting example, the expression of HTT protein and mRNA in the motor cortex is reduced by 50-60%. As a non-limiting example, the expression of HTT protein and mRNA in the motor cortex is reduced by 50%. As a non-limiting example, the expression of HTT protein and mRNA in the motor cortex is reduced by 51%. As a non-limiting example, the expression of HTT protein and mRNA in the motor cortex is reduced by 52%. As a non-limiting example, the expression of HTT protein and mRNA in the motor cortex is reduced by 53%. As a non-limiting example, the expression of HTT protein and mRNA in the motor cortex is reduced by 54%. As a non-limiting example, the expression of HTT protein and mRNA in the motor cortex is reduced by 55%. As a non-limiting example, the expression of HTT protein and mRNA in the motor cortex is reduced by 56%. As a non-limiting example, the expression of HTT protein and mRNA in the motor cortex is reduced by 57%. As a non-limiting example, the expression of HTT protein and mRNA in the motor cortex is reduced by 58%. As a non-limiting example, the expression of HTT protein and mRNA in the motor cortex is reduced by 59%. As a non-limiting example, the expression of HTT protein and mRNA in the motor cortex is reduced by 60%.

[0804] In one embodiment, the siRNA duplexes or encoded dsRNA may be used to reduce the expression of HTT protein and/or mRNA in the somatosensory cortex. The expression of HTT protein and/or mRNA is reduced by at least about 30%, 31%, 32%, 33%, 34%, 35%, 36%, 37%, 38%, 39%, 40%, 41%, 42%, 43%, 44%, 45%, 46%, 47%, 48%, 49%, 50%, 51%, 52%, 53%, 54%, 55%, 56%, 57%, 58%, 59%, 60%, 61%, 62%, 63%, 64%, 65%, 66%, 67%, 68%, 69%, 70%, 71%, 72%, 73%, 74%, 75%, 76%, 77%, 78%, 79%, 80%, 85%, 90%, 95% and 100%, or at least 20-30%, 20-40%, 20-50%, 20-60%, 20-70%, 20-80%, 20-90%, 20-95%, 20-100%, 30-40%, 30-50%, 30-60%, 30-70%, 30-80%, 30-90%, 30-95%, 30-100%, 40-50%, 40-60%, 40-70%, 40-80%, 40-90%, 40-95%, 40-100%, 50-60%, 50-70%, 50-80%, 50-90%, 50-95%, 50-100%, 60-70%, 60-80%, 60-90%, 60-95%, 60-100%, 70-80%, 70-90%, 70-95%, 70-100%, 80-90%, 80-95%, 80-100%, 90-95%, 90-100%, or 95-100%. As a non-limiting example, the expression of HTT protein and mRNA in the somatosensory cortex is reduced by 40-50%. As a non-limiting example, the expression of HTT protein and mRNA in the somatosensory cortex is reduced by 30-70%. As a non-limiting example, the expression of HTT protein and mRNA in the somatosensory cortex is reduced by at least 30%. As a non-limiting example, the expression of HTT protein and mRNA in the somatosensory cortex is reduced by 40-70%. As a non-limiting example, the expression of HTT protein and mRNA in the somatosensory cortex is reduced by 40-50%. As a non-limiting example, the expression of HTT protein and mRNA in the somatosensory cortex is reduced by 50-70%. As a non-limiting example, the expression of HTT protein and mRNA in the somatosensory cortex is reduced by 50-60%. As a non-limiting example, the expression of HTT protein and mRNA in the somatosensory cortex is reduced by 50%. As a non-limiting example, the expression of HTT protein and mRNA in the somatosensory cortex is reduced by 51%. As a non-limiting example, the expression of HTT protein and mRNA in the somatosensory cortex is reduced by 52%. As a non-limiting example, the expression of HTT protein and mRNA in the somatosensory cortex is reduced by 53%. As a non-limiting example, the expression of HTT protein and mRNA in the somatosensory cortex is reduced by 54%. As a non-limiting example, the expression of HTT protein and mRNA in the somatosensory cortex is reduced by 55%. As a non-limiting example, the expression of HTT protein and mRNA in the somatosensory cortex is reduced by 56%. As a non-limiting example, the expression of HTT protein and mRNA in the somatosensory cortex is reduced by 57%. As a non-limiting example, the expression of HTT protein and mRNA in the somatosensory cortex is reduced by 58%. As a non-limiting example, the expression of HTT protein and mRNA in the somatosensory cortex is reduced by 59%. As a non-limiting example, the expression of HTT protein and mRNA in the somatosensory cortex is reduced by 60%.

[0805] In one embodiment, the siRNA duplexes or encoded dsRNA may be used to reduce the expression of HTT protein and/or mRNA in the temporal cortex. The expression of HTT protein and/or mRNA is reduced by at least about 30%, 31%, 32%, 33%, 34%, 35%, 36%, 37%, 38%, 39%, 40%, 41%, 42%, 43%, 44%, 45%, 46%, 47%, 48%, 49%, 50%, 51%, 52%, 53%, 54%, 55%, 56%, 57%, 58%, 59%, 60%, 61%, 62%, 63%, 64%, 65%, 66%, 67%, 68%, 69%, 70%, 71%, 72%, 73%, 74%, 75%, 76%, 77%, 78%, 79%, 80%, 85%, 90%, 95% and 100%, or at least 20-30%, 20-40%, 20-50%, 20-60%, 20-70%, 20-80%, 20-90%, 20-95%, 20-100%, 30-40%, 30-50%, 30-60%, 30-70%, 30-80%, 30-90%, 30-95%, 30-100%, 40-50%, 40-60%, 40-70%, 40-80%, 40-90%, 40-95%, 40-100%, 50-60%, 50-70%, 50-80%, 50-90%, 50-95%, 50-100%, 60-70%, 60-80%, 60-90%, 60-95%, 60-100%, 70-80%, 70-90%, 70-95%, 70-100%, 80-90%, 80-95%, 80-100%, 90-95%, 90-100% or 95-100%. As a non-limiting example, the expression of HTT protein and mRNA in the temporal cortex is reduced by 40-50%. As a non-limiting example, the expression of HTT protein and mRNA in the temporal cortex is reduced by 30-70%. As a non-limiting example, the expression of HTT protein and mRNA in the temporal cortex is reduced by at least 30%. As a non-limiting example, the expression of HTT protein and mRNA in the temporal cortex is reduced by 40-70%. As a non-limiting example, the expression of HTT protein and mRNA in the temporal cortex is reduced by 40-50%. As a non-limiting example, the expression of HTT protein and mRNA in the temporal cortex is reduced by 50-70%. As a non-limiting example, the expression of HTT protein and mRNA in the temporal cortex is reduced by 50-60%. As a non-limiting example, the expression of HTT protein and mRNA in the temporal cortex is reduced by 50%. As a non-limiting example, the expression of HTT protein and mRNA in the temporal cortex is reduced by 51%. As a non-limiting example, the expression of HTT protein and mRNA in the temporal cortex is reduced by 52%. As a non-limiting example, the expression of HTT protein and mRNA in the temporal cortex is reduced by 53%. As a non-limiting example, the expression of HTT protein and mRNA in the temporal cortex is reduced by 54%. As a non-limiting example, the expression of HTT protein and mRNA in the temporal cortex is reduced by 55%. As a non-limiting example, the expression of HTT protein and mRNA in the temporal cortex is reduced by 56%. As a non-limiting example, the expression of HTT protein and mRNA in the temporal cortex is reduced by 57%. As a non-limiting example, the expression of HTT protein and mRNA in the temporal cortex is reduced by 58%. As a non-limiting example, the expression of HTT protein and mRNA in the temporal cortex is reduced by 59%. As a non-limiting example, the expression of HTT protein and mRNA in the temporal cortex is reduced by 60%.

[0806] In one embodiment, the siRNA duplexes or encoded dsRNA may be used to reduce the expression of HTT protein and/or mRNA in the putamen. The expression of HTT protein and/or mRNA is reduced by at least about 30%, 31%, 32%, 33%, 34%, 35%, 36%, 37%, 38%, 39%, 40%, 41%, 42%, 43%, 44%, 45%, 46%, 47%, 48%, 49%, 50%, 51%, 52%, 53%, 54%, 55%, 56%, 57%, 58%, 59%, 60%, 61%, 62%, 63%, 64%, 65%, 66%, 67%, 68%, 69%, 70%, 71%, 72%, 73%, 74%, 75%, 76%, 77%, 78%, 79%, 80%, 85%, 90%, 95% and 100%, or at least 20-30%, 20-40%, 20-50%, 20-60%, 20-70%, 20-80%, 20-90%, 20-95%, 20-100%, 30-40%, 30-50%, 30-60%, 30-70%, 30-80%, 30-90%, 30-95%, 30-100%, 40-50%, 40-60%, 40-70%, 40-80%, 40-90%, 40-95%, 40-100%, 50-60%, 50-70%, 50-80%, 50-90%, 50-95%, 50-100%, 55-60%, 55-70%, 55-80%, 55-90%, 55-95%, 55-100%, 60-70%, 60-80%, 60-90%, 60-95%, 60-100%, 70-80%, 70-90%, 70-95%, 70-100%, 80-90%, 80-95%, 80-100%, 90-95%, 90-100% or 95-100% in at least one region of the CNS. As a non-limiting example, the expression of HTT protein and mRNA in the putamen is reduced by 40-70%. As a non-limiting example, the expression of HTT protein and mRNA in the putamen is reduced by 40-50%. As a non-limiting example, the expression of HTT protein and mRNA in the putamen is reduced by 50-70%. As a non-limiting example, the expression of HTT protein and mRNA in the putamen is reduced by 50-60%. As a non-limiting example, the expression of HTT protein and mRNA in the putamen is reduced by 50%. As a non-limiting example, the expression of HTT protein and mRNA in the putamen is reduced by 51%. As a non-limiting example, the expression of HTT protein and mRNA in the putamen is reduced by 52%. As a non-limiting example, the expression of HTT protein and mRNA in the putamen is reduced by 53%. As a non-limiting example, the expression of HTT protein and mRNA in the putamen is reduced by 54%. As a non-limiting example, the expression of HTT protein and mRNA in the putamen is reduced by 55%. As a non-limiting example, the expression of HTT protein and mRNA in the putamen is reduced by 56%. As a non-limiting example, the expression of HTT protein and mRNA in the putamen is reduced by 57%. As a non-limiting example, the expression of HTT protein and mRNA in the putamen is reduced by 58%. As a non-limiting example, the expression of HTT protein and mRNA in the putamen is reduced by 59%. As a non-limiting example, the expression of HTT protein and mRNA in the putamen is reduced by 60%.

### Solo and Combination Therapy

[0807] In some embodiments, the present composition is administered as a solo therapeutic or combination therapeutics for the treatment of HD.

[0808] In some embodiments, the pharmaceutical composition of the present invention is used as a solo therapy. In other embodiments, the pharmaceutical composition of the present invention is used in combination therapy. The combination therapy may be in combination with one or more neuroprotective agents such as small molecule compounds, growth factors and hormones which have been tested for their neuroprotective effect on neuron degeneration.

[0809] The AAV particles encoding siRNA duplexes targeting the HTT gene may be used in combination with one or more other therapeutic agents. By “in combination with,” it is not intended to imply that the agents must be administered at the same time and/or formulated for delivery together, although these methods of delivery are within the scope of the present disclosure. Compositions can be administered concurrently with, prior to, or subsequent to, one or more other desired therapeutics or medical procedures. In general, each agent will be administered at a dose and/or on a time schedule determined for that agent.

[0810] Therapeutic agents that may be used in combination with the AAV particles encoding the nucleic acid sequence for the siRNA molecules of the present invention can be small molecule compounds which are antioxidants, anti-inflammatory agents, anti-apoptosis agents, calcium regulators, antiglutamatergic agents, structural protein inhibitors, compounds involved in muscle function, and compounds involved in metal ion regulation.

[0811] Compounds tested for treating HD which may be used in combination with the vectors described herein include, but are not limited to, dopamine-depleting agents (e.g., tetrabenazine for chorea), benzodiazepines (e.g., clonazepam for myoclonus, chorea, dystonia, rigidity, and/or spasticity), anticonvulsants (e.g., sodium valproate and levetiracetam for myoclonus), amino acid precursors of dopamine (e.g., levodopa for rigidity which is particularly associate with juvenile HD or young adult-onset parkinsonian phenotype), skeletal muscle relaxants (e.g., baclofen, tizanidine for rigidity and/or spasticity), inhibitors for acetycholine release at the neuromuscular junction to cause muscle paralysis (e.g., botulinum toxin for bruxism and/or dystonia), atypical neuroleptics (e.g., olanzapine and quetiapine for psychosis and/or irritability, risperidone, sulpiride and haloperidol for psychosis, chorea and/or irritability, clozapine for treatment-resistant psychosis, aripiprazole for psychosis with prominent negative symptoms), agents to increase ATP/cellular energetics (e.g., creatine), selective serotonin reuptake inhibitors (SSRIs) (e.g., citalopram, fluoxetine, paroxetine, sertraline, mirtazapine, venlafaxine for depression, anxiety, obsessive compulsive behavior and/or irritability), hypnotics (e.g., xopiclone and/or zolpidem for altered sleep-wake cycle), anticonvulsants (e.g., sodium valproate and carbamazepine for mania or hypomania) and mood stabilizers (e.g., lithium for mania or hypomania).

[0812] Neurotrophic factors may be used in combination therapy with the AAV particles encoding the nucleic acid sequence for the siRNA molecules of the present invention for treating HD. Generally, a neurotrophic factor is defined as a substance that promotes survival, growth, differentiation, proliferation and/or maturation of a neuron, or stimulates increased activity of a neuron. In some embodiments, the present methods further comprise delivery of one or more trophic factors into the subject in need of treatment. Trophic factors may include, but are not limited to, IGF-I, GDNF, BDNF, CTNF, VEGF, Colivelin, Xaliproden, Thyrotrophin-releasing hormone and ADNF, and variants thereof.

[0813] In one aspect, the AAV particles comprising modulatory polynucleotides encoding the siRNA duplex targeting the HTT gene may be co-administered with AAV vectors expressing neurotrophic factors such as AAV-IGF-I (See e.g., Vincent et al., Neuromolecular medicine, 2004, 6, 79-85; the content of which is incorporated herein by reference in its entirety) and AAV-GDNF (See e.g., Wang et al., J Neurosci., 2002, 22, 6920-6928; the content of which is incorporated herein by reference in its entirety).

### V. Definitions

[0814] Unless stated otherwise, the following terms and phrases have the meanings described below. The definitions are not meant to be limiting in nature and serve to provide a clearer understanding of certain aspects of the present invention.

[0815] As used herein, the term “nucleic acid”, “polynucleotide” and “oligonucleotide” refer to any nucleic acid polymers composed of either polydeoxyribonucleotides (containing 2-deoxy-D-ribose), or polyribonucleotides (containing D-ribose), or any other type of polynucleotide which is an N glycoside of a purine or pyrimidine base, or modified purine or pyrimidine bases. There is no intended distinction in length between the term “nucleic acid”, “polynucleotide” and “oligonucleotide”, and these terms will be used interchangeably. These terms refer only to the primary structure of the molecule. Thus, these terms include double- and single-stranded DNA, as well as double- and single stranded RNA.

[0816] As used herein, the term “RNA” or “RNA molecule” or “ribonucleic acid molecule” refers to a polymer of ribonucleotides; the term “DNA” or “DNA molecule” or “deoxyribonucleic acid molecule” refers to a polymer of deoxyribonucleotides. DNA and RNA can be synthesized naturally, e.g., by DNA replication and transcription of DNA, respectively, or be chemically synthesized. DNA and RNA can be single-stranded (i.e., ssRNA or ssDNA, respectively) or multi-stranded (e.g., double stranded, i.e., dsRNA and dsDNA, respectively). The term “mRNA” or “messenger RNA”, as used herein, refers to a single stranded RNA that encodes the amino acid sequence of one or more polypeptide chains.

[0817] As used herein, the term “RNA interfering” or “RNAi” refers to a sequence specific regulatory mechanism mediated by RNA molecules which results in the inhibition or interfering or “silencing” of the expression of a corresponding protein-coding gene. RNAi has been observed in many types of organisms, including plants, animals and fungi. RNAi occurs in cells naturally to remove foreign RNAs (e.g., viral RNAs). Natural RNAi proceeds via fragments cleaved from free dsRNA which direct the degradative mechanism to other similar RNA sequences. RNAi is controlled by the RNA-induced silencing complex (RISC) and is initiated by short/small dsRNA molecules in cell cytoplasm, where they interact with the catalytic RISC component argonaute. The dsRNA molecules can be introduced into cells exogenously. Exogenous dsRNA initiates RNAi by activating the ribonuclease protein Dicer, which binds and cleaves dsRNAs to produce double-stranded fragments of 21-25 base pairs with a few unpaired overhang bases on each end. These short double stranded fragments are called small interfering RNAs (siRNAs).

[0818] As used herein, the terms “short interfering RNA,” “small interfering RNA” or “siRNA” refer to an RNA molecule (or RNA analog) comprising between about 5-60 nucleotides (or nucleotide analogs) which is capable of directing or mediating RNAi. Preferably, a siRNA molecule comprises between about 15-30 nucleotides or nucleotide analogs, such as between about 16-25 nucleotides (or nucleotide analogs), between about 18-23 nucleotides (or nucleotide analogs), between about 19-22 nucleotides (or nucleotide analogs) (e.g., 19, 20, 21 or 22 nucleotides or nucleotide analogs), between about 19-25 nucleotides (or nucleotide analogs), and between about 19-24 nucleotides (or nucleotide analogs). The term “short” siRNA refers to a siRNA comprising 5-23 nucleotides, preferably 21 nucleotides (or nucleotide analogs), for example, 19, 20, 21 or 22 nucleotides. The term “long” siRNA refers to a siRNA comprising 24-60 nucleotides, preferably about 24-25 nucleotides, for example, 23, 24, 25 or 26 nucleotides. Short siRNAs may, in some instances, include fewer than 19 nucleotides, e.g., 16, 17 or 18 nucleotides, or as few as 5 nucleotides, provided that the shorter siRNA retains the ability to mediate RNAi. Likewise, long siRNAs may, in some instances, include more than 26 nucleotides, e.g., 27, 28, 29, 30, 35, 40, 45, 50, 55, or even 60 nucleotides, provided that the longer siRNA retains the ability to mediate RNAi or translational repression absent further processing, e.g., enzymatic processing, to a short siRNA, siRNAs can be single stranded RNA molecules (ss-siRNAs) or double stranded RNA molecules (ds-siRNAs) comprising a sense strand and an antisense strand which hybridized to form a duplex structure called siRNA duplex.

[0819] As used herein, the term “the antisense strand” or “the first strand” or “the guide strand” of a siRNA molecule refers to a strand that is substantially complementary to a section of about 10-50 nucleotides, e.g., about 15-30, 16-25, 18-23 or 19-22 nucleotides of the mRNA of the gene targeted for silencing. The antisense strand or first strand has sequence sufficiently complementary to the desired target mRNA sequence to direct target-specific silencing, e.g., complementarity sufficient to trigger the destruction of the desired target mRNA by the RNAi machinery or process.

[0820] As used herein, the term “the sense strand” or “the second strand” or “the passenger strand” of a siRNA molecule refers to a strand that is complementary to the antisense strand or first strand. The antisense and sense strands of a siRNA molecule are hybridized to form a duplex structure. As used herein, a “siRNA duplex” includes a siRNA strand having sufficient complementarity to a section of about 10-50 nucleotides of the mRNA of the gene targeted for silencing and a siRNA strand having sufficient complementarity to form a duplex with the other siRNA strand.

[0821] As used herein, the term “complementary” refers to the ability of polynucleotides to form base pairs with one another. Base pairs are typically formed by hydrogen bonds between nucleotide units in antiparallel polynucleotide strands. Complementary polynucleotide strands can form base pair in the Watson-Crick manner (e.g., A to T. A to U, C to G), or in any other manner that allows for the formation of duplexes. As persons skilled in the art are aware, when using RNA as opposed to DNA, uracil rather than thymine is the base that is considered to be complementary to adenosine. However, when a U is denoted in the context of the present invention, the ability to substitute a T is implied, unless otherwise stated. Perfect complementarity or 100% complementarity refers to the situation in which each nucleotide unit of one polynucleotide strand can form hydrogen bond with a nucleotide unit of a second polynucleotide strand. Less than perfect complementarity refers to the situation in which some, but not all, nucleotide units of two strands can form hydrogen bond with each other. For example, for two 20-mers, if only two base pairs on each strand can form hydrogen bond with each other, the polynucleotide strands exhibit 10% complementarity. In the same example, if 18 base pairs on each strand can form hydrogen bonds with each other, the polynucleotide strands exhibit 90% complementarity.

[0822] As used herein, the term “substantially complementary” means that the siRNA has a sequence (e.g., in the antisense strand) which is sufficient to bind the desired target mRNA, and to trigger the RNA silencing of the target mRNA.

[0823] As used herein, “targeting” means the process of design and selection of nucleic acid sequence that will hybridize to a target nucleic acid and induce a desired effect.

[0824] The term “gene expression” refers to the process by which a nucleic acid sequence undergoes successful transcription and in most instances translation to produce a protein or peptide. For clarity, when reference is made to measurement of “gene expression”, this should be understood to mean that measurements may be of the nucleic acid product of transcription, e.g., RNA or mRNA or of the amino acid product of translation, e.g., polypeptides or peptides. Methods of measuring the amount or levels of RNA, mRNA, polypeptides and peptides are well known in the art.

[0825] As used herein, the term “mutation” refers to any changing of the structure of a gene, resulting in a variant (also called “mutant”) form that may be transmitted to subsequent generations. Mutations in a gene may be caused by the alternation of single base in DNA, or the deletion, insertion, or rearrangement of larger sections of genes or chromosomes.

[0826] As used herein, the term “vector” means any molecule or moiety which transports, transduces or otherwise acts as a carrier of a heterologous molecule such as the siRNA molecule of the invention. A “viral genome” or “vector genome” or “viral vector” refers to a sequence which comprises one or more polynucleotide regions encoding or comprising a molecule of interest, e.g., a transgene, a polynucleotide encoding a polypeptide or multi-polypeptide or a modulatory nucleic acid such as small interfering RNA (siRNA). Viral genomes are commonly used to deliver genetic materials into cells. Viral genomes are often modified for specific applications. Types of viral genome sequence include retroviral viral genome sequences, lentiviral viral genome sequences, adenoviral viral genome sequences and adeno-associated viral genome sequences.

[0827] The term “adeno-associated virus” or “AAV” as used herein refers to any vector which comprises or derives from components of an adeno-associated vector and is suitable to infect mammalian cells, preferably human cells. The term AAV vector typically designates an AAV type viral particle or virion comprising a payload. The AAV vector may be derived from various serotypes, including combinations of serotypes (i.e., “pseudotyped” AAV) or from various genomes (e.g., single stranded or self-complementary). In addition, the AAV vector may be replication defective and/or targeted.

[0828] As used herein, the phrase “inhibit expression of a gene” means to cause a reduction in the amount of an expression product of the gene. The expression product can be a RNA molecule transcribed from the gene (e.g., an mRNA) or a polypeptide translated from an mRNA transcribed from the gene. Typically a reduction in the level of an mRNA results in a reduction in the level of a polypeptide translated therefrom. The level of expression may be determined using standard techniques for measuring mRNA or protein.

[0829] As used herein, the term “in vitro” refers to events that occur in an artificial environment, e.g., in a test tube or reaction vessel, in cell culture, in a Petri dish, etc., rather than within an organism (e.g., animal, plant, or microbe).

[0830] As used herein, the term “in vivo” refers to events that occur within an organism (e.g., animal, plant, or microbe or cell or tissue thereof).

[0831] As used herein, the term “modified” refers to a changed state or structure of a molecule of the invention. Molecules may be modified in many ways including chemically, structurally, and functionally.

[0832] As used herein, the term “synthetic” means produced, prepared, and/or manufactured by the hand of man. Synthesis of polynucleotides or polypeptides or other molecules of the present invention may be chemical or enzymatic.

[0833] As used herein, the term “transfection” refers to methods to introduce exogenous nucleic acids into a cell. Methods of transfection include, but are not limited to, chemical methods, physical treatments and cationic lipids or mixtures. The list of agents that can be transfected into a cell is large and includes, but is not limited to, siRNA, sense and/or anti-sense sequences, DNA encoding one or more genes and organized into an expression plasmid, proteins, protein fragments, and more.

[0834] As used herein, “off target” refers to any unintended effect on any one or more target, gene, or cellular transcript.

[0835] As used herein, the phrase “pharmaceutically acceptable” is employed herein to refer to those compounds, materials, compositions, and/or dosage forms which are, within the scope of sound medical judgment, suitable for use in contact with the tissues of human beings and animals without excessive toxicity, irritation, allergic response, or other problem or complication, commensurate with a reasonable benefit/risk ratio.

[0836] As used herein, the term “effective amount” of an agent is that amount sufficient to effect beneficial or desired results, for example, clinical results, and, as such, an “effective amount” depends upon the context in which it is being applied. For example, in the context of administering an agent that treats HD, an effective amount of an agent is, for example, an amount sufficient to achieve treatment, as defined herein, of HD, as compared to the response obtained without administration of the agent.

[0837] As used herein, the term “therapeutically effective amount” means an amount of an agent to be delivered (e.g., nucleic acid, drug, therapeutic agent, diagnostic agent, prophylactic agent, etc.) that is sufficient, when administered to a subject suffering from or susceptible to an infection, disease, disorder, and/or condition, to treat, improve symptoms of, diagnose, prevent, and/or delay the onset of the infection, disease, disorder, and/or condition.

[0838] As used herein, the term “subject” or “patient” refers to any organism to which a composition in accordance with the invention may be administered, e.g., for experimental, diagnostic, prophylactic, and/or therapeutic purposes. Typical subjects include animals (e.g., mammals such as mice, rats, rabbits, non-human primates such as chimpanzees and other apes and monkey species, and humans) and/or plants.

[0839] As used herein, the term “preventing” or “prevention” refers to delaying or forestalling the onset, development or progression of a condition or disease for a period of time, including weeks, months, or years.

[0840] The term “treatment” or “treating,” as used herein, refers to the application of one or more specific procedures used for the cure or amelioration of a disease. In certain embodiments, the specific procedure is the administration of one or more pharmaceutical agents. In the context of the present invention, the specific procedure is the administration of one or more siRNA molecules.

[0841] As used herein, the term “amelioration” or “ameliorating” refers to a lessening of severity of at least one indicator of a condition or disease. For example, in the context of neurodegeneration disorder, amelioration includes the reduction of neuron loss.

[0842] As used herein, the term “administering” refers to providing a pharmaceutical agent or composition to a subject.

[0843] As used herein, the term “neurodegeneration” refers to a pathologic state which results in neural cell death. A large number of neurological disorders share neurodegeneration as a common pathological state. For example, Alzheimer's disease, Parkinson's disease, Huntington's disease, and amyotrophic lateral sclerosis (ALS) all cause chronic neurodegeneration, which is characterized by a slow, progressive neural cell death over a period of several years, whereas acute neurodegeneration is characterized by a sudden onset of neural cell death as a result of ischemia, such as stroke, or trauma, such as traumatic brain injury, or as a result of axonal transection by demyelination or trauma caused, for example, by spinal cord injury or multiple sclerosis. In some neurological disorders, mainly one type of neuronal cell is degenerative, for example, medium spiny neuron degeneration in early HD.

### VI. Equivalents and Scope

[0844] Those skilled in the art will recognize, or be able to ascertain using no more than routine experimentation, many equivalents to the specific embodiments in accordance with the invention described herein. The scope of the present invention is not intended to be limited to the above Description, but rather is as set forth in the appended claims.

[0845] In the claims, articles such as “a,” “an,” and “the” may mean one or more than one unless indicated to the contrary or otherwise evident from the context. Claims or descriptions that include “or” between one or more members of a group are considered satisfied if one, more than one, or all of the group members are present in, employed in, or otherwise relevant to a given product or process unless indicated to the contrary or otherwise evident from the context. The invention includes embodiments in which exactly one member of the group is present in, employed in, or otherwise relevant to a given product or process. The invention includes embodiments in which more than one, or the entire group members are present in, employed in, or otherwise relevant to a given product or process.

[0846] It is also noted that the term “comprising” is intended to be open and permits but does not require the inclusion of additional elements or steps. When the term “comprising” is used herein, the term “consisting of” is thus also encompassed and disclosed.

[0847] Where ranges are given, endpoints are included. Furthermore, it is to be understood that unless otherwise indicated or otherwise evident from the context and understanding of one of ordinary skill in the art, values that are expressed as ranges can assume any specific value or subrange within the stated ranges in different embodiments of the invention, to the tenth of the unit of the lower limit of the range, unless the context clearly dictates otherwise.

[0848] In addition, it is to be understood that any particular embodiment of the present invention that falls within the prior art may be explicitly excluded from any one or more of the claims. Since such embodiments are deemed to be known to one of ordinary skill in the art, they may be excluded even if the exclusion is not set forth explicitly herein. Any particular embodiment of the compositions of the invention (e.g., any antibiotic, therapeutic or active ingredient; any method of production; any method of use; etc.) can be excluded from any one or more claims, for any reason, whether or not related to the existence of prior art.

[0849] It is to be understood that the words which have been used are words of description rather than limitation, and that changes may be made within the purview of the appended claims without departing from the true scope and spirit of the invention in its broader aspects.

[0850] While the present invention has been described at some length and with some particularity with respect to the several described embodiments, it is not intended that it should be limited to any such particulars or embodiments or any particular embodiment, but it is to be construed with references to the appended claims so as to provide the broadest possible interpretation of such claims in view of the prior art and, therefore, to effectively encompass the intended scope of the invention.

### VII. Examples

### Example 1. In Vivo YAC128 Mouse Study of HTT Suppression, Guide to Passenger Ratio and Precision of 5′ End Processing after Treatment with AAV1-miRNA Vectors Produced in Mammalian Cells

[0851] Based on in vitro suppression of HTT with plasmid transfection and with infection of AAV packaged AAV-miRNA expression vectors, selected AAV-miRNA expression vectors were packaged in AAV1 and evaluated in vivo in YAC128 mice, to quantify HTT mRNA suppression, and to assess guide to passenger strand ratio and the precision of 5′ end processing by deep sequencing. The AAV-miRNA transgene genomes were packaged in AAV1 with a CBA promoter (AAV1.CBA.iHtt), and then, the vectors were produced by triple transfection in HEK293 or HEK293T cells, purified and formulated in phosphate buffered saline (PBS) with 0.001% F-68. The vectors were administered to YAC128 mice 7-12 weeks of age via bilateral intrastriatal infusion at a dose of approximately 1E10 to 3E10 vg in 5 uL over 10 minutes per hemisphere. A control group was treated with vehicle (PBS with 0.001% F-68). Each group comprised 4 females and 4 males. Approximately 28 days following test article administration, striatum tissue punches were collected and snap-frozen for later analysis.

[0852] Striatum tissue samples were then homogenized and total RNAs were purified. The relative expression of HTT was determined by qRT-PCR. Housekeeping genes for normalization included mouse XPNPEP1 (X-Prolyl Aminopeptidase 1) and mouse HPRT (hypoxanthine-guanine phosphoribosyltransferase). HTT mRNA was normalized to housekeeping gene expression, and then further normalized to the vehicle group. The total dose (vg/mouse), and constructs are shown in Table 41. The results are shown in Tables 42 and 43.

TABLE 41
Construct and Total Dose

| | | Modulatory | |
|---|---|---|---|
| ITR to ITR | Modulatory | Poly- | |
| Sequence Name | Polynucleotide | nucleotide | Total Dose |
| (SEQ ID NO) | Construct Name | SEQ ID NO | (vg/mouse) |
| VOYHT43 | VOYHTmiR-127.016 | 1253 | 6E10 |
| (SEQ ID NO: 1433) | | | |
| VOYHT15 | VOYHTmiR-127.579 | 1259 | 6E10 |
| (SEQ ID NO: 1366) | | | |
| VOYHT38 | VOYHTmiR-104.907 | 1219 | 4.91E10 |
| (SEQ ID NO: 1428) | | | |
| VOYHT37 | VOYHTmiR-104.425 | 1231 | 6E10 |
| (SEQ ID NO: 1427) | | | |
| VOYHT42 | VOYHTmiR-116.016 | 1252 | 3.57E10 |
| (SEQ ID NO: 1432) | | | |
| VOYHT46 | VOYHTmiR-127.257 | 1211 | 6E10 |
| (SEQ ID NO: 1436) | | | |
| VOYHT44 | VOYHTmiR-127.218 | 1194 | 6E10 |
| (SEQ ID NO: 1434) | | | |
| VOYHT39 | VOYHTmiR-104.257 | 1207 | 6E10 |
| (SEQ ID NO: 1429) | | | |
| VOYHT36 | VOYHTmiR-102.016 | 1248 | 4.89E10 |
| (SEQ ID NO: 1426) | | | |
| VOYHT16 | VOYHTmiR-104.016 | 1249 | 5.79E10 |
| (SEQ ID NO: 1367) | | | |
| VOYHT35 | VOYHTmiR-104.579 | 1255 | 5.85E10 |
| (SEQ ID NO: 1388) | | | |
| VOYHT48 | VOYHTmiR-104.579.10 | 1347 | 2.65E10 |
| (SEQ ID NO: 1438) | | | |
| VOYHT40 | VOYHTmiR-109.016 | 1250 | 5.91E10 |
| (SEQ ID NO; 1430) | | | |
| VOYHT41 | VOYHTmiR-114.016 | 1251 | 3.76E10 |
| (SEQ ID NO: 1431) | | | |
| VOYHT45 | VOYHTmiR-127.907 | 1223 | 4.71E10 |
| (SEQ ID NO: 1435) | | | |
| VOYHT47 | VOYHTmiR-104.579.3 | 1262 | 3.15E10 |
| (SEQ ID NO: 1437) | | | |
| Vehicle | N/A | — | — |

TABLE 42
HTT mRNA Suppression in YAC128 Mouse Striatum after
Intrastriatal Infusion

| | | | Relative | Relative |
|---|---|---|---|---|
| | | | HTT | HTT |
| | | | mRNA | mRNA |
| | | | Level (%) | Level (%) |
| | | | (normalized to | (normalized |
| | Modulatory | Modulatory | XPNPEP1) − | to HPRT) − |
| ITR to ITR | Polynucleotide | Poly- | mean ± | mean ± |
| Sequence | Construct | nucleotide | standard | standard |
| Name | Name | SEQ ID NO | deviation | deviation |
| VOYHT43 | VOYHTmiR- | 1253 | 63 ± 8 | 68 ± 9 |
| | 127.016 | | | |
| VOYHT44 | VOYHTmiR- | 1194 | 85 ± 19 | 86 ± 22 |
| | 127.218 | | | |
| VOYHT46 | VOYHTmiR- | 1211 | 76 ± 13 | 78 ± 8 |
| | 127.257 | | | |
| VOYHT42 | VOYHTmiR- | 1252 | 99 ± 11 | 106 ± 18 |
| | 116.016 | | | |
| VOYHT15 | VOYHTmiR- | 1259 | 74 ± 6 | 77 ± 10 |
| | 127.579 | | | |
| VOYHT37 | VOYHTmiR- | 1231 | 83 ± 4 | 86 ± 7 |
| | 104.425 | | | |
| VOYHT39 | VOYHTmiR- | 1207 | 91 ± 7 | 96 ± 10 |
| | 104.257 | | | |
| VOYHT38 | VOYHTmiR- | 1219 | 103 ± 18 | 102 ± 14 |
| | 104.907 | | | |
| Vehicle | N/A | — | 100 ± 15 | 100 ± 14 |

TABLE 43
HTT mRNA Suppression in YAC128 Mouse Striatum after
Intrastriatal Infusion

| | | | Relative | Relative |
|---|---|---|---|---|
| | | | HTT | HTT |
| | | | mRNA | mRNA |
| | | | Level (%) | Level (%) |
| | | | (normalized to | (normalized |
| | Modulatory | Modulatory | XPNPEP1) − | to HPRT) − |
| ITR to ITR | Polynucleotide | Poly- | mean ± | mean ± |
| Sequence | Construct | nucleotide | standard | standard |
| Name | Name | SEQ ID NO | deviation | deviation |
| VOYHT47 | VOYHTmiR- | 1262 | 67 ± 19 | 63 ± 18 |
| | 104.579.3 | | | |
| VOYHT48 | VOYHTmiR- | 1347 | 70 ± 10 | 69 ± 10 |
| | 104.579.10 | | | |
| VOYHT36 | VOYHTmiR- | 1248 | 92 ± 12 | 91 ± 12 |
| | 102.016 | | | |
| VOYHT16 | VOYHTmiR- | 1249 | 73 ± 10 | 68 ± 7 |
| | 104.016 | | | |
| VOYHT41 | VOYHTmiR- | 1251 | 93 ± 9 | 88 ± 16 |
| | 114.016 | | | |
| VOYHT45 | VOYHTmiR- | 1223 | 87 ± 14 | 83 ± 10 |
| | 127.907 | | | |
| VOYHT40 | VOYHTmiR- | 1250 | 79 ± 7 | 76 ± 6 |
| | 109.016 | | | |
| VOYHT35 | VOYHTmiR- | 1255 | 94 ± 16 | 96 ± 13 |
| | 104.579 | | | |
| Vehicle | N/A | — | 100 ± 6 | 100 ± 8 |

[0853] In YAC128 mouse striatum, VOYHT43 (VOYHTmiR-127.016), VOYHT46 (VOYHTmiR-127.257), VOYHT15 (VOYHTmiR-127.579), VOYHT47 (VOYHTmiR-104.579.3), VOYHT48 (VOYHTmiR-104.579.10), VOYHT16 (VOYHTmiR-104.016) and VOYHT40 (VOYHTmiR-109.016) caused about 20 to 40% silencing of HTT mRNA at about 28 days after intrastriatal infusion of 1E10 to 3E10 vg per striatum.

[0854] Striatum tissue samples were also evaluated for pri-miRNA processing by deep sequencing to assess guide:passenger strand ratio, abundance of guide and passenger strands relative to the total endogenous pool of miRNAs, and precision of processing at the 5′-end of the guide strand. The results are shown in Table 44.

TABLE 44
Deep Sequencing of YAC128 Mouse Striatal Samples after
Intrastriatal Infusion

| | | Modul- | | | |
|---|---|---|---|---|---|
| | | atory | Abundance | | |
| | Modulatory | Poly- | Relative to | | |
| ITR to | Poly- | nucleo- | Endogenous | | |
| ITR | nucleotide | tide | miRNA | Guide/ | |
| Sequence | Construct | SEQ | Pool | Passenger | % N |
| Name | Name | ID NO | (%) | Ratio | (Guide) |
| VOYHT43 | VOYHTmiR- | 1253 | 58.13 | 422.9 | 91.5 |
| | 127.016 | | | | |
| VOYHT44 | VOYHTmiR- | 1194 | 1.49 | 2.44 | 96.2 |
| | 127.218 | | | | |
| VOYHT46 | VOYHTmiR- | 1211 | 9.66 | 0.04 | 85.7 |
| | 127.257 | | | | |
| VOYHT42 | VOYHTmiR- | 1252 | 3.09 | 207.8 | 95.9 |
| | 116.016 | | | | |
| VOYHT15 | VOYHTmiR- | 1259 | 0.05 | 24.28 | 83.2 |
| | 127.579 | | | | |
| VOYHT37 | VOYHTmiR- | 1231 | 0.12 | 0.32 | 92.7 |
| | 104.425 | | | | |
| VOYHT39 | VOYHTmiR- | 1207 | 0.07 | 0.38 | 97.1 |
| | 104.257 | | | | |
| VOYHT38 | VOYHTmiR- | 1219 | 6.45 | 2384 | 96.4 |
| | 104.907 | | | | |
| VOYHT47 | VOYHTmiR- | 1262 | 0.21 | 40 | 86.8 |
| | 104.579.3 | | | | |
| VOYHT48 | VOYHTmiR- | 1347 | 0.76 | 83 | 89.8 |
| | 104.579.10 | | | | |
| VOYHT36 | VOYHTmiR- | 1248 | 3.06 | 494 | 86.4 |
| | 102.016 | | | | |
| VOYHT16 | VOYHTmiR- | 1249 | 5.41 | 629 | 86.8 |
| | 104.016 | | | | |
| VOYEIT41 | VOYHTmiR- | 1251 | 1.7 | 256 | 85.8 |
| | 114.016 | | | | |
| VOYHT45 | VOYHTmiR- | 1223 | 51.29 | 163 | 82.9 |
| | 127.907 | | | | |
| VOYHT40 | VOYHTmiR- | 1250 | 1.75 | 135 | 87.1 |
| | 109.016 | | | | |
| VOYHT35 | VOYHTmiR- | 1255 | 0.01 | 19 | 84.9 |
| | 104.579 | | | | |

[0855] VOYHT43, VOYHT15, VOYHT46, VOYHT48, VOYHT40, and VOYHT47 were shown to have good Htt mRNA knockdown as compared to the other constructs. VOYHT37, VOYHT46. VOYHT44, and VOYHT39 were considered to have a low guide to passenger strand ratio (G:P ratio) as they had a ratio of less than 4. VOYHT43 and VOYHT45 had abundance relative to total miRNA reads which was greater than 10% and considered too high for additional studies. VOYHT48, VOYHT40 and VOYHT47 were selected for additional studies.

### Example 2. AAV-miRNA Expression Vectors

[0856] The constructs comprising the pri-miRNA cassettes containing guide strands targeting HTT and passenger strands were engineered into AAV-miRNA expression vectors (either ss or sc). The AAV-miRNA expression vector construct from ITR to ITR, recited 5′ to 3′, comprises a mutant or wild type ITR, a promoter (either a CMV (which includes an SV40 intron or a human betaglobin intron), U6, H1, CBA (which includes a CMVie enhancer, a CB promoter and an SV40 intron or a human betaglobin intron), or CAG promoter (which includes a CMVie enhancer, a CB promoter, and a rabbit betaglobin intron or a human betaglobin intron), the pri-miRNA cassette containing guide strand sequence targeting HTT and passenger strand sequence, a rabbit globin polyA or human growth hormone polyA and wild type ITR. In vitro and in vivo studies are performed to evaluate the pharmacological activity of the AAV-miRNA expression vectors.

### Example 3. In Vivo YAC128 Mouse Study of HTT Suppression, Guide to Passenger Strand Ratio and Precision of Processing after Treatment with AAV-miRNA Vectors Produced with the Baculo/Sf9 System

[0857] Three constructs comprising the pri-miRNA cassettes containing guide strands targeting HTT and passenger strands were engineered into scAAV-miRNA expression vectors designed for baculo/Sf9 production. The scAAV-miRNA expression construct from ITR to ITR, recited 5′ to 3′, comprised a wild type ITR, a CBA promoter (which includes a CMVie enhancer, a CB promoter and an SV40 intron), the pri-miRNA cassette containing guide strand sequence targeting HTT and passenger strand sequence, a rabbit globin polyA, a stuffer sequence, and wild type ITR. The vectors were produced in the baculo/Sf9 system, purified and formulated in phosphate buffered saline (PBS) with 0.001% F-68, and then administered to YAC128 mice 7-12 weeks of age via bilateral intrastriatal infusion of 5 μL vector at 0.5 μL/min, with a vector concentration of 3.6×10¹² vg/mL, the total dose was 3.6×10¹⁰ vg. A control group was treated with vehicle (PBS with 0.001% F-68). Each group comprised 4 females and 4 males. Approximately 28 days following test article administration, striatum tissue punches were collected and snap-frozen. Striatum tissue samples were homogenized and total RNAs were purified, and the relative expression of HTT mRNA was determined by qRT-PCR. The housekeeping gene for normalization was mouse XPNPEP1 (X-Prolyl Aminopeptidase 1), HTT mRNA was normalized to housekeeping gene expression, and then further normalized to the vehicle group. The HTT mRNA results are shown in Table 45.

TABLE 45
HTT mRNA Suppression in YAC128 Mouse Striatum after
Intrastriatal Infusion

| | | | Relative HTT |
|---|---|---|---|
| | | | mRNA Level (%) |
| | | | (normalized to |
| ITR to ITR | Modulatory | Modulatory | XPNPEP1) − |
| Sequence | Polynucleotide | Polynucleotide | mean ± standard |
| Name | Construct Name | SEQ ID NO | deviation |
| VOYHT1 | VOYHTmiR- | 1262 | 56 ± 14 |
| | 104.579.3 | | |
| VOYHT3 | VOYHTmiR- | 1250 | 58 ± 15 |
| | 109.016 | | |
| VOYHT4 | VOYHTmiR- | 1347 | 57 ± 15 |
| | 104.579.10 | | |
| Vehicle | N/A | — | 100 ± 23 |

[0858] In YAC128 mouse striatum, VOYHT1 (VOYHTmiR-104.579.3), VOYHT4 (VOYHTmiR-104.579.10), and VOYHT3 (VOYHTmiR-109.016) caused about 42% to 44% silencing of HTT mRNA at about 28 days after intrastriatal infusion of 1.8×10¹⁰ vg per striatum.

### Example 4. In Vivo Study in Non-Human Primates

### Study Design

[0859] A study in rhesus monkeys was conducted to evaluate HTT suppression, precision, and efficiency of pri-miRNA processing, tolerability, and distribution of vector genomes within the CNS. Selected constructs comprising the pri-miRNA cassettes containing guide strands targeting HTT and passenger strands were engineered into scAAV-miRNA expression vectors designed for baculo/Sf9 production. The scAAV-miRNA expression construct from ITR to ITR, recited 5′ to 3′, comprised a wild type ITR, a CBA promoter (which includes a CMVie enhancer, a CB promoter and an SV40 intron), the pri-miRNA cassette containing guide strand sequence targeting HTT and passenger strand sequence, a rabbit globin polyA, a stuffer sequence, and wild type ITR. The vectors were produced in the baculo/Sf9 system, purified and formulated in phosphate buffered saline (PBS) with 0.001% F-68.

[0860] Four groups of rhesus monkeys received vehicle (n=3) or one of three vectors (n=6 per group) as bilateral intraputamenal infusions of 100 μL/side at 3-5 μL/min. Gadoteridol (2 mM; ProHance) was co-infused. For animals receiving a vector, the same vector was infused on both sides, with the right side receiving a concentration of 9×10¹¹ vg/mL and the left side receiving a concentration of 2.7×10¹² vg/mL. The total dose of vector administered was 9×10¹⁰ vg (low dose) or 2.7×10¹¹ vg (high dose) per putamen, or 3.6×10¹¹ vg per animal. All animals were euthanized after five weeks. The study design is shown in Table 46.

TABLE 46
Study Design

| | | ITR to ITR | | | |
|---|---|---|---|---|---|
| | | Sequence | Titer (vg/ml) | | |
| | | Name | Left | Right | Dosing |
| Group | N | (SEQ ID NO) | (High Dose) | (Low Dose) | Sites |
| 1 | 6 | VOYHT1 | 2.7E12 | 0.9E12 | Bilateral |
| | | (SEQ ID NO: | | | putamen |
| | | 1352) | | | infusion via |
| 2 | 6 | VOYHT3 | 2.7E12 | 0.9E12 | posterior |
| | | (SEQ ID NO: | | | trajectory |
| | | 1354) | | | 100 μl per |
| 3 | 6 | VOYHT4 | 2.7E12 | 0.9E12 | side |
| | | (SEQ ID NO: | | | |
| | | 1355) | | | |
| Control | 3 | | — | — | |

HTT mRNA Analysts

[0861] HTT mRNA suppression was evaluated in 2 mm tissue punches from the putamen, using branched DNA (bDNA) for quantifying HTT mRNA levels. For each group receiving vector, a total of 60 punches were evaluated per dose of vector (10 punches per putamen, 6 animals per dose of vector). From the vehicle group, 10 punches per putamen were taken from each of 3 animals. HTT mRNA was normalized to the geometric mean of housekeeping genes TATA-box binding protein (TBP), alanyl-tRNA synthetase (AARS) and X-prolyl aminopeptidase 1 (XPNPEP1), and then further normalized to the vehicle group. The HTT mRNA results are shown in Tables 47 and 48.

TABLE 47
HTT mRNA Suppression in Non-Human Primate Putamen after
Intraputamenal Infusion at the High Dose

| | | | Relative HTT mRNA Level (%) |
|---|---|---|---|
| | | Titer (vg/ml) | (normalized to geometric mean of TBP, |
| | | Left | AARS and XPNPEP1) − mean ± |
| Group | N | (High Dose) | standard deviation |
| 1 | 6 | 2.7E12 | 46 ± 11 |
| 2 | 6 | 2.7E12 | 65 ± 9 |
| 3 | 6 | 2.7E12 | 46 ± 10 |
| Control | 3 | — | 100 ± 5 |

TABLE 48
HTT mRNA Suppression in Non-Human Primate Putamen after
Intraputamenal Infusion at the Low Dose

| | | | Relative HTT mRNA Level (%) |
|---|---|---|---|
| | | Titer (vg/ml) | (normalized to geometric mean of TBP, |
| | | Right | AARS and XPNPEP1) − mean ± |
| Group | N | (Low Dose) | standard deviation |
| 1 | 6 | 0.9E12 | 60 ± 6 |
| 2 | 6 | 0.9E12 | 76 ± 8 |
| 3 | 6 | 0.9E12 | 62 ± 13 |
| Control | 3 | — | 100 ± 5 |

### Vector Genome Quantitation

[0862] From the same 2 mm tissue punches from the putamen (with high and low dose treatments) that were used for quantifying HTT mRNA levels by bDNA, a portion of the tissue lysate was used for vector genome copy (VG) determination by droplet digital PCR. For Group 1 (VOYHT1) and Group 3 (VOYHT4), approximately 50% HTT mRNA suppression was achieved with approximately 10 VG copies per diploid cell. For Group 2 (VOYHT3), approximately 50% HTT mRNA suppression was achieved with approximately 400 VG copies per diploid cell. The results are shown in Table 49 (high dose, 2.7E12 vg/mL) and Table 50 (low dose, 0.9E12 vg/mL).

TABLE 49
Vector Genome Copy Number and HTT mRNA Suppression in Non-Human
Primate Putamen after Intraputamenal Infusion at the High Dose

| | Group 1 | | Group 2 | | Group 3 | |
|---|---|---|---|---|---|---|
| Tissue | Vector Genome | Relative HTT | Vector Genome | Relative HTT | Vector Genome | Relative HTT |
| Punch | Copies/Diploid | mRNA Level | Copies/Diploid | mRNA Level | Copies/Diploid | mRNA Level |
| No. | Cell | (%) | Cell | (%) | Cell | (%) |
| 1 | 7.17 | 50.8 | 22.52 | 73.9 | 2.46 | 91.7 |
| 2 | 13.35 | 53.3 | 5.56 | 93.4 | 1123.54 | 25.7 |
| 3 | 8.4 | 55.5 | 7.85 | 84.8 | 28.28 | 61.3 |
| 4 | 6.19 | 58.7 | 6.89 | 85.7 | 3.06 | 54.2 |
| 5 | 33.58 | 49.3 | 29.35 | 69.7 | 126.02 | 29.4 |
| 6 | 110.19 | 46.6 | 0.38 | 102.9 | 232.98 | 35.1 |
| 7 | 312.01 | 33.5 | 1408.59 | 28.5 | 59.23 | 78.7 |
| 8 | 645.36 | 38.3 | 410.37 | 62.7 | 2101.49 | 29.3 |
| 9 | 112.5 | 41.2 | 188.99 | 64.3 | 652.06 | 32.9 |
| 10 | 210.8 | 47.9 | 413.03 | 56.7 | 297.66 | 33.6 |
| 11 | 697.33 | 31.7 | 1106.15 | 34.7 | 305.33 | 25.9 |
| 12 | 590.33 | 40.1 | 2.51 | 96.5 | 1167.46 | 38.9 |
| 13 | 40.5 | 52.1 | 277.83 | 54.6 | 1.66 | 80.2 |
| 14 | 9.58 | 36.2 | 94.19 | 74 | 304.93 | 47.5 |
| 15 | 476.2 | 27.8 | 2.81 | 80 | 2.56 | 69.1 |
| 16 | 1803.57 | 30.2 | 960.38 | 25.2 | 26.54 | 52.9 |
| 17 | 4.55 | 52 | 7.98 | 83.3 | 72.32 | 27.5 |
| 18 | 1.52 | 74.9 | 0.6 | 94.9 | 593.8 | 30.6 |
| 19 | 977.99 | 24.4 | 1908.77 | 29.5 | 89.84 | 81.8 |
| 20 | 140.01 | 35.6 | 1252.94 | 34.1 | 536.51 | 31.3 |
| 21 | 1340 | 29.9 | 146.95 | 65.8 | 158.23 | 59.9 |
| 22 | 2208.66 | 31.5 | 1672.46 | 25.8 | 282.82 | 38 |
| 23 | 185.63 | 37.7 | 279.26 | 62.2 | 1493.92 | 21.8 |
| 24 | 31.98 | 69.1 | 1.6 | 89.3 | 598.55 | 31.8 |
| 25 | 793.55 | 34.2 | 547.85 | 64.1 | 2.27 | 84.7 |
| 26 | 2.84 | 83.8 | 657.52 | 48.3 | 35.32 | 97.9 |
| 27 | 1377.78 | 26.1 | 23.98 | 86.2 | 0.79 | 101 |
| 28 | 861.05 | 33.2 | 1479.57 | 19.5 | 48.26 | 75.7 |
| 29 | 5.98 | 67.9 | 2.41 | 96.9 | 233.81 | 42.7 |
| 30 | 1:17 | 93.6 | 0.86 | 97.8 | 56.44 | 67.2 |
| 31 | 40.1 | 40.5 | 16.7 | 93.1 | 73.5 | 39.2 |
| 32 | 1216.3 | 27.4 | 3.8 | 97.9 | 1321.9 | 28.6 |
| 33 | 1.8 | 75.9 | 43.5 | 66.3 | 8.3 | 47.8 |
| 34 | 0.9 | 87.7 | 4.6 | 96.7 | 162.7 | 29.4 |
| 35 | 81.3 | 38.7 | 1665.9 | 23.1 | 24.1 | 43.1 |
| 36 | 192.1 | 44.1 | 642.7 | 35.5 | 505.4 | 40.3 |
| 37 | 1142.9 | 23.9 | 43.3 | 88.8 | 1181.3 | 23.1 |
| 38 | 2046.4 | 25.1 | 23.1 | 104.3 | 2.3 | 96.8 |
| 39 | 1.7 | 89.4 | 1854.5 | 25.9 | 957.4 | 27.4 |
| 40 | 0.4 | 89.2 | 1.6 | 100.8 | 1240 | 23.5 |
| 41 | 1082.2 | 26.1 | 437.9 | 48.9 | 85.3 | 71.3 |
| 42 | 291.8 | 47.7 | 833 | 42.7 | 366.2 | 44.4 |
| 43 | 1327.27 | 25.5 | 698.46 | 59.4 | 1378.13 | 24.7 |
| 44 | 1450 | 24.8 | 478.32 | 80.4 | 614.11 | 37.6 |
| 45 | 327.71 | 55.8 | 1610.13 | 24.4 | 1121.75 | 26.3 |
| 46 | 1.29 | 88.7 | 167.05 | 81.2 | 1496.89 | 29.7 |
| 47 | 1455.07 | 24.8 | 1653.33 | 22.7 | 1133.25 | 22.9 |
| 48 | 1029.21 | 37.2 | 1205.39 | 31.3 | 1251.79 | 31.2 |
| 49 | 870.1 | 24.1 | 35.66 | 92.9 | 983.7 | 28.4 |
| 50 | 98.26 | 35.9 | 56.33 | 89.8 | 1869.84 | 24.9 |
| 51 | 422.46 | 39.4 | 192.11 | 54 | 176.41 | 53.9 |
| 52 | 28.19 | 84.4 | 468.19 | 67.6 | 750.01 | 21.9 |
| 53 | 79 | 42.7 | 2196.15 | 20.5 | 639.03 | 25.4 |
| 54 | 629.63 | 29.6 | 1355.84 | 27.3 | 719.08 | 30.3 |
| 55 | 1296.5 | 24.2 | 1.7 | 103.7 | 1076.8 | 38.5 |
| 56 | 336.7 | 43 | 515.7 | 84.1 | 29.8 | 94.8 |
| 57 | 210.7 | 53.7 | 1348.7 | 31 | 155.6 | 67.3 |
| 58 | 1.3 | 93.2 | 78.7 | 87.7 | 1268.3 | 23.1 |
| 59 | 1832.3 | 26.1 | 398.1 | 60 | 1303.2 | 33.4 |
| 60 | 538.5 | 39.5 | 660.2 | 46.2 | 698.2 | 37 |

TABLE 50
Vector Genome Copy Number and HTT mRNA Suppression in Non-Human
Primate Putamen after Intraputamenal Infusion at the Low Dose

| | Group 1 | | Group 2 | | Group 3 | |
|---|---|---|---|---|---|---|
| Tissue | Vector Genome | Relative HTT | Vector Genome | Relative HTT | Vector Genome | Relative HTT |
| Punch | Copies/Diploid | mRNA Level | Copies/Diploid | mRNA Level | Copies/Diploid | mRNA Level |
| No. | Cell | (%) | Cell | (%) | Cell | (%) |
| 61 | 27.8 | 74.5 | 7.5 | 93.4 | 0.3 | 108.2 |
| 62 | 270.4 | 49.2 | 0.8 | 107.1 | 5.8 | 68.3 |
| 63 | 0.5 | 88 | 4.9 | 89.9 | 58.5 | 73.1 |
| 64 | 20.4 | 64 | 2.3 | 99.6 | 73.7 | 47.8 |
| 65 | 1.2 | 78.8 | 1.6 | 98.5 | 9.4 | 72.9 |
| 66 | 3.7 | 90.4 | 1 | 101.8 | 56.6 | 55.1 |
| 67 | 369.6 | 31.2 | 746.5 | 34.2 | 1.1 | 115 |
| 68 | 1082.2 | 34.3 | 0.9 | 116.5 | 890.1 | 26.2 |
| 69 | 420.1 | 34.7 | 420.5 | 45.2 | 384.4 | 40.1 |
| 70 | 702.6 | 29.8 | 138.7 | 65.3 | 431 | 31.4 |
| 71 | 247.6 | 42.3 | 269.6 | 61.3 | 105.2 | 58.9 |
| 72 | 91.7 | 70.3 | 121.9 | 63.7 | 314.3 | 33.5 |
| 73 | 625.3 | 28.1 | 29.2 | 82 | 253.6 | 54.2 |
| 74 | 767.6 | 40.6 | 0.6 | 104.6 | 42.8 | 73.9 |
| 75 | 70 | 60.6 | 0.6 | 94.2 | 0.6 | 103.7 |
| 76 | 1081.7 | 26.4 | 2.5 | 101.8 | 45 | 54.8 |
| 77 | 5 | 67.3 | 7.8 | 88.9 | 0.4 | 91.3 |
| 78 | 0.3 | 91.7 | 0.5 | 103 | 379.2 | 36.7 |
| 79 | 646.9 | 28.4 | 405.4 | 65.9 | 143.7 | 82.5 |
| 80 | 30.5 | 86.9 | 66 | 105.8 | 318.5 | 46.3 |
| 81 | 501.8 | 29.5 | 58.4 | 90.1 | 10.5 | 82 |
| 82 | 811 | 34.1 | 171.2 | 69.4 | 81.3 | 59.8 |
| 83 | 1066.7 | 26.4 | 275.5 | 60.8 | 15.3 | 89.4 |
| 84 | 97.9 | 81.7 | 88.1 | 77 | 899.2 | 26.9 |
| 85 | 405.3 | 42 | 34.4 | 97.7 | 0.3 | 115.8 |
| 86 | 0.5 | 100.2 | 2.4 | 111.6 | 144.9 | 82 |
| 87 | 36.5 | 80.6 | 6.3 | 95.5 | 0.5 | 103.7 |
| 88 | 263.8 | 49.7 | 13.4 | 96.9 | 8.5 | 82.3 |
| 89 | 544.3 | 25.2 | 6.4 | 96.6 | 0.2 | 104.5 |
| 90 | 0.7 | 93.8 | 0.3 | 97 | 229.3 | 49 |
| 91 | 0.2 | 94.3 | 9.1 | 88.9 | 0.4 | 102.1 |
| 92 | 465.1 | 42.5 | 5.4 | 94.8 | 4.3 | 87.6 |
| 93 | 3.6 | 76.6 | 631.9 | 42 | 51.4 | 71.7 |
| 94 | 0.3 | 86.8 | 6.4 | 93.3 | 35.4 | 59.2 |
| 95 | 2 | 90 | 14.5 | 90.9 | 204.1 | 40.6 |
| 96 | 62.4 | 60.5 | 10.7 | 96.1 | 0.7 | 97.2 |
| 97 | 0.2 | 95.3 | 31.7 | 92.9 | 42.1 | 92.4 |
| 98 | 18.2 | 84.6 | 445.6 | 69.1 | 4.3 | 103.2 |
| 99 | 476.8 | 28.1 | 471.3 | 43.3 | 875.3 | 24.5 |
| 100 | 0.1 | 91.9 | 773 | 26.5 | 896.6 | 26.2 |
| 101 | 4.5 | 96.9 | 67.8 | 79.7 | 862.3 | 22.4 |
| 102 | 525.2 | 31.5 | 671 | 39.3 | 311.2 | 45.3 |
| 103 | 64.3 | 80.8 | 1077.2 | 28.3 | 593.2 | 43.7 |
| 104 | 265.4 | 51.1 | 693.7 | 50 | 190.2 | 67.6 |
| 105 | 754.9 | 25.4 | 774.7 | 35.1 | 843.5 | 24.2 |
| 106 | 67.2 | 79.3 | 1063.2 | 28 | 767.5 | 27 |
| 107 | 147.9 | 61 | 520.1 | 54.4 | 899.4 | 23.7 |
| 108 | 545.6 | 32.8 | 478.8 | 48.7 | 686.1 | 27.1 |
| 109 | 130.3 | 66.1 | 676.9 | 29.8 | 626 | 27.2 |
| 110 | 246.8 | 43.4 | 6.3 | 96.9 | 1.6 | 103.1 |
| 111 | 194.5 | 42.1 | 264.6 | 54.8 | 12.1 | 86.4 |
| 112 | 18.7 | 85.4 | 134.3 | 65.3 | 5.1 | 62.9 |
| 113 | 25.7 | 77 | 23.7 | 90.6 | 28.3 | 73.3 |
| 114 | 277.9 | 32.7 | 4.2 | 95.7 | 169.9 | 50.4 |
| 115 | 2.4 | 102.2 | 11.6 | 101.6 | 768.8 | 27.2 |
| 116 | 31.3 | 89.6 | 1062.7 | 44.8 | 14.3 | 99.6 |
| 117 | 666.6 | 27.2 | 145.4 | 71.9 | 311.3 | 49.8 |
| 118 | 0.3 | 93.7 | 213.6 | 80 | 534.6 | 35 |
| 119 | 657.8 | 25 | 463.3 | 46.6 | 414.8 | 33.9 |
| 120 | 471.8 | 30.6 | 170.8 | 69.4 | 785.8 | 24.2 |

### Pri-miRNA Processing

[0863] Precision and efficiency of pri-miRNA processing were evaluated by deep sequencing of 2 mm punches from the putamen, from the high and low dose treatments, to assess guide:passenger strand ratio, abundance of guide and passenger strands relative to the total endogenous pool of miRNAs, and precision of processing at the 5′-end of the guide strand. These results are shown in Table 51.

TABLE 51
Deep Sequencing in Non-Human Primate Putamen after
Intraputamenal Infusion

| | | Abundance | | |
|---|---|---|---|---|
| | | Relative to | | |
| | | Endogenous | Guide/ | |
| | | miRNA Pool | Passenger | % N |
| Group | Titer (vg/ml) | (%) | Ratio | (Guide) |
| 1 | High (2.7E12) | 2.2 | 376 | 98 |
| | Low (0.9E12) | 0.35 | 424 | 97 |
| 2 | High (2.7E12) | 0.23 | 147 | 96 |
| | Low (0.9E12) | 0.21 | 136 | 96 |
| 3 | High (2.7E12) | 3.54 | 44 | 98 |
| | Low (0.9E12) | 1.53 | 46 | 97 |

### Tolerability Results

[0864] Body weight assessments were acquired on Day −8 (i.e., 8 days prior to dosing of the first animal), Day 1, and each week thereafter until termination on Day 36±3. There was no significant change in the average body weights in each group throughout the 5 week in-life period.

[0865] Cage-side observations were performed twice daily (a.m. and p.m.) beginning on Day −8 until scheduled necropsy, to assess abnormalities including neurological signs, and signs of pain or distress, as well as changes in general health, appearance, and behavior. In addition, beginning on Day −8, food consumption was assessed qualitatively once per day. Only decreased appetence was noted in a few animals following surgery, this is considered a common finding post-surgery. Food consumption returned to normal within the first week and remained normal for the remainder of the study.

[0866] Blood was collected on Day −8, Day 15±2, and Day 36±3 for evaluation of hematology, serum chemistry, and coagulation. Hematology assessments comprised WBC, RBC, HGB, HCT, MCV, MCH, MCHC, PLT (qualitative assessment), and absolute and relative values for NEUT. LYMPH, MONO, EOS, and BASO. Serum chemistry comprised TP, ALB, GLOB, A/G ratio, ALP ALT, AST, TBIL (direct and indirect), BUN, CREAT, Ca CHOL, GLU, Phos, TCO2, Na, K and Cl. Coagulation comprised PT, A-PT and fibrinogen. Although some values fell outside of the normal limits, they were interpreted as physiological variations in the absence of any clinical correlation during in-life.

[0867] At necropsy, no abnormalities in gross pathology were observed.

[0868] Histopathology was conducted on the putamen including the infusion site. For all animals, a 3 mm thick coronal brain slab containing the putamen was fixed by immersion in 4% paraformaldehyde for 72 to 96 hours at room temperature and then transferred to phosphate buffered saline (PBS) for storage at approximately +4degC. The 3 mm brain slabs were then embedded in paraffin and coronally sectioned. Full coronal sections, 5 um thick, containing the infusion site in the putamen were assessed for pathology by standard hematoxylin and eosin staining. The vehicle control group was consistent with what would be expected to occur with any injection into the putamen. i.e. the reactions were typical for those associated with a needle track. In Groups 1, 2, and 3, each animal treated with one of three vectors exhibited pathology findings comprised of mild focal gliosis from the needle track, minimal to mild perivascular infiltrates and/or occasional edema most likely due to a combination of trauma from the injection and reaction to the AAV. There were no pathology findings that were considered adverse, given the absence of clinical symptoms.

### Example 5. Activity of Vectors with Filler Sequences

[0869] The miRNA expression vectors encoding VOYHTmiR-104.579.3 (SEQ ID NO: 1262) or VOYHTmiR-104.016 (SEQ ID NO: 1249) were packaged in AAV1, and infected into HEK293T cells. For HEK293T, the cells were plated into 96-well plates (2.5E4 cells/well in 100 ul cell culture medium) and infected with the miRNA expression vectors. 48 hours after infection, the cells were harvested for immediate cell lysis, RNA isolation and qRT-PCR. The MOI and the results for the vectors and the description of the vectors tested are shown in Table 52. In Table 52, SC means self-complementary vector and SS means single-stranded.

TABLE 52
Knockdown of HTT naRNA

| | | | | | | | Relative Htt | | |
|---|---|---|---|---|---|---|---|---|---|
| | | | | Length of | | | mRNA Level (%) | | |
| | | | | Construct | SC | Filler | (normalized to | | |
| | Modulatory | Sequence | | (ITR to | or | SEQ | GFP Control) | | |
| No. | Polynucleotide Name | Name | Promoter | ITR) | SS | (Y/N) | 1E3 | 1E4 | 1E5 |
| 13 | VOYHTmiR-104.579.3 | VOYHT1 | CBA | 2301 nt | SC | Y | 51 | 15 | 13 |
| 14 | VOYHTmiR-104.579.3 | VOYHT6 | CBA | 2299 nt | SC | Y | 54 | 17 | 12 |
| 15 | VOYHTmiR-104.579.3 | VOYHT10 | CBA | 2307 nt | SC | Y | 88 | 63 | 30 |
| 16 | VOYHTmiR-104.579.3 | VOYHT13 | CBA | 1587 nt | SC | N | 47 | 30 | 12 |
| 17 | VOYHTmiR-104.016 | VOYHT14 | CBA | 1582 nt | SC | N | 86 | 43 | 30 |
| 18 | VOYHTmiR-104.016 | VOYHT25 | CMV | 2198 nt | SC | N | 49 | 41 | 16 |
| 19 | VOYHTmiR-104.579.3 | VOYHT26 | CMV | 2203 nt | SC | N | 32 | 16 | 9 |
| 20 | VOYHTmiR-104.579.3 | VOYHT22 | CMV | 2300 nt | SC | Y | 74 | 26 | 12 |
| 21 | VOYHTmiR-104.579.3 | VOYHT18 | CMV | 2308 nt | SC | Y | 32 | 17 | 10 |
| 22 | VOYHTmiR-104.579.3 | VOYHT20 | CMV | 2306 nt | SC | Y | 45 | 19 | 7 |
| 23 | VOYHTmiR-104.579.3 | VOYHT24 | CMV | 2314 nt | SC | Y | 65 | 22 | 12 |
| 24 | VOYHTmiR-104.579.3 | VOYHT2 | CBA | 4608 nt | SS | Y | 106 | 58 | 27 |
| 25 | VOYHTmiR-104.579.3 | VOYHT5 | CBA | 4606 nt | SS | Y | 132 | 68 | 41 |
| 26 | VOYHTmiR-104.579.3 | VOYHT9 | CBA | 4616 nt | SS | Y | 93 | 56 | 19 |
| 27 | VOYHTmiR-104.579.3 | VOYHT21 | CMV | 4598 nt | SS | Y | 114 | 85 | 26 |
| 28 | VOYHTmiR-104.579.3 | VOYHT17 | CMV | 4606 nt | SS | V | 128 | 54 | 20 |
| 29 | VOYHTmiR-104.579.3 | VOYHT19 | CMV | 4608 nt | SS | Y | 53 | 72 | 25 |
| 30 | VOYHTmiR-104.579.10 | VOYHT4 | CBA | 2301 nt | SS | Y | 63 | 61 | 14 |
| 31 | VOYHTmiR-104.579.10 | VOYHT48 | CBA | 1352 nt | | N | 49 | 26 | 10 |

[0870] The miRNA expression vectors which were approximately 2300 nucleotides in length had a higher genome quality as compared to the vectors having approximately 1500 nucleotides or 1900 nucleotides. CBA and CMV promoters produced similar levels of knockdown in vitro. Self-complementary vectors produced the highest levels of knockdown in vitro.

### Example 6. Quality Control of Vectors Produced with the Baculo/Sf9 System in Large Scale

[0871] The miRNA expression vectors of the present disclosure were produced by using a Baculo/Sf9 system on a IL scale. A cesium chloride (CsCl) gradient analysis was used in addition to standard purification techniques to ensure a high % of full vectors. The achieved % of full vectors was at least 80%. Titers ranged from 0.9E12 to 4E13 vg/L of culture, and the vectors with a 5′ or 3′ filler sequence vectors presented the highest titers. The quality of the genome packaged in the vectors of the present disclosure was evaluated by using alkaline denaturing gel analysis, showing a high level of genome quality. The gel banding patterns for the IL scale production was similar to the small scale production pattern. The purity of the vectors of the present invention was evaluated by using silver stain PAGE analysis, showing good VP1, VP2, and VP3 ratio and purity.

[0872] The miRNA expression vectors encoding VOYHTmiR-104.579.3, VOYHTmiR-104.579.10, and VOYHTmiR-109.016 were packaged in AAV1, and infected into HEK293T cells. For HEK293T, the cells were plated into 96-well plates (2.5E4 cells/well in 100 ul cell culture medium) and infected with the miRNA expression vectors. 60 hours after infection, the cells were harvested for immediate cell lysis, RNA isolation and qRT-PCR and the levels of HTT were calculated compared to a GFP transduction control. The MOI and the results for the vectors and the description of the vectors tested are shown in Table 53. In Table 53, SC means self-complementary vector.

TABLE 53
Knockdown of HTT naRNA

| | | | | | | | Relative Htt | | |
|---|---|---|---|---|---|---|---|---|---|
| | | | | Length of | | | mRNA Level (%) | | |
| | Modulatory | | | Construct | SC | Filler | (normalized to | | |
| | Polynucleotide | Sequence | | (ITR to | or | SEQ | GFP Control) | | |
| No. | Name | Name | Promoter | ITR) | SS | (Y/N) | 1E3 | 1E4 | 1E5 |
| 14 | VOYHTmiR- | VOYHT6 | CBA | 2.3kb | SC | Y | 81 | 39 | 16 |
| | 104.5793 | | | | | | | | |
| 32 | VOYHTmiR- | VOYHT7 | CBA | 2.3kb | SC | Y | 74 | 59 | 27 |
| | 109.016 | | | | | | | | |
| 33 | VOYHTmiR- | VOYHT8 | CBA | 2.3kb | SC | Y | 66 | 35 | 17 |
| | 104.579.10 | | | | | | | | |
| 13 | VOYHTmiR- | VOYHT1 | CBA | 2.3kb | SC | Y | 81 | 39 | 15 |
| | 104.579.3 | | | | | | | | |
| 34 | VOYHTmiR- | VOYHT3 | CBA | 2.3kb | SC | Y | 75 | 44 | 21 |
| | 109.016 | | | | | | | | |
| 30 | VOYHTmiR- | VOYHT4 | CBA | 2.3kb | SC | Y | 58 | 31 | 14 |
| | 104.579.10 | | | | | | | | |
| 15 | VOYHTmiR- | VOYHT10 | CBA | 2.3kb | SC. | Y | 77 | 83 | 24 |
| | 104.579.3 | | | | | | | | |

[0873] A dose dependent knockdown was observed for most of the constructs. Self-complementary vectors produced highest levels of knockdown in vitro compared to single-stranded vectors. Vectors with 5′ or 3′ filler sequences presented higher levels of knockdown in vitro compared to vectors with split filler sequences.

[0874] While the present invention has been described at some length and with some particularity with respect to the several described embodiments, it is not intended that it should be limited to any such particulars or embodiments or any particular embodiment, but it is to be construed with references to the appended claims so as to provide the broadest possible interpretation of such claims in view of the prior art and, therefore, to effectively encompass the intended scope of the invention.

[0875] All publications, patent applications, patents, and other references mentioned herein are incorporated by reference in their entirety. In case of conflict, the present specification, including definitions, will control. In addition, section headings, the materials, methods, and examples are illustrative only and not intended to be limiting.

1-35. (canceled)

36. A polynucleotide comprising SEQ ID NO: 1352.

37. An adeno associated virus (AAV) particle comprising the polynucleotide of claim 36 and an AAV1 capsid.

38. A pharmaceutical composition comprising one or more of the AAV particles of claim 37 and one or more pharmaceutically acceptable excipients.

39. A pharmaceutical composition comprising adeno-associated virus (AAV) particles, wherein at least 80% of the AAV particles contain a polynucleotide comprising SEQ ID NO: 1352.

40. A method of treating or preventing Huntington's Disease (HD), comprising administering a therapeutically effective amount of the polynucleotide of claim 36.

41. A method of treating or preventing Huntington's Disease (HD), comprising administering a therapeutically effective amount of the AAV particle of claim 37.

42. A method of treating or preventing Huntington's Disease (HD), comprising administering a therapeutically effective amount of the pharmaceutical composition of claim 38.

43. A method of treating or preventing Huntington's Disease (HD), comprising administering a therapeutically effective amount of the pharmaceutical composition of claim 39.

44. A method of producing an AAV particle of claim 37, comprising transfecting a cell with a construct which comprises a polynucleotide comprising SEQ ID NO: 1352 and a construct which comprises a polynucleotide encoding rep and cap genes; and harvesting the AAV particle from the cell.

45. A polynucleotide consisting of SEQ ID NO: 1352.

46. An adeno associated virus (AAV) particle comprising the polynucleotide of claim 45 and an AAV1 capsid.

47. A pharmaceutical composition comprising one or more of the AAV particles of claim 46 and one or more pharmaceutically acceptable excipients.

48. A pharmaceutical composition comprising adeno-associated virus (AAV) particles, wherein at least 80% of the AAV particles contain a polynucleotide consisting of SEQ ID NO: 1352.

49. A method of treating or preventing Huntington's Disease (HD), comprising administering a therapeutically effective amount of the polynucleotide of claim 45.

50. A method of treating or preventing Huntington's Disease (HD), comprising administering a therapeutically effective amount of the AAV particle of claim 46.

51. A method of treating or preventing Huntington's Disease (HD), comprising administering a therapeutically effective amount of the pharmaceutical composition of claim 47.

52. A method of treating or preventing Huntington's Disease (HD), comprising administering a therapeutically effective amount of the pharmaceutical composition of claim 48.

53. A method of producing an AAV particle of claim 46, comprising transfecting a cell with a construct which comprises a polynucleotide consisting of SEQ ID NO: 1352 and a construct which comprises a polynucleotide encoding rep and cap genes; and harvesting the AAV particle from the cell.

The application's sequence listing, which the Patent Office published only in electronic form, follows.

SEQUENCE LISTING (2260 sequences)

SEQ ID NO: 1 - DNA, 2211 bp, Adeno-associated virus 1
atggctgccgatggttatcttccagattggctcgaggacaacctctctgagggcattcgcgagtggtgggacttgaaacctggagccccgaagcccaaagccaaccagcaaaagcaggacgacggccggggtctggtgcttcctggctacaagtacctcggacccttcaacggactcgacaagggggagcccgtcaacgcggcggacgcagcggccctcgagcacgacaaggcctacgaccagcagctcaaagcgggtgacaatccgtacctgcggtataaccacgccgacgccgagtttcaggagcgtctgcaagaagatacgtcttttgggggcaacctcgggcgagcagtcttccaggccaagaagcgggttctcgaacctctcggtctggttgaggaaggcgctaagacggctcctggaaagaaacgtccggtagagcagtcgccacaagagccagactcctcctcgggcatcggcaagacaggccagcagcccgctaaaaagagactcaattttggtcagactggcgactcagagtcagtccccgatccacaacctctcggagaacctccagcaacccccgctgctgtgggacctactacaatggcttcaggcggtggcgcaccaatggcagacaataacgaaggcgccgacggagtgggtaatgcctcaggaaattggcattgcgattccacatggctgggcgacagagtcatcaccaccagcacccgcacctgggccttgcccacctacaataaccacctctacaagcaaatctccagtgcttcaacgggggccagcaacgacaaccactacttcggctacagcaccccctgggggtattttgatttcaacagattccactgccacttttcaccacgtgactggcagcgactcatcaacaacaattggggattccggcccaagagactcaacttcaaactcttcaacatccaagtcaaggaggtcacgacgaatgatggcgtcacaaccatcgctaataaccttaccagcacggttcaagtcttctcggactcggagtaccagcttccgtacgtcctcggctctgcgcaccagggctgcctccctccgttcccggcggacgtgttcatgattccgcaatacggctacctgacgctcaacaatggcagccaagccgtgggacgttcatccttttactgcctggaatatttcccttctcagatgctgagaacgggcaacaactttaccttcagctacacctttgaggaagtgcctttccacagcagctacgcgcacagccagagcctggaccggctgatgaatcctctcatcgaccaatacctgtattacctgaacagaactcaaaatcagtccggaagtgcccaaaacaaggacttgctgtttagccgtgggtctccagctggcatgtctgttcagcccaaaaactggctacctggaccctgttatcggcagcagcgcgtttctaaaacaaaaacagacaacaacaacagcaattttacctggactggtgcttcaaaatataacctcaatgggcgtgaatccatcatcaaccctggcactgctatggcctcacacaaagacgacgaagacaagttctttcccatgagcggtgtcatgatttttggaaaagagagcgccggagcttcaaacactgcattggacaatgtcatgattacagacgaagaggaaattaaagccactaaccctgtggccaccgaaagatttgggaccgtggcagtcaatttccagagcagcagcacagaccctgcgaccggagatgtgcatgctatgggagcattacctggcatggtgtggcaagatagagacgtgtacctgcagggtcccatttgggccaaaattcctcacacagatggacactttcacccgtctcctcttatgggcggctttggactcaagaacccgcctcctcagatcctcatcaaaaacacgcctgttcctgcgaatcctccggcggagttttcagctacaaagtttgcttcattcatcacccaatactccacaggacaagtgagtgtggaaattgaatgggagctgcagaaagaaaacagcaagcgctggaatcccgaagtgcagtacacatccaattatgcaaaatctgccaacgttgattttactgtggacaacaatggactttatactgagcctcgccccattggcacccgttaccttacccgtcccctgtaa

SEQ ID NO: 2 - protein, 736 aa, Adeno-associated virus 1
MAADGYLPDWLEDNLSEGIREWWDLKPGAPKPKANQQKQDDGRGLVLPGYKYLGPFNGLDKGEPVNAADAAALEHDKAYDQQLKAGDNPYLRYNHADAEFQERLQEDTSFGGNLGRAVFQAKKRVLEPLGLVEEGAKTAPGKKRPVEQSPQEPDSSSGIGKTGQQPAKKRLNFGQTGDSESVPDPQPLGEPPATPAAVGPTTMASGGGAPMADNNEGADGVGNASGNWHCDSTWLGDRVITTSTRTWALPTYNNHLYKQISSASTGASNDNHYFGYSTPWGYFDFNRFHCHFSPRDWQRLINNNWGFRPKRLNFKLFNIQVKEVTTNDGVTTIANNLTSTVQVFSDSEYQLPYVLGSAHQGCLPPFPADVFMIPQYGYLTLNNGSQAVGRSSFYCLEYFPSQMLRTGNNFTFSYTFEEVPFHSSYAHSQSLDRLMNPLIDQYLYYLNRTQNQSGSAQNKDLLFSRGSPAGMSVQPKNWLPGPCYRQQRVSKTKTDNNNSNFTWTGASKYNLNGRESIINPGTAMASHKDDEDKFFPMSGVMIFGKESAGASNTALDNVMITDEEEIKATNPVATERFGTVAVNFQSSSTDPATGDVHAMGALPGMVWQDRDVYLQGPIWAKIPHTDGHFHPSPLMGGFGLKNPPPQILIKNTPVPANPPAEFSATKFASFITQYSTGQVSVEIEWELQKENSKRWNPEVQYTSNYAKSANVDFTVDNNGLYTEPRPIGTRYLTRPL

SEQ ID NO: 3 - DNA, 4718 bp, Adeno-associated virus 1
ttgcccactccctctctgcgcgctcgctcgctcggtggggcctgcggaccaaaggtccgcagacggcagagctctgctctgccggccccaccgagcgagcgagcgcgcagagagggagtgggcaactccatcactaggggtaatcgcgaagcgcctcccacgctgccgcgtcagcgctgacgtaaattacgtcataggggagtggtcctgtattagctgtcacgtgagtgcttttgcgacattttgcgacaccacgtggccatttagggtatatatggccgagtgagcgagcaggatctccattttgaccgcgaaatttgaacgagcagcagccatgccgggcttctacgagatcgtgatcaaggtgccgagcgacctggacgagcacctgccgggcatttctgactcgtttgtgagctgggtggccgagaaggaatgggagctgcccccggattctgacatggatctgaatctgattgagcaggcacccctgaccgtggccgagaagctgcagcgcgacttcctggtccaatggcgccgcgtgagtaaggccccggaggccctcttctttgttcagttcgagaagggcgagtcctacttccacctccatattctggtggagaccacgggggtcaaatccatggtgctgggccgcttcctgagtcagattagggacaagctggtgcagaccatctaccgcgggatcgagccgaccctgcccaactggttcgcggtgaccaagacgcgtaatggcgccggaggggggaacaaggtggtggacgagtgctacatccccaactacctcctgcccaagactcagcccgagctgcagtgggcgtggactaacatggaggagtatataagcgcctgtttgaacctggccgagcgcaaacggctcgtggcgcagcacctgacccacgtcagccagacccaggagcagaacaaggagaatctgaaccccaattctgacgcgcctgtcatccggtcaaaaacctccgcgcgctacatggagctggtcgggtggctggtggaccggggcatcacctccgagaagcagtggatccaggaggaccaggcctcgtacatctccttcaacgccgcttccaactcgcggtcccagatcaaggccgctctggacaatgccggcaagatcatggcgctgaccaaatccgcgcccgactacctggtaggccccgctccgcccgcggacattaaaaccaaccgcatctaccgcatcctggagctgaacggctacgaacctgcctacgccggctccgtctttctcggctgggcccagaaaaggttcgggaagcgcaacaccatctggctgtttgggccggccaccacgggcaagaccaacatcgcggaagccatcgcccacgccgtgcccttctacggctgcgtcaactggaccaatgagaactttcccttcaatgattgcgtcgacaagatggtgatctggtgggaggagggcaagatgacggccaaggtcgtggagtccgccaaggccattctcggcggcagcaaggtgcgcgtggaccaaaagtgcaagtcgtccgcccagatcgaccccacccccgtgatcgtcacctccaacaccaacatgtgcgccgtgattgacgggaacagcaccaccttcgagcaccagcagccgttgcaggaccggatgttcaaatttgaactcacccgccgtctggagcatgactttggcaaggtgacaaagcaggaagtcaaagagttcttccgctgggcgcaggatcacgtgaccgaggtggcgcatgagttctacgtcagaaagggtggagccaacaaaagacccgcccccgatgacgcggataaaagcgagcccaagcgggcctgcccctcagtcgcggatccatcgacgtcagacgcggaaggagctccggtggactttgccgacaggtaccaaaacaaatgttctcgtcacgcgggcatgcttcagatgctgtttccctgcaagacatgcgagagaatgaatcagaatttcaacatttgcttcacgcacgggacgagagactgttcagagtgcttccccggcgtgtcagaatctcaaccggtcgtcagaaagaggacgtatcggaaactctgtgccattcatcatctgctggggcgggctcccgagattgcttgctcggcctgcgatctggtcaacgtggacctggatgactgtgtttctgagcaataaatgacttaaaccaggtatggctgccgatggttatcttccagattggctcgaggacaacctctctgagggcattcgcgagtggtgggacttgaaacctggagccccgaagcccaaagccaaccagcaaaagcaggacgacggccggggtctggtgcttcctggctacaagtacctcggacccttcaacggactcgacaagggggagcccgtcaacgcggcggacgcagcggccctcgagcacgacaaggcctacgaccagcagctcaaagcgggtgacaatccgtacctgcggtataaccacgccgacgccgagtttcaggagcgtctgcaagaagatacgtcttttgggggcaacctcgggcgagcagtcttccaggccaagaagcgggttctcgaacctctcggtctggttgaggaaggcgctaagacggctcctggaaagaaacgtccggtagagcagtcgccacaagagccagactcctcctcgggcatcggcaagacaggccagcagcccgctaaaaagagactcaattttggtcagactggcgactcagagtcagtccccgatccacaacctctcggagaacctccagcaacccccgctgctgtgggacctactacaatggcttcaggcggtggcgcaccaatggcagacaataacgaaggcgccgacggagtgggtaatgcctcaggaaattggcattgcgattccacatggctgggcgacagagtcatcaccaccagcacccgcacctgggccttgcccacctacaataaccacctctacaagcaaatctccagtgcttcaacgggggccagcaacgacaaccactacttcggctacagcaccccctgggggtattttgatttcaacagattccactgccacttttcaccacgtgactggcagcgactcatcaacaacaattggggattccggcccaagagactcaacttcaaactcttcaacatccaagtcaaggaggtcacgacgaatgatggcgtcacaaccatcgctaataaccttaccagcacggttcaagtcttctcggactcggagtaccagcttccgtacgtcctcggctctgcgcaccagggctgcctccctccgttcccggcggacgtgttcatgattccgcaatacggctacctgacgctcaacaatggcagccaagccgtgggacgttcatccttttactgcctggaatatttcccttctcagatgctgagaacgggcaacaactttaccttcagctacacctttgaggaagtgcctttccacagcagctacgcgcacagccagagcctggaccggctgatgaatcctctcatcgaccaatacctgtattacctgaacagaactcaaaatcagtccggaagtgcccaaaacaaggacttgctgtttagccgtgggtctccagctggcatgtctgttcagcccaaaaactggctacctggaccctgttatcggcagcagcgcgtttctaaaacaaaaacagacaacaacaacagcaattttacctggactggtgcttcaaaatataacctcaatgggcgtgaatccatcatcaaccctggcactgctatggcctcacacaaagacgacgaagacaagttctttcccatgagcggtgtcatgatttttggaaaagagagcgccggagcttcaaacactgcattggacaatgtcatgattacagacgaagaggaaattaaagccactaaccctgtggccaccgaaagatttgggaccgtggcagtcaatttccagagcagcagcacagaccctgcgaccggagatgtgcatgctatgggagcattacctggcatggtgtggcaagatagagacgtgtacctgcagggtcccatttgggccaaaattcctcacacagatggacactttcacccgtctcctcttatgggcggctttggactcaagaacccgcctcctcagatcctcatcaaaaacacgcctgttcctgcgaatcctccggcggagttttcagctacaaagtttgcttcattcatcacccaatactccacaggacaagtgagtgtggaaattgaatgggagctgcagaaagaaaacagcaagcgctggaatcccgaagtgcagtacacatccaattatgcaaaatctgccaacgttgattttactgtggacaacaatggactttatactgagcctcgccccattggcacccgttaccttacccgtcccctgtaattacgtgttaatcaataaaccggttgattcgtttcagttgaactttggtctcctgtccttcttatcttatcggttaccatggttatagcttacacattaactgcttggttgcgcttcgcgataaaagacttacgtcatcgggttacccctagtgatggagttgcccactccctctctgcgcgctcgctcgctcggtggggcctgcggaccaaaggtccgcagacggcagagctctgctctgccggccccaccgagcgagcgagcgcgcagagagggagtgggcaa

SEQ ID NO: 4 - DNA, 3131 bp, Adeno-associated virus
gcggccgcgaattcgcccttggctgcgtcaactggaccaatgagaactttcccttcaatgattgcgtcgacaagatggtgatctggtgggaggagggcaagatgacggccaaggtcgtggagtccgccaaggccattctcggcggcagcaaggtgcgcgtggaccaaaagtgcaagtcgtccgcccagatcgaccccacccccgtgatcgtcacctccaacaccaacatgtgcgccgtgattgacgggaacagcaccaccttcgagcaccagcagcctctccaggaccggatgtttaagttcgaactcacccgccgtctggagcacgactttggcaaggtgacaaagcaggaagtcaaagagttcttccgctgggccagtgatcacgtgaccgaggtggcgcatgagttttacgtcagaaagggcggagccagcaaaagacccgcccccgatgacgcggataaaagcgagcccaagcgggcctgcccctcagtcgcggatccatcgacgtcagacgcggaaggagctccggtggactttgccgacaggtaccaaaacaaatgttctcgtcacgcgggcatgcttcagatgctgtttccctgcaaaacgtgcgagagaatgaatcggaatttcaacatttgcttcacacacggggtcagagactgctcagagtgtttccccggcgtgtcagaatctcaaccggtcgtcagaaagaggacgtatcggaaactccgtgcgattcatcatctgctggggcgggctcccgagattgcttgctcggcctgcgatctggtcaacgtggacctggatgactgtgtttctgagcaataaatgacttaaaccaggtatggctgccgatggttatcttccagattggctcgaggacaacctctctgagggcattcgcgagtggtgggcgctgaaacctggagccccgaagcccaaagccaaccagcaaaagcaggacgacggccggggtctggtgcttcctggctacaagtacctcggacccttcaacggactcgacaagggggagcccgtcaacgcggcggacgcagcggccctcgagcacgacaaggcttacgaccagcagctgcaggcgggtgacaatccgtacctgcggtataaccacgccgacgccgagtttcaggagcgtctgcaagaagatacgtcttttgggggcaacctcgggcgagcagtcttccaggccaagaagcgggttctcgaacctctcggtctggttgaggaaggcgctaagacggctcctggaaagaagagaccggtagagccatcaccccagcgttctccagactcctctacgggcatcggcaagaaaggccaacagcccgccagaaaaagactcaattttggtcagactggcgactcagagtcagttccagaccctcaacctctcggagaacctccagcagcgccctctggtgtgggacctaatacaatggctgcaggcggtggcgcaccaatggcagacaataacgaaggcgccgacggagtgggtagttcctcgggaaattggcattgcgattccacatggctgggcgacagagtcatcaccaccagcacccgaacctgggccctgcccacctacaacaaccacctctacaagcaaatctccaacgggacatcgggaggagccaccaacgacaacacctacttcggctacagcaccccctgggggtattttgactttaacagattccactgccacctttcaccacgtgactggcagcgactcatcaacaacaactggggattccgacccaagagactcagcttcaagctcttcaacatccaggtcaaggaggtcacgcagaatgaaggcaccaagaccatcgccaataacctcaccagcaccatccaggtgtttacggactcggagtaccagctgccgtacgttctcggctctgtccaccagggctgcctgcctccgttcccggcggacgtgttcatgattccccagtacggctacctaacactcaacaacggtagtcaggccgtgggacgctcctccttctactgcctggaatactttccttcgcagatgctgagaaccggcaacaacttccagtttacttacaccttcgaggacgtgcctttccacagcagctacgcccacagctagagcttggaccggctgatgaatcctctgattgaccagtacctgtactacttgtctcggactcaaacaacaggaggcacggcaaatacgcagactctgggcttcagccaaggtgggcctaatacaatggccaatcaggcaaagaactggctgccaggaccctgttaccgccaacaacgcgtctcaacgacaaccgggcaaaacaacaatagcaactttgcctggactgctgggaccaaataccatctgaatggaagaaattcattggctaatcctggcatcgctatggcaacacacaaagacgacgaggagcgtttttttcccagtaacgggatcctgatttttggcaaacaaaatgctgccagagacaatgcggattacagcgatgtcatgctcaccagcgaggaagaaatcaaaaccactaaccctgtggctacagaggaatacggtatcgtggcagataacttgcagcagcaaaacacggctcctcaaattggaactgtcaacagccagggggccttacccggtatggtctggcagaaccgggacgtgtacctgcagggtcccatctgggccaagattcctcacacggacggcaacttccacccgtctccgctgatgggcggctttggcctgaaacatcctccgcctcagatcctgatcaagaacacgcctgtacctgcggatcctccgaccaccttcaaccagtcaaagctgaactctttcatcacgcaatacagcaccggacaggtcagcgtggaaattgaatgggagctgcagaaggaaaacagcaagcgctggaaccccgagatccagtacacctccaactactacaaatctataagtgtggactttgctgttaatacagaaggcgtgtactctgaaccccgccccattggcacccgttacctcacccgtaatctgtaattgcctgttaatcaataaaccggttgattcgtttcagttgaactttggtctctgcgaagggcgaattc

SEQ ID NO: 5 - DNA, 255 bp, Adeno-associated virus 10
ggtaattcctccggaaattggcattgcgattccacatggctgggcgacagagtcatcaccaccagcacccgaacctgggtcctgcccacctacaacaaccacatctacaagcaaatctccagcgagacaggagccaccaacgacaaccactacttcggctacagcaccccctgggggtattttgactttaacagattccactgccacttttcaccacgtgactggcagcgactcatcaacaacaactggggattc

SEQ ID NO: 6 - protein, 738 aa, Adeno-associated virus 10
MAADGYLPDWLEDNLSEGIREWWDLKPGAPKPKANQQKQDDGRGLVLPGYKYLGPFNGLDKGEPVNAADAAALEHDKAYDQQLKAGDNPYLRYNHADAEFQERLQEDTSFGGNLGRAVFQAKKRVLEPLGLVEEAAKTAPGKKRPVEPSPQRSPDSSTGIGKKGQQPAKKRLNFGQTGESESVPDPQPIGEPPAGPSGLGSGTMAAGGGAPMADNNEGADGVGSSSGNWHCDSTWLGDRVITTSTRTWALPTYNNHLYKQISNGTSGGSTNDNTYFGYSTPWGYFDFNRFHCHFSPRDWQRLINNNWGFRPKRLSFKLFNIQVKEVTQNEGTKTIANNLTSTIQVFTDSEYQLPYVLGSAHQGCLPPFPADVFMIPQYGYLTLNNGSQAVGRSSFYCLEYFPSQMLRTGNNFEFSYTFEDVPFHSSYAHSQSLDRLMNPLIDQYLYYLSRTQSTGGTQGTQQLLFSQAGPANMSAQAKNWLPGPCYRQQRVSTTLSQNNNSNFAWTGATKYHLNGRDSLVNPGVAMATHKDDEERFFPSSGVLMFGKQGAGRDNVDYSSVMLTSEEEIKTTNPVATEQYGVVADNLQQANTGPIVGNVNSQGALPGMVWQNRDVYLQGPIWAKIPHTDGNFHPSPLMGGFGLKHPPPQILIKNTPVPADPPTTFSQAKLASFITQYSTGQVSVEIEWELQKENSKRWNPEIQYTSNYYKSTNVDFAVNTEGTYSEPRPIGTRYLTRNL

SEQ ID NO: 7 - protein, 738 aa, Adeno-associated virus 10
MAADGYLPDWLEDNLSEGIREWWDLKPGAPKPKANQQKQDDGRGLVLPGYKYLGPFNGLDKGEPVNAADAAALEHDKAYDQQLKAGDNPYLRYNHADAEFQERLQEDTSFGGNLGRAVFQAKKRVLEPLGLVEEGAKTAPGKKRPVEPSPQRSPDSSTGIGKKGQQPAKKRLNFGQTGDSESVPDPQPIGEPPAGPSGLGSGTMAAGGGAPMADNNEGADGVGSSSGNWHCDSTWLGDRVITTSTRTWALPTYNNHLYKQISNGTSGGSTNDNTYFGYSTPWGYFDFNRFHCHFSPRDWQRLINNNWGFRPKRLNFKLFNIQVKEVTQNEGTKTIANNLTSTIQVFTDSEYQLPYVLGSAHQGCLPPFPADVFMIPQYGYLTLNNGSQAVGRSSFYCLEYFPSQMLRTGNNFEFSYQFEDVPFHSSYAHSQSLDRLMNPLIDQYLYYLSRTQSTGGTAGTQQLLFSQAGPNNMSAQAKNWLPGPCYRQQRVSTTLSQNNNSNFAWTGATKYHLNGRDSLVNPGVAMATHKDDEERFFPSSGVLMFGKQGAGKDNVDYSSVMLTSEEEIKTTNPVATEQYGVVADNLQQQNAAPIVGAVNSQGALPGMVWQNRDVYLQGPIWAKIPHTDGNFHPSPLMGGFGLKHPPPQILIKNTPVPADPPTTFSQAKLASFITQYSTGQVSVEIEWELQKENSKRWNPEIQYTSNYYKSTNVDFAVNTDGTYSEPRPIGTRYLTRNL

SEQ ID NO: 8 - DNA, 258 bp, Adeno-associated virus 11
ggtaattcctccggaaattggcattgcgattccacatggctgggcgacagagtcatcaccaccagcacccgaacctgggccctgccaacctacaacaaccacctctacaaacaaatctccagcgcttcaacgggggccagcaacgacaaccactactttggctacagcaccccctgggggtattttgactttaacagattccactgccacttctcaccacgtgactggcagcgactcatcaacaacaactggggattc

SEQ ID NO: 9 - DNA, 255 bp, Adeno-associated virus 12
ggtaattcctccggaaattggcattgcgattccacatggctgggcgaccgagtcattaccaccagcacccggacttgggccctgcccacctacaacaaccacctctacaagcaaatctccagccaatcgggtgccaccaacgacaaccactacttcggctacagcaccccttgggggtattttgatttcaacagattccactgccatttctcaccacgtgactggcagcgactcatcaacaacaactggggattc

SEQ ID NO: 10 - DNA, 2208 bp, Adeno-associated virus 2
atggctgccgatggttatcttccagattggctcgaggacactctctctgaaggaataagacagtggtggaagctcaaacctggcccaccaccaccaaagcccgcagagcggcataaggacgacagcaggggtcttgtgcttcctgggtacaagtacctcggacccttcaacggactcgacaagggagagccggtcaacgaggcagacgccgcggccctcgagcacgacaaagcctacgaccggcagctcgacagcggagacaacccgtacctcaagtacaaccacgccgacgcggagtttcaggagcgccttaaagaagatacgtcttttgggggcaacctcggacgagcagtcttccaggcgaaaaagagggttcttgaacctctgggcctggttgaggaacctgttaagacggctccgggaaaaaagaggccggtagagcactctcctgtggagccagactcctcctcgggaaccggaaaggcgggccagcagcctgcaagaaaaagattgaattttggtcagactggagacgcagactcagtacctgacccccagcctctcggacagccaccagcagccccctctggtctgggaactaatacgatggctacaggcagtggcgcaccaatggcagacaataacgagggcgccgacggagtgggtaattcctcgggaaattggcattgcgattccacatggatgggcgacagagtcatcaccaccagcacccgaacctgggccctgcccacctacaacaaccacctctacaaacaaatttccagccaatcaggagcctcgaacgacaatcactactttggctacagcaccccttgggggtattttgacttcaacagattccactgccacttttcaccacgtgactggcaaagactcatcaacaacaactggggattccgacccaagagactcaacttcaagctctttaacattcaagtcaaagaggtcacgcagaatgacggtacgacgacgattgccaataaccttaccagcacggttcaggtgtttactgactcggagtaccagctcccgtacgtcctcggctcggcgcatcaaggatgcctcccgccgttcccagcagacgtcttcatggtgccacagtatggatacctcaccctgaacaacgggagtcaggcagtaggacgctcttcattttactgcctggagtactttccttctcagatgctgcgtaccggaaacaactttaccttcagctacacttttgaggacgttcctttccacagcagctacgctcacagccagagtctggaccgtctcatgaatcctctcatcgaccagtacctgtattacttgagcagaacaaacactccaagtggaaccaccacgcagtcaaggcttcagttttctcaggccggagcgagtgacattcgggaccagtctaggaactggcttcctggaccctgttaccgccagcagcgagtatcaaagacatctgcggataacaacaacagtgaatactcgtggactggagctaccaagtaccacctcaatggcagagactctctggtgaatccgggcccggccatggcaagccacaaggacgatgaagaaaagttttttcctcagagcggggttctcatctttgggaagcaaggctcagagaaaacaaatgtggacattgaaaaggtcatgattacagacgaagaggaaatcaggacaaccaatcccgtggctacggagcagtatggttctgtatctaccaacctccagagaggcaacagacaagcagctaccgcagatgtcaacacacaaggcgttcttccaggcatggtctggcaggacagagatgtgtaccttcaggggcccatctgggcaaagattccacacacggacggacattttcacccctctcccctcatgggtggattcggacttaaacaccctcctccacagattctcatcaagaacaccccggtacctgcgaatccttcgaccaccttcagtgcggcaaagtttgcttccttcatcacacagtactccacgggacaggtcagcgtggagatcgagtgggagctgcagaaggaaaacagcaaacgctggaatcccgaaattcagtacacttccaactacaacaagtctgttaatgtggactttactgtggacactaatggcgtgtattcagagcctcgccccattggcaccagatacctgactcgtaatctgtaa

SEQ ID NO: 11 - protein, 735 aa, Adeno-associated virus 2 [sequence omitted]

SEQ ID NO: 12 - protein, 621 aa, Adeno-associated virus 2
MPGFYEIVIKVPSDLDGHLPGISDSFVNWVAEKEWELPPDSDMDLNLIEQAPLTVAEKLQRDFLTEWRRVSKAPEALFFVQFEKGESYFHMHVLVETTGVKSMVLGRFLSQIREKLIQRIYRGIEPTLPNWFAVTKTRNGAGGGNKVVDECYIPNYLLPKTQPELQWAWTNMEQYLSACLNLTERKRLVAQHLTHVSQTQEQNKENQNPNSDAPVIRSKTSARYMELVGWLVDKGITSEKQWIQEDQASYISFNAASNSRSQIKAALDNAGKIMSLTKTAPDYLVGQQPVEDISSNRIYKILELNGYDPQYAASVFLGWATKKFGKRNTIWLFGPATTGKTNIAEAIAHTVPFYGCVNWTNENFPFNDCVDKMVIWWEEGKMTAKVVESAKAILGGSKVRVDQKCKSSAQIDPTPVIVTSNTNMCAVIDGNSTTFEHQQPLQDRMFKFELTRRLDHDFGKVTKQEVKDFFRWAKDHVVEVEHEFYVKKGGAKKRPAPSDADISEPKRVRESVAQPSTSDAEASINYADRYQNKCSRHVGMNLMLFPCRQCERMNQNSNICFTHGQKDCLECFPVSESQPVSVVKKAYQKLCYIHHIMGKVPDACTACDLVNVDLDDCIFEQ

SEQ ID NO: 13 - DNA, 4675 bp, Adeno-associated virus 2
ttggccactccctctctgcgcgctcgctcgctcactgaggccgggcgaccaaaggtcgcccgacgcccgggctttgcccgggcggcctcagtgagcgagcgagcgcgcagagagggagtggccaactccatcactaggggttcctggaggggtggagtcgtgacgtgaattacgtcatagggttagggaggtcctgtattagaggtcacgtgagtgttttgcgacattttgcgacaccatgtggtcacgctgggtatttaagcccgagtgagcacgcagggtctccattttgaagcgggaggtttgaacgcgcagccgccatgccggggttttacgagattgtgattaaggtccccagcgaccttgacgggcatctgcccggcatttctgacagctttgtgaactgggtggccgagaaggaatgggagttgccgccagattctgacatggatctgaatctgattgagcaggcacccctgaccgtggccgagaagctgcagcgcgactttctgacggaatggcgccgtgtgagtaaggccccggaggcccttttctttgtgcaatttgagaagggagagagctacttccacatgcacgtgctcgtggaaaccaccggggtgaaatccatggttttgggacgtttcctgagtcagattcgcgaaaaactgattcagagaatttaccgcgggatcgagccgactttgccaaactggttcgcggtcacaaagaccagaaatggcgccggaggcgggaacaaggtggtggatgagtgctacatccccaattacttgctccccaaaacccagcctgagctccagtgggcgtggactaatatggaacagtatttaagcgcctgtttgaatctcacggagcgtaaacggttggtggcgcagcatctgacgcacgtgtcgcagacgcaggagcagaacaaagagaatcagaatcccaattctgatgcgccggtgatcagatcaaaaacttcagccaggtacatggagctggtcgggtggctcgtggacaaggggattacctcggagaagcagtggatccaggaggaccaggcctcatacatctccttcaatgcggcctccaactcgcggtcccaaatcaaggctgccttggacaatgcgggaaagattatgagcctgactaaaaccgcccccgactacctggtgggccagcagcccgtggaggacatttccagcaatcggatttataaaattttggaactaaacgggtacgatccccaatatgcggcttccgtctttctgggatgggccacgaaaaagttcggcaagaggaacaccatctggctgtttgggcctgcaactaccgggaagaccaacatcgcggaggccatagcccacactgtgcccttctacgggtgcgtaaactggaccaatgagaactttcccttcaacgactgtgtcgacaagatggtgatctggtgggaggaggggaagatgaccgccaaggtcgtggagtcggccaaagccattctcggaggaagcaaggtgcgcgtggaccagaaatgcaagtcctcggcccagatagacccgactcccgtgatcgtcacctccaacaccaacatgtgcgccgtgattgacgggaactcaacgaccttcgaacaccagcagccgttgcaagaccggatgttcaaatttgaactcacccgccgtctggatcatgactttgggaaggtcaccaagcaggaagtcaaagactttttccggtgggcaaaggatcacgtggttgaggtggagcatgaattctacgtcaaaaagggtggagccaagaaaagacccgcccccagtgacgcagatataagtgagcccaaacgggtgcgcgagtcagttgcgcagccatcgacgtcagacgcggaagcttcgatcaactacgcagacaggtaccaaaacaaatgttctcgtcacgtgggcatgaatctgatgctgtttccctgcagacaatgcgagagaatgaatcagaattcaaatatctgcttcactcacggacagaaagactgtttagagtgctttcccgtgtcagaatctcaacccgtttctgtcgtcaaaaaggcgtatcagaaactgtgctacattcatcatatcatgggaaaggtgccagacgcttgcactgcctgcgatctggtcaatgtggatttggatgactgcatctttgaacaataaatgatttaaatcaggtatggctgccgatggttatcttccagattggctcgaggacactctctctgaaggaataagacagtggtggaagctcaaacctggcccaccaccaccaaagcccgcagagcggcataaggacgacagcaggggtcttgtgcttcctgggtacaagtacctcggacccttcaacggactcgacaagggagagccggtcaacgaggcagacgccgcggccctcgagcacgtacaaagcctacgaccggcagctcgacagcggagacaacccgtacctcaagtacaaccacgccgacgcggagtttcaggagcgccttaaagaagatacgtcttttgggggcaacctcggacgagcagtcttccaggcgaaaaagagggttcttgaacctctgggcctggttgaggaacctgttaagacggctccgggaaaaaagaggccggtagagcactctcctgtggagccagactcctcctcgggaaccggaaaggcgggccagcagcctgcaagaaaaagattgaattttggtcagactggagacgcagactcagtacctgacccccagcctctcggacagccaccagcagccccctctggtctgggaactaatacgatggctacaggcagtggcgcaccaatggcagacaataacgagggcgccgacggagtgggtaattcctccggaaattggcattgcgattccacatggatgggcgacagagtcatcaccaccagcacccgaacctgggccctgcccacctacaacaaccacctctacaaacaaatttccagccaatcaggagcctcgaacgacaatcactactttggctacagcaccccttgggggtattttgacttcaacagattccactgccacttttcaccacgtgactggcaaagactcatcaacaacaactggggattccgacccaagagactcaacttcaagctctttaacattcaagtcaaagaggtcacgcagaatgacggtacgacgacgattgccaataaccttaccagcacggttcaggtgtttactgactcggagtaccagctcccgtacgtcctcggctcggcgcatcaaggatgcctcccgccgttcccagcagacgtcttcatggtgccacagtatggatacctcaccctgaacaacgggagtcaggcagtaggacgctcttcattttactgcctggagtactttccttctcagatgctgcgtaccggaaacaactttaccttcagctacacttttgaggacgttcctttccacagcagctacgctcacagccagagtctggaccgtctcatgaatcctctcatcgaccagtacctgtattacttgagcagaacaaacactccaagtggaaccaccacgcagtcaaggcttcagttttctcaggccggagcgagtgacattcgggaccagtctaggaactggcttcctggaccctgttaccgccagcagcgagtatcaaagacatctgcggataacaacaacagtgaatactcgtggactggagctaccaagtaccacctcaatggcagagactctctggtgaatccggccatggcaagccacaaggacgatgaagaaaagttttttcctcagagcggggttctcatctttgggaagcaaggctcagagaaaacaaatgtgaacattgaaaaggtcatgattacagacgaagaggaaatcggaacaaccaatcccgtggctacggagcagtatggttctgtatctaccaacctccagagaggcaacagacaagcagctaccgcagatgtcaacacacaaggcgttcttccaggcatggtctggcaggacagagatgtgtaccttcaggggcccatctgggcaaagattccacacacggacggacattttcacccctctcccctcatgggtggattcggacttaaacaccctcctccacagattctcatcaagaacaccccggtacctgcgaatccttcgaccaccttcagtgcggcaaagtttgcttccttcatcacacagtactccacgggacacggtcagcgtggagatcgagtgggagctgcagaaggaaaacagcaaacgctggaatcccgaaattcagtacacttccaactacaacaagtctgttaatcgtggacttaccgtggatactaatggcgtgtattcagagcctcgccccattggcaccagatacctgactcgtaatctgtaattgcttgttaatcaataaaccgtttaattcgtttcagttgaactttggtctctgcgtatttctttcttatctagtttccatggctacgtagataagtagcatggcgggttaatcattaactacaaggaacccctagtgatggagttggccactccctctctgcgcgctcgctcgctcactgaggccgggcgaccaaaggtcgcccgacgcccgggctttgcccgggcggcctcagtgagcgagcgagcgcgcagagagggagtggccaa

SEQ ID NO: 14 - DNA, 4679 bp, Adeno-associated virus 2
ttggccactccctctctgcgcgctcgctcgctcactgaggccgggcgaccaaaggtcgcccgacgcccgggctttgcccgggcggcctcagtgagcgagcgagcgcgcagagagggagtggccaactccatcactaggggttcctggaggggtggagtcgtgacgtgaattacgtcatagggttagggaggtcctgtattagaggtcacgtgagtgttttgcgacattttgcgacaccatgtggtcacgctgggtatttaagcccgagtgagcacgcagggtctccattttgaagcgggaggtttgaacgcgcagccgccatgccggggttttacgagattgtgattaaggtccccagcgaccttgacgggcatctgcccggcatttctgacagctttgtgaactgggtggccgagaaggaatgggagttgccgccagattctgacatggatctgaatctgattgagcaggcacccctgaccgtggccgagaagctgcagcgcgactttctgacggaatggcgccgtgtgagtaaggccccggaggcccttttctttgtgcaatttgagaagggagagagctacttccacatgcacgtgctcgtggaaaccaccggggtgaaatccatggttttgggacgtttcctgagtcagattcgcgaaaaactgattcagagaatttaccgcgggatcgagccgactttgccaaactggttcgcggtcacaaagaccagaaatggcgccggaggcgggaacaaggtggtggatgagtgctacatccccaattacttgctccccaaaacccagcctgagctccagtgggcgtggactaatatggaacagtatttaagcgcctgtttgaatctcacggagcgtaaacggttggtggcgcagcatctgacgcacgtgtcgcagacgcaggagcagaacaaagagaatcagaatcccaattctgatgcgccggtgatcagatcaaaaacttcagccaggtacatggagctggtcgggtggctcgtggacaaggggattacctcggagaagcagtggatccaggaggaccaggcctcatacatctccttcaatgcggcctccaactcgcggtcccaaatcaaggctgccttggacaatgcgggaaagattatgagcctgactaaaaccgcccccgactacctggtgggccagcagcccgtggaggacatttccagcaatcggatttataaaattttggaactaaacgggtacgatccccaatatgcggcttccgtctttctgggatgggccacgaaaaagttcggcaagaggaacaccatctggctgtttgggcctgcaactaccgggaagaccaacatcgcggaggccatagcccacactgtgcccttctacgggtgcgtaaactggaccaatgagaactttcccttcaacgactgtgtcgacaagatggtgatctggtgggaggaggggaagatgaccgccaaggtcgtggagtcggccaaagccattctcggaggaagcaaggtgcgcgtggaccagaaatgcaagtcctcggcccagatagacccgactcccgtgatcgtcacctccaacaccaacatgtgcgccgtgattgacgggaactcaacgaccttcgaacaccagcagccgttgcaagaccggatgttcaaatttgaactcacccgccgtctggatcatgactttgggaaggtcaccaagcaggaagtcaaagactttttccggtgggcaaaggatcacgtggttgaggtggagcatgaattctacgtcaaaaagggtggagccaagaaaagacccgcccccagtgacgcagatataagtgagcccaaacgggtgcgcgagtcagttgcgcagccatcgacgtcagacgcggaagcttcgatcaactacgcagacaggtaccaaaacaaatgttctcgtcacgtgggcatgaatctgatgctgtttccctgcagacaatgcgagagaatgaatcagaattcaaatatctgcttcactcacggacagaaagactgtttagagtgctttcccgtgtcagaatctcaacccgtttctgtcgtcaaaaaggcgtatcagaaactgtgctacattcatcatatcatgggaaaggtgccagacgcttgcactgcctgcgatctggtcaatgtggatttggatgactgcatctttgaacaataaatgatttaaatcaggtatggctgccgatggttatcttccagattggctcgaggacactctctctgaaggaataagacagtggtggaagctcaaacctggcccaccaccaccaaagcccgcagagcggcataaggacgacagcaggggtcttgtgcttcctgggtacaagtacctcggacccttcaacggactcgacaagggagagccggtcaacgaggcagacgccgcggccctcgagcacgacaaagcctacgaccggcagctcgacagcggagacaacccgtacctcaagtacaaccacgccgacgcggagtttcaggagcgccttaaagaagatacgtcttttgggggcaacctcggacgagcagtcttccaggcgaaaaagagggttcttgaacctctgggcctggttgaggaacctgttaagacggctccgggaaaaaagaggccggtagagcactctcctgtggagccagactcctcctcgggaaccggaaaggcgggccagcagcctgcaagaaaaagattgaattttggtcagactggagacgcagactcagtacctgacccccagcctctcggacagccaccagcagccccctctggtctgggaactaatacgatggctacaggcagtggcgcaccaatggcagacaataacgagggcgccgacggagtgggtaattcctccggaaattggcattgcgattccacatggatgggcgacagagtcatcaccaccagcacccgaacctgggccctgcccacctacaacaaccacctctacaaacaaatttccagccaatcaggagcctcgaacgacaatcactactttggctacagcaccccttgggggtattttgacttcaacagattccactgccacttttcaccacgtgactggcaaagactcatcaacaacaactggggattccgacccaagagactcaacttcaagctctttaacattcaagtcaaagaggtcacgcagaatgacggtacgacgacgattgccaataaccttaccagcacggttcaggtgtttactgactcggagtaccagctcccgtacgtcctcggctcggcgcatcaaggatgcctcccgccgttcccagcagacgtcttcatggtgccacagtatggatacctcaccctgaacaacgggagtcaggcagtaggacgctcttcattttactgcctggagtactttccttctcagatgctgcgtaccggaaacaactttaccttcagctacacttttgaggacgttcctttccacagcagctacgctcacagccagagtctggaccgtctcatgaatcctctcatcgaccagtacctgtattacttgagcagaacaaacactccaagtggaaccaccacgcagtcaaggcttcagttttctcaggccggagcgagtgacattcgggaccagtctaggaactggcttcctggaccctgttaccgccagcagcgagtatcaaagacatctgcggataacaacaacagtgaatactcgtggactggagctaccaagtaccacctcaatggcagagactctctggtgaatccgggcccggccatggcaagccacaaggacgatgaagaaaagttttttcctcagagcggggttctcatctttgggaagcaaggctcagagaaaacaaatgtggacattgaaaaggtcatgattacagacgaagaggaaatcaggacaaccaatcccgtggctacggagcagtatggttctgtatctaccaacctccagagaggcaacagacaagcagctaccgcagatgtcaacacacaaggcgttcttccaggcatggtctggcaggacagagatgtgtaccttcaggggcccatctgggcaaagattccacacacggacggacattttcacccctctcccctcatgggtggattcggacttaaacaccctcctccacagattctcatcaagaacaccccggtacctgcgaatccttcgaccaccttcagtgcggcaaagtttgcttccttcatcacacagtactccacgggacaggtcagcgtggagatcgagtgggagctgcagaaggaaaacagcaaacgctggaatcccgaaattcagtacacttccaactacaacaagtctgttaatgtggactttactgtggacactaatggcgtgtattcagagcctcgccccattggcaccagatacctgactcgtaatctgtaattgcttgttaatcaataaaccgtttaattcgtttcagttgaactttggtctctgcgtatttctttcttatctagtttccatggctacgtagataagtagcatggcgggttaatcattaactacaaggaacccctagtgatggagttggccactccctctctgcgcgctcgctcgctcactgaggccgggcgaccaaaggtcgcccgacgcccgggctttgcccgggcggcctcagtgagcgagcgagcgcgcagagagggagtggccaa

SEQ ID NO: 15 - protein, 725 aa, Adeno-associated virus 5
MAADGYLPDWLEDTLSEGIRQWWKLKPGPPPPKPAERHKDDSRGLVLPGYKYLGPFNGLDKGEPVNEADAAALEHDKAYDRQLDSGDNPYLKYNHADAEFQERLKEDTSFGGNLGRAVFQAKKRVLEPFGLVEEGAKTAPTGKRIDDHFPKRKKARTEEDSKPSTSSDAEAGPSGSQQLQIPAQPASSLGADTMSAGGGGPLGDNNQGADGVGNASGDWHCDSTWMGDRVVTKSTRTWVLPSYNNHQYREIKSGSVDGSNANAYFGYSTPWGYFDFNRFHSHWSPRDWQRLINNYWGFRPRSLRVKIFNIQVKEVTVQDSTTTIANNLTSTVQVFTDDDYQLPYVVGNGTEGCLPAFPPQVFTLPQYGYATLNRDNTENPTERSSFFCLEYFPSKMLRTGNNFEFTYNFEEVPFHSSFAPSQNLFKLANPLVDQYLYRFVSTNNTGGVQFNKNLAGRYANTYKNWFPGPMGRTQGWNLGSGVNRASVSAFATTNRMELEGASYQVPPQPNGMTNNLQGSNTYALENTMIFNSQPANPGTTATYLEGNMLITSESETQPVNRVAYNVGGQMATNNQSSTTAPTTGTYNLQEIVPGSVWMERDVYLQGPIWAKIPETGAHFHPSPAMGGFGLKHPPPMMLIKNTPVPGNITSFSDVPVSSFITQYSTGQVTVEMEWELKKENSKRWNPEIQYTNNYNDPQFVDFAPDSTGEYRTTRPIGTRYLTRPL

SEQ ID NO: 16 - protein, 644 aa, Artificial Sequence
  Description of Artificial Sequence: Synthetic polypeptide
  MOD_RES (434)..(434): Xaa = any amino acid
KAYDQQLKAGDNPYLRYNHADAEFQERLQEDTSFGGNLGRAVFQAKKRVLEPLGLVETPAKTAPGKKRPVDSPDSTSGIGKKGQQPAKKRLNFGQTGDSESVPDPQPIGEPPAGPSGLGSGTMAAGGGAPMADNNEGADGVGNASGNWHCDSTWLGDRVITTSTRTWALPTYNNHLYKQISSQSAGSTNDNVYFGYSTPWGYFDFNRFHCHFSPRDWQRLINNNWGFRPKKLNFKLFNIQVKEVTTNDGVTTIANNLTSTVQVFSDSEYQLPYVLGSAHQGCLPPFPADVFMIPQYGYLTLNNGSQSVGRSSFYCLEYFPSQMLRTGNNFTFSYTFEDVPFHSSYAHSQSLDRLMNPLIDQYLYYLARTQSNAGGTAGNRELQFYQGGPTTMAEQAKNWLPGPCFRQQRVSKTLDQNNNSNFAWTGATKYHLNXRNSLVNPGVAMATHKDDEERFFPSSGVLIFGKTGAANKTTLENVLMTNEEEIRPTNPVATEEYGIVSSNLQAASTAAQTQVVNNQGALPGMVWQNRDVYLQGPIWAKIPHTDGNFHPSPLMGGFGLKHPPPQILIKNTPVPANPPEVFTPAKFASFITQYSTGQVSVEIEWELQKENSKRWNPEIQYTSNFDKQTGVDFAVDSQGVYSEP

SEQ ID NO: 17 - DNA, 1933 bp, Adeno-associated virus
caaggcctacgaccagcagctcaaagcgggtgacaatccgtacctgcggtataaccacgccgacgccgagtttcaggagtgtcttcaagaagatacgtcttttgggggcaacctcgggcgagcagtcttccaggccaaaaagcgggttctcgaacctcttggtctggttgagacgccagctaagacggcacctggaaagaagcgaccggtagactcgccagactccacctcgggcatcggcaagaaaggccagcagcccgcgaaaaagagactcaactttgggcagactggcgactcagagtcagtccccgaccctcaaccaatcggagaaccaccagcaggcccctctggtctgggatctggtacaatggttgcaggcggtggcgcaccaatggctgacaataacgagggcgccgacggagtgggtaatgcctcaggaaattggcattgcgattccacatggctgggcgacagagtcatcaccaccagcacccgaacctgggccctgcccacctacaacaaccacctctacaagcaaatctccagtcagtcagcagggagcaccaacgataacgtctatttcggctacagcaccccctgggggtattttgacttcaacagattccattgccacttctcaccacgtgactggcagcgacttatcaacaacaactggggattccggcccaagaagctcaacttcaagctcttcaacatccaggtcaaggaggtcacgacgaatgacggtgtcacaaccatcgctaataaccttaccagcacggttcaggtcttttcggactcggaatatcaactgccgtacgtcctcggctccgcgcaccagggctgcctgcctccgttcccggcagacgtgttcatgattccgcagtacggatacctgactctgaacaatggcagccaatcggtaggccgttcctccttctactgcctggagtactttccttctcagatgctgagaacgggcaacaacttcacctttagctacaccttcgaggacgtgcctttccacagcagctacgcgcacagccagagtctggaccggctgatgaatcccctcatcgaccagtacctgtactacttggccagaacacagagcaacgcaggaggtactgctggcaatcgggaactgcagttttatcagggcggacctaccaccatggccgaacaagcaaagaactggctgcccggaccttgcttccggcaacagagagtatccaagacgctggatcaaaataacaacagcaactttgcctggactggtgccacaaaataccatttaaatggaagaaattcattggttaatcccggtgtcgccatggcaacccacaaggacgacgaggaacgcttctccccttcgagcggagttctaatttttggcaaaactggagcagctaataaaactacattagaaaacgtgctcatgacaaatgaagaagaaattcgtcctaccaacccggtagctaccgaggaatacgggattgtaagcagcaacttgcaggcggctagcaccgcagcccagacacaagttgttaacaaccagggagccttacctggcatggtctggcagaaccgggacgtgtacctgcaaggtcccatttgggccaagattcctcacacggacggcaactttcacccgtctcctctaatgggtggctttggactgaaacacccgcctccccagatcctgatcaaaaacacgccggtacctgctaatcctccagaagtgtttactcctgccaagtttgcttccttcatcacgcagtacagcaccgggcaagtcagcgttgagatcgagtgggagctgcagaaagagaacagcaagcgctggaacccagagattcagtacacctccaactttgacaaacagactggagtggactttgctgttgacagccagggtgtttactctgagcct

SEQ ID NO: 18 - protein, 644 aa, Artificial Sequence
  Description of Artificial Sequence: Synthetic polypeptide
KAYDQQLKAGDNPYLRYNHADAEFQECLQEDTSFGGNLGRAVFQAKKRVLEPLGLVETPAKTAPGKKRPVDSPDSTSGIGKKGQQPAKKRLNFGQTGDSESVPDPQPIGEPPAGPSGLGSGTMVAGGGAPMADNNEGADGVGNASGNWHCDSTWLGDRVITTSTRTWALPTYNNHLYKQISSQSAGSTNDNVYFGYSTPWGYFDFNRFHCHFSPRDWQRLINNNWGFRPKKLNFKLFNIQVKEVTTNDGVTTIANNLTSTVQVFSDSEYQLPYVLGSAHQGCLPPFPADVFMIPQYGYLTLNNGSQSVGRSSFYCLEYFPSQMLRTGNNFTFSYTFEDVPFHSSYAHSQSLDRLMNPLIDQYLYYLARTQSNAGGTAGNRELQFYQGGPTTMAEQAKNWLPGPCFRQQRVSKTLDQNNNSNFAWTGATKYHLNGRNSLVNPGVAMATHKDDEERFSPSSGVLIFGKTGAANKTTLENVLMTNEEEIRPTNPVATEEYGIVSSNLQAASTAAQTQVVNNQGALPGMVWQNRDVYLQGPIWAKIPHTDGNFHPSPLMGGFGLKHPPPQILIKNTPVPANPPEVFTPAKFASFITQYSTGQVSVEIEWELQKENSKRWNPEIQYTSNFDKQTGVDFAVDSQGVYSEP

SEQ ID NO: 19 - DNA, 1933 bp, Adeno-associated virus
caaggcctacgaccagcagctcaaagcgggtgacaatccgtacctgcggtataaccacgccgacgccgagtttcaggagcgtcttcaagaagatacgtcttttgggggcaacctcgggcgagcagtcttccaggccaaaaagcgggttctcgaacctcttggtctggttgagacgccagctaagacggcacctggaaagaagcgaccggtagactcgccagactccacctcgggcatcggcaagaaaggccagcagcccgcgaaaaagagactcaactttgggcagactggcgactcagagccagtccccgaccctcaaccaatcggagaaccaccagcaggcccctctggtctgggatctggtacaatggctgcaggcggtggcgcaccaatggctgacaataacgagggcgccgacggagtgggtaatgcctcaggaaattggcattgcgattccacacggctgggcgacagagtcatcaccaccagcacccgaacctgggccctgcccacctacaacaaccacctctacaagcaaatctccagtcagtcagcagggagcaccaacgataacgtctatttcggctacagcaccccctgggggtattttgacttcaacagattccattgccacttctcaccacgtgactggcagcgacttatcaacaacaactggggattccggcccaagaagctcaacttcaagctcttcaacatccaggtcaaggaggtcacgacgaatgacggcgtcacaaccatcgctaataaccttaccagcacggttcaggtcttttcggactcggaatatcaactgccgtacgtcctcggctccgcgcaccagggctgcctgcctccgttcccggcagacgtgttcatgattccgcagtacggatacctgactctgaacaatggcagccaatcggtaggccgttcctccttctactgcctggagtactttccttctcagatgctgagaacgggcaacaacttcacctttagctacaccttcgaggacgtgcctttccacagcagctacgcgcacagccagagtctgggccggctgatgaatcccctcatcgaccagtacctgtactacttggccagaacacagagcaacgcaggaggtactgctggcaatcgggaactgcagttttatcagggcggacctaccaccatggccgaacaagcaaagaactggctgcccggaccttgcttccggcaacagagagtatccaagacgctggatcaaaataacaacagcaactttgcctggactggtgccacaaaataccatttaaatggaagaaattcattggttaatcccggtgtcgccatggcaacccacaaggacgacgaggaacgcttcttcccttcgagcggagttctaatttttggcaaaactggagcagctaataaaactacattagaaaacgtgctcatgacaaatgaagaagaaattcgtcctaccaacccggtagctaccgaggaatacgggattgtaagcagcaacttgcaggcggctagcaccgcagcccagacacaagttgttaacaaccagggagccttacctggcatggtctggcagaaccgggacgtgtacctgcaaggtcccatttgggccaagattcctcacacggacggcaactttcacccgtctcctctaatgggtggctttggactgaaacacccgcctccccagatcctgatcaaaaacacaccggtacctgctaatcctccagaagtgtttactcctgccaagtttgcttccttcatcacgcagtacagcaccgggcaagtcagcgttgagatcgaatgggagctgcagaaagagaacagcaagcgctggaacccagagattcagtacacctccaactttgacaaacagactggagtggactttgctgttgacagccagggtgtttactctgagcct

SEQ ID NO: 20 - protein, 644 aa, Artificial Sequence
  Description of Artificial Sequence: Synthetic polypeptide
KAYDQQLKAGDNPYLRYNHADAEFQERLQEDTSFGGNLGRAVFQAKKRVLEPLGLVETPAKTAPGKKRPVDSPDSTSGIGKKGQQPAKKRLNFGQTGDSEPVPDPQPIGEPPAGPSGLGSGTMAAGGGAPMADNNEGADGVGNASGNWHCDSTRLGDRVITTSTRTWALPTYNNHLYKQISSQSAGSTNDNVYFGYSTPWGYFDFNRFHCHFSPRDWQRLINNNWGFRPKKLNFKLFNIQVKEVTTNDGVTTIANNLTSTVQVFSDSEYQLPYVLGSAHQGCLPPFPADVFMIPQYGYLTLNNGSQSVGRSSFYCLEYFPSQMLRTGNNFTFSYTFEDVPFHSSYAHSQSLGRLMNPLIDQYLYYLARTQSNAGGTAGNRELQFYQGGPTTMAEQAKNWLPGPCFRQQRVSKTLDQNNNSNFAWTGATKYHLNGRNSLVNPGVAMATHKDDEERFFPSSGVLIFGKTGAANKTTLENVLMTNEEEIRPTNPVATEEYGIVSSNLQAASTAAQTQVVNNQGALPGMVWQNRDVYLQGPIWAKIPHTDGNFHPSPLMGGFGLKHPPPQILIKNTPVPANPPEVFTPAKFASFITQYSTGQVSVEIEWELQKENSKRWNPEIQYTSNFDKQTGVDFAVDSQGVYSEP

SEQ ID NO: 21 - DNA, 1933 bp, Adeno-associated virus; identical to SEQ ID NO: 19

SEQ ID NO: 22 - protein, 644 aa, Artificial Sequence; identical to SEQ ID NO: 20
  Description of Artificial Sequence: Synthetic polypeptide

SEQ ID NO: 23 - DNA, 1933 bp, Adeno-associated virus
caaggcctacgaccagcagctcaaagcgggtgacaatccgtacctgcggtataaccacgccgacgccgagtttcaggagcgtcttcaagaagatacgtcttttgggggcaacctcgggcgagcagtcttccaggccaaaaagcgggttctcgaacctcttggtctggttgagacgccagctaagacggcacctggaaagaagcgaccggtagactcgccagactccacctcgggcatcggcaagaaaggccagcagcccgcgaaaaagagactcaactttgggcagactggcgactcagagtcagtccccgaccctcaaccaatcggagaaccaccagcaggcccctctggtctgggatctggtacaatggctgcaggcggtggcgcaccaatggctgacaatagcgagggcgccgacggagtgggtaatgcctcaggaaattggcattgcgattccacatggctgggcgacagagtcatcaccaccagcacccgaacctgggccctgcccacctacaacaaccacctctacaagcaaatctccagtcagtcagcagggagcaccaacgataacgtctatttcggctacagcaccccctgggggtattttgacttcaacagattccattgccacttctcaccacgtgactggcagcgacttatcaacaacaactggggattccggcccaagaagctcaacttcaagctcttcaacatccaggtcaaggaggtcacgacgaatgacggtgtcacaaccatcgctaataaccttaccagcacggttcaggtcttttcggactcggaatatcaactgccgtacgtcctcggctccgcgcaccagggctgcctgcctccgttcccggcagacgtgttcatgattccgcagtacggatacctgactctgaacaatggcagccaatcggtaggccgttcctccttctactgcctggagtactttccttctcagatgctgagaacgggcaacaacttcacctttagctacaccttcgaggacgtgcctttccacagcagctacgcgcacagccagagtctggaccggctgatgaatcccctcatcgaccagtacctgtactacttggccagaacacagagcaacgcaggaggtactgctggcaatcgggaactgcagttttatcagggcggacctaccaccatggccgaacaagcaaagaactggctgcccggaccttgcttccggcaacagagagtatccaagacgctggatcaaaataacaacagcaactttgcctggactggtgccacaaaataccatttaaatggaagaaattcattggttaatcccggtgtcgccatggcaacccacaaggacgacgaggaacgcttcttcccttcgagcggagttctaatttttggcaaaactggagcagctaataaaactacattagaaaacgtgctcatgacaaatgaagaagaaattcgtcctaccaacccggtagctaccgaggaatacgggattgtaagcagcaacttgcaggcggctagcaccgcagcccagacacaagttgttaacaaccagggagccttacctggcatggtctggcagaaccgggacgtgtacctgcaaggtcccatttgggccaagattcctcacacggacggcaactttcacccgtctcctctaatgggtggctttggactgaaacacccgcctccccagatcctgatcaaaaacacaccggtacctgctaatcctccagaagtgtttactcctgccaagcttgcttccttcatcacgcagtacagcaccgggcaagtcagcgttgagatcgagtgggagctgcagaaagagaacagcaagcgctggaacccagagattcagtacacctccaactttgacaaacagactggagtggactttgctgttgacagccagggtgtttactctgagcct

SEQ ID NO: 24 - protein, 644 aa, Artificial Sequence
  Description of Artificial Sequence: Synthetic polypeptide
KAYDQQLKAGDNPYLRYNHADAEFQERLQEDTSFGGNLGRAVFQAKKRVLEPLGLVETPAKTAPGKKRPVDSPDSTSGIGKKGQQPAKKRLNFGQTGDSESVPDPQPIGEPPAGPSGLGSGTMAAGGGAPMADNSEGADGVGNASGNWHCDSTWLGDRVITTSTRTWALPTYNNHLYKQISSQSAGSTNDNVYFGYSTPWGYFDFNRFHCHFSPRDWQRLINNNWGFRPKKLNFKLFNIQVKEVTTNDGVTTIANNLTSTVQVFSDSEYQLPYVLGSAHQGCLPPFPADVFMIPQYGYLTLNNGSQSVGRSSFYCLEYFPSQMLRTGNNFTFSYTFEDVPFHSSYAHSQSLDRLMNPLIDQYLYYLARTQSNAGGTAGNRELQFYQGGPTTMAEQAKNWLPGPCFRQQRVSKTLDQNNNSNFAWTGATKYHLNGRNSLVNPGVAMATHKDDEERFFPSSGVLIFGKTGAANKTTLENVLMTNEEEIRPTNPVATEEYGIVSSNLQAASTAAQTQVVNNQGALPGMVWQNRDVYLQGPIWAKIPHTDGNFHPSPLMGGFGLKHPPPQILIKNTPVPANPPEVFTPAKLASFITQYSTGQVSVEIEWELQKENSKRWNPEIQYTSNFDKQTGVDFAVDSQGVYSEP

SEQ ID NO: 25 - DNA, 1933 bp, Adeno-associated virus
caaggcctacgaccagcagctcaaagcgggtgacaatccgtacctgcggtataaccacgccgacgccgagtttcaggagcgtcttcaagaagatacgtcttttgggggcaacctcgggcgagcagtcttccaggccaaaaagcgggttctcgaacctcttggtctggttgagacgccagctaagacggcacctggaaagaagcgaccggtagactcgccagactccacctcgggcatcggcaagaaaggccagcagcccgcgaaaaagagactcaactttgggcagactggcgactcagagtcagtccccgaccctcaaccaatcggagaaccaccagcaggcccctctggtctgggatctggtacaatggctgcaggcggtggcgcaccaatggctgacaataacgagggcgccgacggagtgggtaatgcctcaggaaattggcattgcgattccacatggctgggcgacagagtcatcaccaccagcacccgaacctgggccctgcccacctacaacaaccacctctacaagcaaatctccagtcagtcagcagggagcaccaacgataacgtctatttcggctacagcaccccctgggggtattttgacttcaacagattccattgccacttctcaccacgtgactggcagcgacttatcaacaacaactggggattccggcccaagaagctcaacttcaagctcttcaacatccaggtcaaggaggtcacgacgaatgacggcgtcacaaccatcgctaataaccttaccagcacggttcaggtcttttcggacccggaatatcaactgccgtacgtcctcggctccgcgcaccagggctgcctgcctccgttcccggcagacgtgttcatgattccgcagtacggatacctgactctgaacaatggcagccaatcggtaggccgttcctccttctactgcctggagtactttccttctcagatgctgagaacgggcaacaacttcacctttagctacaccttcgaggacgtgcctttccacagcagctacgcgcacagccagagtctggaccggctgatgaatcccctcatcgaccagtacctgtactacttggccagaacacagagcaacgcaggaggtactgctggcaatcgggaactgcagttttatcagggcggacctaccaccatggccgaacaagcaaagaactggctgcccggaccttgcttccggcaacagagagtatccaagacgctggatcaaaataacaacagcaactttgcctggactggtgccacaaaataccatttaaatggaagaaattcattggttaatcccggtgtcgccatggcaacccacaaggacgacgaggaacgcttcttcccttcgagcggagttctaatttttggcaaaactggagcagctaataaaactacattagaaaacgtgctcatgacaaatgaagaagaaattcgtcctaccaacccggtagctaccgaggaatacgggattgtaagcagcaacttgcaggcggctagcaccgcagcccagacacaagttgttaacaaccagggagccttacctggcatggtctggcagaaccgggacgtgtacctgcaaggtcccatttgggccaagattcctcacacggacggcaactttcacccgtctcctctaatgggtggctttggactgaaacacccgcctccccagatcctgatcaaaaacacaccggtacctgctaatcctccagaagtgtttactcctgccaagattgcttccttcatcacgcagtacagcaccgggcaagtcagcgttgagatcgagtgggagctgcagaaagagaacagcaagcgctggaacccagagattcagtacacctccaactttgacaaacagactggagtggactttgctgttgacagccagggtgtttactctgagcct

SEQ ID NO: 26 - protein, 644 aa, Artificial Sequence
  Description of Artificial Sequence: Synthetic polypeptide
KAYDQQLKAGDNPYLRYNHADAEFQERLQEDTSFGGNLGRAVFQAKKRVLEPLGLVETPAKTAPGKKRPVDSPDSTSGIGKKGQQPAKKRLNFGQTGDSESVPDPQPIGEPPAGPSGLGSGTMAAGGGAPMADNNEGADGVGNASGNWHCDSTWLGDRVITTSTRTWALPTYNNHLYKQISSQSAGSTNDNVYFGYSTPWGYFDFNRFHCHFSPRDWQRLINNNWGFRPKKLNFKLFNIQVKEVTTNDGVTTIANNLTSTVQVFSDPEYQLPYVLGSAHQGCLPPFPADVFMIPQYGYLTLNNGSQSVGRSSFYCLEYFPSQMLRTGNNFTFSYTFEDVPFHSSYAHSQSLDRLMNPLIDQYLYYLARTQSNAGGTAGNRELQFYQGGPTTMAEQAKNWLPGPCFRQQRVSKTLDQNNNSNFAWTGATKYHLNGRNSLVNPGVAMATHKDDEERFFPSSGVLIFGKTGAANKTTLENVLMTNEEEIRPTNPVATEEYGIVSSNLQAASTAAQTQVVNNQGALPGMVWQNRDVYLQGPIWAKIPHTDGNFHPSPLMGGFGLKHPPPQILIKNTPVPANPPEVFTPAKIASFITQYSTGQVSVEIEWELQKENSKRWNPEIQYTSNFDKQTGVDFAVDSQGVYSEP

SEQ ID NO: 27 - protein, 738 aa, Artificial Sequence
  Description of Artificial Sequence: Synthetic polypeptide
MAADGYLPDWLEDNLSEGIREWWALKPGAPKPKANQQKQDDGRGLVLPGYKYLGPFNGLDKGEPVNAADAAALEHDKAYDQQLKAGDNPYLRYNHADAEFQERLQEDTSFGGNLGRAVFQAKKRVLEPLGLVEEGAKTAPGKKRPVEPSPQRSPDSTTGIGKKGQQPAKKRLNFGQTGDSESVPDPQPIGEPPAGPSGLGSGTMAAGGGAPMADNNEGADGVGSSSGNWHCDSTWLGDRVITTSTRTWALPTYNNHLYKQISNGTSGGSTNDNTYFGYSTPWGYFDFNRFHCHFSPRDWQRLINNNWGFRPKRLNFKLFNIQVKEVTQNEGTKTIANNLTSTIQVFTDSEYQLPYVLGSARQGCLPPFPADVFMIPQYGYLTLNNGSQAVGRSSFYCLEYFPSQMLRTGNNFEFSYQFEDVPFHSSYAHSQSLDRLMNPLIDQYLYYLSRTQSTGGTAGTQQLLFSQAGPNNMSAQAKNWLPGPCYRQQRVSTTLSQNNNSNFAWTGATKYHLNGRDSLVNPGVAMATHKDDEERFFPSSGVLMFGKQGAGKGNVDYSSVMLTSEEEIKTTNPVATEQYGVVADNLQQQNAAPIVGAVNSQGALPGMVWQNRDVYLQGPIWAKIPHTDGNFHPSPLMGGFGLKHPPPQILIKNTPVPADPPTTFSQAKLASFITQYSTGQVSVEIEWELQKENSKRWNPEIQYTSNYYKSTNVDFAVNTDGTYSEPRPIGTRYLTRNL

SEQ ID NO: 28 - DNA, 3121 bp, Adeno-associated virus
gaattcgcccttctacggctgcgtcaactggaccaatgagaactttcccttcaacgactgtgtcgacaagatggtgatctggtgggaggaggggaagatgaccgccaaggtcgtggagtcggccaaagccattctcggaggaagcaaggtgcgcgtggaccagaaatgcaagtcctcggcccagatagacccgactcccgtgatcgtcacctccaacaccaacatgtgcgccgtgattgacgggaactcaacgaccttcgaacaccagcagccgttgcaagaccggatgttcaaatttgaactcacccgccgtctggatcatgactttgggaaggtcaccaagcaggaagtcaaagactttttccggtgggcaaaggatcacgtggttgaggtggagcacgaattctacgtcaaaaagggtggagccaagaaaagacccgcccccagtgacgcagatataagtgagcccaaacgggtgcgcgagtcagttgcgcagccatcgacgtcagacgcggaagcttcgatcaactacgcagacaggtaccaaaacaaatgttctcgtcacgcgggcatgaatctgatgctgtttccctgcagacaatgcgagagaatgaatcagaattcaaatatctgcttcactcacggacagaaagactgtttagagtgctttcccgtgtcagaatctcaacccgtttctgtcgtcaaaaaggcgtatcagaaactgtgctacattcatcatatcatgggaaaggtgccagacgcttgcactgcctgcgatctggtcgatgtggatttggatgactgcatctttgaacaataaatgatttaaatcaggtatggctgccgatggttatcttccagattggctcgaggacaacctctctgagggcattcgcgagtggtgggcgctgaaacctggagccccgaagcccaaagccaaccagcaaaagcaggacggcggccggggtctggtgcttcctggctacaagtacctcggacccttcaacggactcgacaagggggagcccgtcaacgcggcggacgcagcggccctcgagcacgacaaggcctacgaccagcagctcaaagcgggtgacaatccgtacctgcggtataaccacgccgacgccgagtttcaggagcgtctgcaagaagatacgtcttttgggggcaacctcgggcgagcagtcttccaggccaagaagcgggttctcgaacctctcggtctggttgaggaaggcgctaagacggctcctggaaagaagagaccggtagagccatcaccccagcgttctccagactcctctacgggcatcggcaagaaaggccagcagcccgcgaaaaagagactcaactttgggcagactggcgactcagagtcagtgcccgaccctcaaccaatcggagaaccccccgcaggcccctctggtctgggatctggtacaatggctgcaggcggtggcgctccaatggcagacaataacgaaggcgccgacggagtgggtagttcctcaggaaattggcattgcgattccacatggctgggcgactgagtcatcaccaccagcacccgaacctgggccctccccacctacaacaaccacctctacaagcaaatctccaacgggacttcgggaggaagcaccaacgacaacacctacttcggctacagcaccccctgggggtattttgactttaacagattccactgccacttctcaccacgtgactggcagcgactcatcaacaacaactggggattccggcccaagagactcaacttcaagctcttcaacatccaggtcaaggaggtcacgcagaatgaaggcaccaagaccatcgccaataaccttaccagcacgattcaggtctttacggactcggaataccagctcccgtacgtcctcggctctgcgcaccagggctgcctgcctccgttcccggcggacgtcttcatgattcctcagtacgggtacctgactctgaacaatggcagtcaggccgtgggccgttcctccttctactgcctggagtactttccttctcaaatgctgagaacgggcaacaactttgagttcagctaccagtttgaggacgtgccttttcacagcagctacgcgcacagccaaagcctggaccggctgatgaaccccctcatcgaccagtacctgtactacctgtctcggactcagtccacgggaggtaccgcaggaactcagcagttgctattttctcaggccgggcctaataacatgtcggctcaggccaaaaactggctacccgggccctgctaccggcagtaacgcgtctccacgacactgtcgcaaaataacaacagcaactttgtctggaccggtgccaccaagtatcatctgaatggcagagactctctggtagatcccggtgtcgctatggcaacccacaaggacgacgaagagcgattttttccgtccagcggagtcataatgtttgggaaacagggagctggaaaagacaacgtggactatagcagcgtcatgctaaccagtgaggaagaaattaaaaccaccaacccagtggccacagaacagtacggcgtggtggccgataacctgcaacagcaaaacgccgctcctattgtaggggccgtcaacagtcaaggagccttacctggcatggtctggcagaaccgggacgtgtacctgcagggtcctacctgggccaagattcctcacacggacggaaactttcatccctcgccgctgatgggaggctttggactgaaacacccgcctcctcagatcctgattaagaatacacctgttcccgcggatcctccaactaccttcagtcaagctaagctggcgtcgttcatcacgcagtacagcaccggacaggtcagcgtggaaattgaatgggagctgcaggaagaaaacagcaaacgctggaacccagagattcaatacacttccaactactacaaatctacaaatgtggactttgctgttaacacagatggcacttattctgagcctcgccccatcggcacccgttacctcacccgtaatctgtaattgcttgttaatcaataaaccggttgattcgtttcagttgaactttggtctctgcgaagggcgaattc

SEQ ID NO: 29 - protein, 738 aa, Artificial Sequence
  Description of Artificial Sequence: Synthetic polypeptide
MAADGYLPDWLEDNLSEGIREWWALKPGAPKPKANQQKQDDGRGLVLPGYKYLGPFNGLDKGEPVNAADAAALEHDKAYDQQLKAGDNPYLRYNHADAEFQERLQEDTSFGGNLGRAVFQAKKRVLEPLGLVEEGAKTAPGKKRPVEPSPQRSPDSSTGIGKKGQQPAKKRLNFGQTGDSESVPDPQPIGEPPAGPSGLGSGTMAAGGGAPMADNNEGADGVGSSSGNWHCDSTWLGDGVITTSTRTWALPTYNNHLYKQISNGTSGGSTNDNTYFGYSTPWGYFDFNRFHCHFSPRDWQRLINNNWGFRPKSLNFKLFNIQVKEVTQNEGTKTIANNLTSTIQVFTDSEYQLPYVLGSAHQGCLPPFPADVFMIPQYGYLTLNNGSQAVGRSSFYCLEYFPSQMLRTGNNFEFSYQFEDVPFHSSYAHSQSLDRLMNPLIDQYLYYLSRTQSTGGTAGTQQLLFSQAGPNNMSAQAKNWLPGPCYRQQRVSTTLSQNDNSNFAWTGATKYHLNGRDSLVNPGVAMATHKDDEERFFPSSGVLMFGKQGAGKDNVDYSSVMLTSEEEIKTTNPVATEQYGVVADNLQQQNAAPIVGAVNSQGALPGMVWQNRDVYLQGPIWAKIPHTDGNFHPSPLMGGFGLKHPPPQILIKNTPVPADPPTTFSQAKLASFITQYSTGQVSVEIEWELQKENSKRWNPEIQYTSNYYKSTNVDFAVNTDGTYSEPRPIGTRYLTRNL

SEQ ID NO: 30 - DNA, 3121 bp, Adeno-associated virus
gaattcgcccttcgcgagaccaaagttcaactgaaacgaatcaaccggtttattgattaacaagcaattacagattacgggtgaggtaacgggtgccgatggggcgaggctcagaataagtgccatctgtgttaacagcaaagtccacatttgtagatttgtagtagttggaagtgtattgaatctctgggttccagcgtttgctgttttctttctgcagctcccattcaatttccacgctgacctgtccggtgctgtactgcgtgatgaacgacgccagcttagcttgactgaaggtagttggaggatccgcgggaacaggtgtattcttaatcaggatctgaggaggcgggtgtttcagtccaaagcctcccatcagcggcgagggatgaaagtttccgtccgtgtgaggaatcttggcccagataggaccctgcaggtacacgtcccggttctgccagaccatgccaggtaaggctccttgactgttgacggcccctacaataggagcggcgttttgctgttgcaggttatcggccaccacgccgtactgttctgtggccactgggttggtggttttaatttcttcctcactggttagcataacgctgctatagtccacgttgtcttttccagctccctgtttcccaaacattaagactccgctggacggaaaaaatcgctcttcgtcgtccttgtgggttgccatagcgacaccgggatttaccagagagtctctgccattcagatgatacttggtggcaccggtccaggcaaagttgctgttgtcattttgcgacagtgtcgtggagacgcgttgctgccggtagcagggcccgggtagccagtttttggcctgagccgacatgttattaggcccggcctgagaaaatagcaactgctgagttcctgcggtacctcccgtggactgagtccgagacaggtagtacaggtactggtcgatgagggggttcatcagccggtccaggctttggctgtgcgcgtagctgctgtgaaaaggcacgtcctcaaactggtagctgaactcaaagttgttgcccgttctcagcatttgagaaggaaagtactccaggcagtagaaggaggaacggcccacggcctgactgccattgttcagagtcaggtacccgtactgaggaatcatgaagacgtccgccgggaacggaggcaggcagccctggtgcgcagagccgaggacgtacgggagctggtattccgagtccgtaaagacctgaatcgtgctggtaaggttattggcgatggtcttggtgccttcattctgcgtgacctccttgacctggatgttgaagagcttgaagttgaggctcttgggccggaatccccagttgttgttgatgagtcgctgccagtcacgtggtgagaagtggcagtggaatctgttaaagtcaaaatacccccagggggtgctgtagccgaagtaggtgttgtcgttggtgcttcctcccgaagtcccgttggagatttgcttgtagaggtggttgttgtaggtggggagggcccaggttcgggtgctggtggtgatgactccgtcgcccagccatgtggaatcgcaatgccaatttcctgaggaactacccactccgtcggcgccttcgttattgtctgccattggagcgccaccgcctgcagccattgtaccagatcccagaccagaggggcctgcggggggttctccgattggttgagggtcgggcactgactctgagtcgccagtctgcccaaagttgagtctctttttcgcgggctgctggcctttcttgccgatgcccgtagaggagtctggagaacgctggggtgatggctctaccggtctcttctttccaggagccgtcttagcgccttcctcaaccagaccgagaggttcgagaacccgcttcttggcctggaagactgctcgcccgaggttgcccccaaaagacgtatcttcttgcagacgctcctgaaactcggcgtcggcgtggttataccgcaggtacggattgtcacccgctttgagctgctggtcgtaggccttgtcgtgctcgagggccgctgcgtccgccgcgttgacgggctcccccttgtcgagtccgttgaagggtccgaggtacttgtagccaggaagcaccagaccccggccgtcgtcctgcttttgctggttggctttgggcttcggggctccaggtttcagcgcccaccactcgcgaatgccctcagagaggttgtcctcgagccaatctggaagataaccatcggcagccatacctgatttaaatcatttattgttcaaagatgcagtcatccaaatccacattgaccagatcgcaggcagtgcaagcgtctggcacctttcccatgatatgatgaatgtagcacagtttctgatacgcctttttgacgacagaaacgggttgagattctgacacgggaaagcactctaaacagtctttctgtccgtgagtgaagcagatatttgaattctgattcattctctcgcattgtctgcagggaaacagcatcagattcatgcccacgtgacgagaacatttgttttggtacctgtctgcgtagttgatcgaagcttccgcgtctgacgtcgatggctgcgcaactgactcgcgcacccgtttgggctcacttatatctgcgtcactgggggcgggtcttttcttggctccaccctttttgacgtagaattcatgctccacctcaaccacgtgatcctttgcccaccggaaaaagtctttgacttcctgcttggtgaccttcccaaagtcatgatccagacggcgggtgagttcaaatttgaacatccggtcttgcaacggctgctggtgttcgaaggtcgttgagttcccgtcaatcacggcgcacatgttggtgttggaggtgacgatcacgggagtcgggtctatctgggccgaggacttgcatttctggtccacgcgcaccttgcttcctccgagaatggctttggccgactccacgaccttggcggtcatcttcccctcctcccaccagatcaccatcttgtcgacacagtcgttgaagggaaagttctcattggtccagttgacgcagccgtagaaagggcgaattc

SEQ ID NO: 31 - DNA, 2211 bp, Adeno-associated virus
atggctgctgacggttatcttccagattggctcgaggacaacctttctgaaggcattcgtgagtggtgggctctgaaacctggagtccctcaacccaaagcgaaccaacaacaccaggacaaccgtcggggtcttgtgcttccgggttacaaatacctcggacccggtaacggactcgacaaaggagagccggtcaacgaggcggacgcggcagccctcgaacacgacaaagcttacgaccagcagctcaaggccggtgacaacccgtacctcaagtacaaccacgccgacgccgagtttcaggagcgtcttcaagaagatacgtcttttgggggcaaccttggcagagcagtcttccaggccaaaaagaggatccttgagcctcttggtctggttgaggaagcagctaaaacggctcctggaaagaagggggctgtagatcagtctcctcaggaaccggactcatcatctggtgttggcaaatcgggcaaacagcctgccagaaaaagactaaatttcggtcagactggagactcagagtcagtcccagaccctcaacctctcggagaaccaccagcagcccccacaagtttgggatctaatacaatggcttcaggcggtggcgcaccaatggcagacaataacgagggtgccgatggagtgggtaattcctcaggaaattggcattgcgattcccaatggctgggcgacagagtcatcaccaccagcaccagaacctgggccctgcccacttacaacaaccatctctacaagcaaatctccagccaatcaggagcttcaaacgacaaccactactttggctacagcaccccttgggggtattttgactttaacagattccactgccacttctcaccacgtgactggcagcgactcattaacaacaactggggattccggcccaagaaactcagcttcaagctcttcaacatccaagttagaggggtcacgcagaacgatggcacgacgactattgccaataaccttaccagcacggttcaagtgtttacggactcggagtatcagctcccgtacgtgctcgggtcggcgcaccaaggctgtctcccgccgtttccagcggacgtcttcatggtccctcagtatggatacctcaccctgaacaacggaagtcaagcggtgggacgctcatccttttactgcctggagtacttcccttcgcagatgctaaggactggaaataacttccaattcagctataccttcgaggatgtaccttttcacagcagctacgctcacagccagagtttggatcgcttgatgaatcctcttattgatcagtatctgtactacctgaacagaacgcaaggaacaacctctggaacaaccaaccaatcacggctgctttttagccaggctgggcctcagtctatgtctttgcaggccagaaattggctacctgggccctgctaccggcaacagagactttcaaagactgctaacgacaacaacaacagtaactttccttggacagcggccagcaaatatcatctcaatggccgcgactcgctggtgaatccaggaccagctatggccagtcacaaggacgatgaagaaaaatttttccctatgcacggcaatctaatatttggcaaagaagggacaacggcaagtaacgcagaattagataatgtaatgattacggatgaagaagagattcgtaccaccaatcctgtggcaacagagcagtatggaactgtggcaaataacttgcagagctcaaatacagctcccacgactggaactgtcaatcatcagggggccttacctggcatggtgtggcaagatcgtgacgtgtaccttcaaggacctatctgggcaaagattcctcacacggatggacactttcatccttctcctctgatgggaggctttggactgaaacatccgcctcctcaaatcatgatcaaaaatactccggtaccggcaaatcctccgacgactttcagcccggccaagtttgcttcatttatcactcagtactccactggacaggtcagcgtggaaattgagtgggagctacagaaagaaaacagcaaacgttggaatccagagattcagtacacttccaactacaacaagtctgttaatgtggactttactgtagacactaatggtgtttatagtgaacctcgccctattggaacccggtatctcacacgaaacttgtga

SEQ ID NO: 32 - protein, 736 aa, Adeno-associated virus 3
MAADGYLPDWLEDNLSEGIREWWALKPGVPQPKANQQHQDNRRGLVLPGYKYLGPGNGLDKGEPVNEADAAALEHDKAYDQQLKAGDNPYLKYNHADAEFQERLQEDTSFGGNLGRAVFQAKKRILEPLGLVEEAAKTAPGKKGAVDQSPQEPDSSSGVGKSGKQPARKRLNFGQTGDSESVPDPQPLGEPPAAPTSLGSNTMASGGGAPMADNNEGADGVGNSSGNWHCDSQWLGDRVITTSTRTWALPTYNNHLYKQISSQSGASNDNHYFGYSTPWGYFDFNRFHCHFSPRDWQRLINNNWGFRPKKLSFKLFNIQVRGVTQNDGTTTIANNLTSTVQVFTDSEYQLPYVLGSAHQGCLPPFPADVFMVPQYGYLTLNNGSQAVGRSSFYCLEYFPSQMLRTGNNFQFSYTFEDVPFHSSYAHSQSLDRLMNPLIDQYLYYLNRTQGTTSGTTNQSRLLFSQAGPQSMSLQARNWLPGPCYRQQRLSKTANDNNNSNFPWTAASKYHLNGRDSLVNPGPAMASHKDDEEKFFPMHGNLIFGKEGTTASNAELDNVMITDEEEIRTTNPVATEQYGTVANNLQSSNTAPTTGTVNHQGALPGMVWQDRDVYLQGPIWAKIPHTDGHFHPSPLMGGFGLKHPPPQIMIKNTPVPANPPTTFSPAKFASFITQYSTGQVSVEIEWELQKENSKRWNPEIQYTSNYNKSVNVDFTVDTNGVYSEPRPIGTRYLTRNL

SEQ ID NO: 33 - DNA, 4726 bp, Adeno-associated virus 3
ttggccactccctctatgcgcactcgctcgctcggtggggcctggcgaccaaaggtcgccagacggacgtgctttgcacgtccggccccaccgagcgagcgagtgcgcatagagggagtggccaactccatcactagaggtatggcagtgacgtaacgcgaagcgcgcgaagcgagaccacgcctaccagctgcgtcagcagtcaggtgacccttttgcgacagtttgcgacaccacgtggccgctgagggtatatattctcgagtgagcgaaccaggagctccattttgaccgcgaaatttgaacgagcagcagccatgccggggttctacgagattgtcctgaaggtcccgagtgacctggacgagcgcctgccgggcatttctaactcgtttgttaactgggtggccgagaaggaatgggacgtgccgccggattctgacatggatccgaatctgattgagcaggcacccctgaccgtggccgaaaagcttcagcgcgagttcctggtggagtggcgccgcgtgagtaaggccccggaggccctcttttttgtccagttcgaaaagggggagacctacttccacctgcacgtgctgattgagaccatcggggtcaaatccatggtggtcggccgctacgtgagccagattaaagagaagctggtgacccgcatctaccgcggggtcgagccgcagcttccgaactggttcgcggtgaccaaaacgcgaaatggcgccgggggcgggaacaaggtggtggacgactgctacatccccaactacctgctccccaagacccagcccgagctccagtgggcgtggactaacatggaccagtatttaagcgcctgtttgaatctcgcggagcgtaaacggctggtggcgcagcatctgacgcacgtgtcgcagacgcaggagcagaacaaagagaatcagaaccccaattctgacgcgccggtcatcaggtcaaaaacctcagccaggtacatggagctggtcgggtggctggtggaccgcgggatcacgtcagaaaagcaatggattcaggaggaccaggcctcgtacatctccttcaacgccgcctccaactcgcggtcccagatcaaggccgcgctggacaatgcctccaagatcatgagcctgacaaagacggctccggactacctggtgggcagcaacccgccggaggacattaccaaaaatcggatctaccaaatcctggagctgaacgggtacgatccgcagtacgcggcctccgtcttcctgggctgggcgcaaaagaagttcgggaagaggaacaccatctggctctttgggccggccacgacgggtaaaaccaacatcgcggaagccatcgcccacgccgtgcccttctacggctgcgtaaactggaccaatgagaactttcccttcaacgattgcgtcgacaagatggtgatctggtgggaggagggcaagatgacggccaaggtcgtggagagcgccaaggccattctgggcggaagcaaggtgcgcgtggaccaaaagtgcaagtcatcggcccagatcgaacccactcccgtgatcgtcacctccaacaccaacatgtgcgccgtgattgacgggaacagcaccaccttcgagcatcagcagccgctgcaggaccggatgtttgaatttgaacttacccgccgtttggaccatgactttgggaaggtcaccaaacaggaagtaaaggactttttccggtgggcttccgatcacgtgactgacgtggctcatgagttctacgtcagaaagggtggagctaagaaacgccccgcctccaatgacgcggatgtaagcgagccaaaacgggagtgcacgtcacttgcgcagccgacaacgtcagacgcggaagcaccggcggactacgcggacaggtaccaaaacaaatgttctcgtcacgtgggcatgaatctgatgctttttccctgtaaaacatgcgagagaatgaatcaaatttccaatgtctgttttacgcatggtcaaagagactgtggggaatgcttccctggaatgtcagaatctcaacccgtttctgtcgtcaaaaagaagacttatcagaaactgtgtccaattcatcatatcctgggaagggcacccgagattgcctgttcggcctgcgatttggccaatgtggacttggatgactgtgtttctgagcaataaatgacttaaaccaggtatggctgctgacggttatcttccagattggctcgaggacaacctttctgaaggcattcgtgagtggtgggctctgaaacctggagtccctcaacccaaagcgaaccaacaacaccaggacaaccgtcggggtcttgtgcttccgggttacaaatacctcggacccggtaacggactcgacaaaggagagccggtcaacgaggcggacgcggcagccctcgaacacgacaaagcttacgaccagcagctcaaggccggtgacaacccgtacctcaagtacaaccacgccgacgccgagtttcaggagcgtcttcaagaagatacgtcttttgggggcaaccttggcagagcagtcttccaggccaaaaagaggatccttgagcctcttggtctggttgaggaagcagctaaaacggctcctggaaagaagggggctgtagatcagtctcctcaggaaccggactcatcatctggtgttggcaaatcgggcaaacagcctgccagaaaaagactaaatttcggtcagactggagactcagagtcagtcccagaccctcaacctctcggagaaccaccagcagcccccacaagtttgggatctaatacaatggcttcaggcggtggcgcaccaatggcagacaataacgagggtgccgatggagtgggtaattcctcaggaaattggcattgcgattcccaatggctgggcgacagagtcatcaccaccagcaccagaacctgggccctgcccacttacaacaaccatctctacaagcaaatctccagccaatcaggagcttcaaacgacaaccactactttggctacagcaccccttgggggtattttgactttaacagattccactgccacttctcaccacgtgactggcagcgactcattaacaacaactggggattccggcccaagaaactcagcttcaagctcttcaacatccaagttagaggggtcacgcagaacgatggcacgacgactattgccaataaccttaccagcacggttcaagtgtttacggactcggagtatcagctcccgtacgtgctcgggtcggcgcaccaaggctgtctcccgccgtttccagcggacgtcttcatggtccctcagtatggatacctcaccctgaacaacggaagtcaagcggtgggacgctcatccttttactgcctggagtacttcccttcgcagatgctaaggactggaaataacttccaattcagctataccttcgaggatgtaccttttcacagcagctacgctcacagccagagtttggatcgcttgatgaatcctcttattgatcagtatctgtactacctgaacagaacgcaaggaacaacctctggaacaaccaaccaatcacggctgctttttagccaggctgggcctcagtctatgtctttgcaggccagaaattggctacctgggccctgctaccggcaacagagactttcaaagactgctaacgacaacaacaacagtaactttccttggacagcggccagcaaatatcatctcaatggccgcgactcgctggtgaatccaggaccagctatggccagtcacaaggacgatgaagaaaaatttttccctatgcacggcaatctaatatttggcaaagaagggacaacggcaagtaacgcagaattagataatgtaatgattacggatgaagaagagattcgtaccaccaatcctgtggcaacagagcagtatggaactgtggcaaataacttgcagagctcaaatacagctcccacgactggaactgtcaatcatcagggggccttacctggcatggtgtggcaagatcgtgacgtgtaccttcaaggacctatctgggcaaagattcctcacacggatggacactttcatccttctcctctgatgggaggctttggactgaaacatccgcctcctcaaatcatgatcaaaaatactccggtaccggcaaatcctccgacgactttcagcccggccaagtttgcttcatttatcactcagtactccactggacaggtcagcgtggaaattgagtgggagctacagaaagaaaacagcaaacgttggaatccagagattcagtacacttccaactacaacaagtctgttaatgtggactttactgtagacactaatggtgtttatagtgaacctcgccctattggaacccggtatctcacacgaaacttgtgaatcctggttaatcaataaaccgtttaattcgtttcagttgaactttggctcttgtgcacttctttatctttatcttgtttccatggctactgcgtagataagcagcggcctgcggcgcttgcgcttcgcggtttacaactgctggttaatatttaactctcgccatacctctagtgatggagttggccactccctctatgcgcactcgctcgctcggtggggcctggcgaccaaaggtcgccagacggacgtgctttgcacgtccggccccaccgagcgagcgagtgcgcatagagggagtggccaa

SEQ ID NO: 34 - protein, 737 aa, Artificial Sequence
  Description of Artificial Sequence: Synthetic polypeptide
MAADGYLPDWLEDNLSEGIREWWDLKPGAPKPKANQQKQDNGRGLVLPGYKYLGPFNGLDKGEPVNAADAAALEHDKAYDQQLNAGDNPYLRYNHADAEFQERLQEDTSFGGNLGRAVFQAKKRVLEPLGLVEEGAKTAPAKKRPVEPSPQRSPDSSTGIGKKGQQPARKRLNFGQTGDSESVPDPQPLGEPPAAPSSVGSGTVAAGGGAPMADNNEGADGVGNASGNWHCDSTWLGDRVITTSTRTWALPTYNNHLYEQISSETAGSTNDNTYFGYSTPWGYFDFNRFHCHFSPRDWQRLINNNWGFRPKKLRFKLFNIQVKEVTTNDGVTTIANNLTSTIQVFSDSEYQLPYVLGSAHQGCLPPFPADVFMIPQYGYLTLNNGSQSVGRSSFYCLEYFPSQMLRTGNNFEFSYSFEDVPFHSSYAHSQSLDRLMNPLIDQYLYYLARTQSDPGGTAGNRELQFYQGGPSTMAEQAKNWLPGPCFRQQRVSKTLDQNNNSNFAWTGATKYHLNGRNSLVNPGVAMATHKDDEDRFFPSSGVLIFGKTGATNKTTLENVLMTNEEEIRPTNPVATEEYGIVSSNLQAANTAAQTQVVNNQGALPGMVWQNRDVYLQGPIWAKIPHTDGNFHPSPLMGGFGLKHPPPQILIKNTPVPANPPEVFTPAKFASFITQYSTGQVSVEIEWELQKENSKRWDPEIQYTSNFEKQTGVDFAVDSQGVYSEPRPIGTRYLTRNL

SEQ ID NO: 35 - DNA, 2211 bp, Adeno-associated virus
atggctgctgacggttatcttccagattggctcgaggacaacctttctgaaggcattcgtgagtggtgggctctgaaacctggagtccctcaacccaaagcgaaccaacaacaccaggacaaccgtcggggtcttgtgcttccgggttacaaatacctcggacccggtaacggactcgacaaaggagagccggtcaacgaggcggacgcggcagccctcgaacacgacaaagcttacgaccagcagctcaaggccggtgacaacccgtacctcaagtacaaccacgccgacgccgagtttcaggagcgtcttcaagaagatacgtcttttgggggcaaccttggcagagcagtcttccaggccaaaaagaggatccttgagcctcttggtctggttgaggaagcagctaaaacggctcctggaaagaagggggctgtagatcagtctcctcaggaaccggactcatcatctggtgttggcaaatcgggcaaacagcctgccagaaaaagactaaatttcggtcagactggagactcagagtcagtcccagaccctcaacctctcggagaaccaccagcagcccccacaagtttgggatctaatacaatggcttcaggcggtggcgcaccaatggcagacaataacgagggtgccgatggagtgggtaattcctcaggaaattggcattgcgattcccaatggctgggcgacagagtcatcaccaccagcaccagaacctgggccctgcccacttacaacaaccatctctacaagcaaatctccagccaatcaggagcttcaaacgacaaccactactttggctacagcaccccttgggggtattttgactttaacagattccactgccacttctcaccacgtgactggcagcgactcattaacaacaactggggattccggcccaagaaactcagcttcaagctcttcaacatccaagttagaggggtcacgcagaacgatggcacgacgactattgccaataaccttaccagcacggttcaagtgtttacggactcggagtatcagctcccgtacgtgctcgggtcggcgcaccaaggctgtctcccgccgtttccagcggacgtcttcatggtccctcagtatggatacctcaccctgaacaacggaagtcaagcggtgggacgctcatccttttactgcctggagtacttcccttcgcagatgctaaggactggaaataacttccaattcagctataccttcgaggatgtaccttttcacagcagctacgctcacagccagagtttggatcgcttgatgaatcctcttattgatcagtatctgtactacctgaacagaacgcaaggaacaacctctggaacaaccaaccaatcacggctgctttttagccaggctgggcctcagtctatgtctttgcaggccagaaattggctacctgggccctgctaccggcaacagagactttcaaagactgctaacgacaacaacaacagtaactttccttggacagcggccagcaaatatcatctcaatggccgcgactcgctggtgaatccaggaccagctatggccagtcacaaggacgatgaagaaaaatttttccctatgcacggcaatctaatatttggcaaagaagggacaacggcaagtaacgcagaattagataatgtaatgattacggatgaagaagagattcgtaccaccaatcctgtggcaacagagcagtatggaactgtggcaaataacttgcagagctcaaatacagctcccacgactggaactgtcaatcatcagggggccttacctggcatggtgtggcaagatcgtgacgtgtaccttcaaggacctatctgggcaaagattcctcacacggatggacactttcatccttctcctctgatgggaggctttggactgaaacatccgcctcctcaaatcatgatcaaaaatactccggtaccggcaaatcctccgacgactttcagcccggccaagtttgcttcatttatcactcagtactccactggacaggtcagcgtggaaattgagtgggagctacagaaagaaaacagcaaacgttggaatccagagattcagtacacttccaactacaacaagtctgttaatgtggactttactgtagacactaatggtgtttatagtgaacctcgccctattggaacccggtatctcacacgaaacttgtaa

SEQ ID NO: 36 - protein, 736 aa, Adeno-associated virus; identical to SEQ ID NO: 32

SEQ ID NO: 37 - protein, 736 aa, Adeno-associated virus 3A; identical to SEQ ID NO: 32

SEQ ID NO: 38 - protein, 624 aa, Adeno-associated virus 3A
MPGFYEIVLKVPSDLDERLPGISNSFVNWVAEKEWDVPPDSDMDPNLIEQAPLTVAEKLQREFLVEWRRVSKAPEALFFVQFEKGETYFHLHVLIETIGVKSMVVGRYVSQIKEKLVTRIYRGVEPQLPNWFAVTKTRNGAGGGNKVVDDCYIPNYLLPKTQPELQWAWTNMDQYLSACLNLAERKRLVAQHLTHVSQTQEQNKENQNPNSDAPVIRSKTSARYMELVGWLVDRGITSEKQWIQEDQASYISFNAASNSRSQIKAALDNASKIMSLTKTAPDYLVGSNPPEDITKNRIYQILELNGYDPQYAASVFLGWAQKKFGKRNTIWLFGPATTGKTNIAEAIAHAVPFYGCVNWTNENFPFNDCVDKMVIWWEEGKMTAKVVESAKAILGGSKVRVDQKCKSSAQIEPTPVIVTSNTNMCAVIDGNSTTFEHQQPLQDRMFEFELTRRLDHDFGKVTKQEVKDFFRWASDHVTDVAHEFYVRKGGAKKRPASNDADVSEPKRECTSLAQPTTSDAEAPADYADRYQNKCSRHVGMNLMLFPCKTCERMNQISNVCFTHGQRDCGECFPGMSESQPVSVVKKKTYQKLCPIHHILGRAPEIACSACDLANVDLDDCVSEQ

SEQ ID NO: 39 - protein, 736 aa, Adeno-associated virus 3B
MAADGYLPDWLEDNLSEGIREWWALKPGVPQPKANQQHQDNRRGLVLPGYKYLGPGNGLDKGEPVNEADAAALEHDKAYDQQLKAGDNPYLKYNHADAEFQERLQEDTSFGGNLGRAVFQAKKRILEPLGLVEEAAKTAPGKKRPVDQSPQEPDSSSGVGKSGKQPARKRLNFGQTGDSESVPDPQPLGEPPAAPTSLGSNTMASGGGAPMADNNEGADGVGNSSGNWHCDSQWLGDRVITTSTRTWALPTYNNHLYKQISSQSGASNDNHYFGYSTPWGYFDFNRFHCHFSPRDWQRLINNNWGFRPKKLSFKLFNIQVKEVTQNDGTTTIANNLTSTVQVFTDSEYQLPYVLGSAHQGCLPPFPADVFMVPQYGYLTLNNGSQAVGRSSFYCLEYFPSQMLRTGNNFQFSYTFEDVPFHSSYAHSQSLDRLMNPLIDQYLYYLNRTQGTTSGTTNQSRLLFSQAGPQSMSLQARNWLPGPCYRQQRLSKTANDNNNSNFPWTAASKYHLNGRDSLVNPGPAMASHKDDEEKFFPMHGNLIFGKEGTTASNAELDNVMITDEEEIRTTNPVATEQYGTVANNLQSSNTAPTTRTVNDQGALPGMVWQDRDVYLQGPIWAKIPHTDGHFHPSPLMGGFGLKHPPPQIMIKNTPVPANPPTTFSPAKFASFITQYSTGQVSVEIEWELQKENSKRWNPEIQYTSNYNKSVNVDFTVDTNGVYSEPRPIGTRYLTRNL

SEQ ID NO: 40 - protein, 624 aa, Adeno-associated virus 3B
MPGFYEIVLKVPSDLDEHLPGISNSFVNWVAEKEWELPPDSDMDPNLIEQAPLTVAEKLQREFLVEWRRVSKAPEALFFVQFEKGETYFHLHVLIETIGVKSMVVGRYVSQIKEKLVTRIYRGVEPQLPNWFAVTKTRNGAGGGNKVVDDCYIPNYLLPKTQPELQWAWTNMDQYLSACLNLAERKRLVAQHLTHVSQTQEQNKENQNPNSDAPVIRSKTSARYMELVGWLVDRGITSEKQWIQEDQASYISFNAASNSRSQIKAALDNASKIMSLTKTAPDYLVGSNPPEDITKNRIYQILELNGYDPQYAASVFLGWAQKKFGKRNTIWLFGPATTGKTNIAEAIAHAVPFYGCVNWTNENFPFNDCVDKMVIWWEEGKMTAKVVESAKAILGGSKVRVDQKCKSSAQIEPTPVIVTSNTNMCAVIDGNSTTFEHQQPLQDRMFKFELTRRLDHDFGKVTKQEVKDFFRWASDHVTDVAHEFYVRKGGAKKRPASNDADVSEPKRQCTSLAQPTTSDAEAPADYADRYQNKCSRHVGMNLMLFPCKTCERMNQISNVCFTHGQRDCGECFPGMSESQPVSVVKKKTYQKLCPIHHILGRAPEIACSACDLANVDLDDCVSEQ

SEQ ID NO: 41 - DNA, 4722 bp, Adeno-associated virus 3B
tggccactccctctatgcgcactcgctcgctcggtggggcctggcgaccaaaggtcgccagacggacgtgctttgcacgtccggccccaccgagcgagcgagtgcgcatagagggagtggccaactccatcactagaggtatggcagtgacgtaacgcgaagcgcgcgaagcgagaccacgcctaccagctgcgtcagcagtcaggtgacccttttgcgacagtttgcgacaccacgtggccgctgagggtatatattctcgagtgagcgaaccaggagctccattttgaccgcgaaatttgaacgagcagcagccatgccggggttctacgagattgtcctgaaggtcccgagtgacctggacgagcacctgccgggcatttctaactcgtttgttaactgggtggccgagaaggaatgggagctgccgccggattctgacatggatccgaatctgattgagcaggcacccctgaccgtggccgaaaagcttcagcgcgagttcctggtggagtggcgccgcgtgagtaaggccccggaggccctcttttttgtccagttcgaaaagggggagacctacttccacctgcacgtgctgattgagaccatcggggtcaaatccatggtggtcggccgctacgtgagccagattaaagagaagctggtgacccgcatctaccgcggggtcgagccgcagcttccgaactggttcgcggtgaccaaaacgcgaaatggcgccgggggcgggaacaaggtggtggacgactgctacatccccaactacctgctccccaagacccagcccgagctccagtgggcgtggactaacatggaccagtatttaagcgcctgtttgaatctcgcggagcgtaaacggctggtggcgcagcatctgacgcacgtgtcgcagacgcaggagcagaacaaagagaatcagaaccccaattctgacgcgccggtcatcaggtcaaaaacctcagccaggtacatggagctggtcgggtggctggtggaccgcgggatcacgtcagaaaagcaatggattcaggaggaccaggcctcgtacatctccttcaacgccgcctccaactcgcggtcccagatcaaggccgcgctggacaatgcctccaagatcatgagcctgacaaagacggctccggactacctggtgggcagcaacccgccggaggacattaccaaaaatcggatctaccaaatcctggagctgaacgggtacgatccgcagtacgcggcctccgtcttcctgggctgggcgcaaaagaagttcgggaagaggaacaccatctggctctttgggccggccacgacgggtaaaaccaacatcgcggaagccatcgcccacgccgtgcccttctacggctgcgtaaactggaccaatgagaactttcccttcaacgattgcgtcgacaagatggtgatctggtgggaggagggcaagatgacggccaaggtcgtggagagcgccaaggccattctgggcggaagcaaggtgcgcgtggaccaaaagtgcaagtcatcggcccagatcgaacccactcccgtgatcgtcacctccaacaccaacatgtgcgccgtgattgacgggaacagcaccaccttcgagcatcagcagccgctgcaggaccggatgtttaaatttgaacttacccgccgtttggaccatgactttgggaaggtcaccaaacaggaagtaaaggactttttccggtgggcttccgatcacgtgactgacgtggctcatgagttctacgtcagaaagggtggagctaagaaacgccccgcctccaatgacgcggatgtaagcgagccaaaacggcagtgcacgtcacttgcgcagccgacaacgtcagacgcggaagcaccggcggactacgcggacaggtaccaaaacaaatgttctcgtcacgtgggcatgaatctgatgctttttccctgtaaaacatgcgagagaatgaatcaaatttccaatgtctgttttacgcatggtcaaagagactgtggggaatgcttccctggaatgtcagaatctcaacccgtttctgtcgtcaaaaagaagacttatcagaaactgtgtccaattcatcatatcctgggaagggcacccgagattgcctgttcggcctgcgatttggccaatgtggacttggatgactgtgtttctgagcaataaatgacttaaaccaggtatggctgctgacggttatcttccagattggctcgaggacaacctttctgaaggcattcgtgagtggtgggctctgaaacctggagtccctcaacccaaagcgaaccaacaacaccaggacaaccgtcggggtcttgtgcttccgggttacaaatacctcggacccggtaacggactcgacaaaggagagccggtcaacgaggcggacgcggcagccctcgaacacgacaaagcttacgaccagcagctcaaggccggtgacaacccgtacctcaagtacaaccacgccgacgccgagtttcaggagcgtcttcaagaagatacgtcttttgggggcaaccttggcagagcagtcttccaggccaaaaagaggatccttgagcctcttggtctggttgaggaagcagctaaaacggctcctggaaagaagaggcctgtagatcagtctcctcaggaaccggactcatcatctggtgttggcaaatcgggcaaacagcctgccagaaaaagactaaatttcggtcagactggcgactcagagtcagtcccagaccctcaacctctcggagaaccaccagcagcccccacaagtttgggatctaatacaatggcttcaggcggtggcgcaccaatggcagacaataacgagggtgccgatggagtgggtaattcctcaggaaattggcattgcgattcccaatggctgggcgacagagtcatcaccaccagcaccagaacctgggccctgcccacttacaacaaccatctctacaagcaaatctccagccaatcaggagcttcaaacgacaaccactactttggctacagcaccccttgggggtattttgactttaacagattccactgccacttctcaccacgtgactggcagcgactcattaacaacaactggggattccggcccaagaaactcagcttcaagctcttcaacatccaagttaaagaggtcacgcagaacgatggcacgacgactattgccaataaccttaccagcacggttcaagtgtttacggactcggagtatcagctcccgtacgtgctcgggtcggcgcaccaaggctgtctcccgccgtttccagcggacgtcttcatggtccctcagtatggatacctcaccctgaacaacggaagtcaagcggtgggacgctcatccttttactgcctggagtacttcccttcgcagatgctaaggactggaaataacttccaattcagctataccttcgaggatgtaccttttcacagcagctacgctcacagccagagtttggatcgcttgatgaatcctcttattgatcagtatctgtactacctgaacagaacgcaaggaacaacctctggaacaaccaaccaatcacggctgctttttagccaggctgggcctcagtctatgtctttgcaggccagaaattggctacctgggccctgctaccggcaacagagactttcaaagactgctaacgacaacaacaacagtaactttccttggacagcggccagcaaatatcatctcaatggccgcgactcgctggtgaatccaggaccagctatggccagtcacaaggacgatgaagaaaaatttttccctatgcacggcaatctaatatttggcaaagaagggacaacggcaagtaacgcagaattagataatgtaatgattacggatgaagaagagattcgtaccaccaatcctgtggcaacagagcagtatggaactgtggcaaataacttgcagagctcaaatacagctcccacgactagaactgtcaatgatcagggggccttacctggcatggtgtggcaagatcgtgacgtgtaccttcaaggacctatctgggcaaagattcctcacacggatggacactttcatccttctcctctgatgggaggctttggactgaaacatccgcctcctcaaatcatgatcaaaaatactccggtaccggcaaatcctccgacgactttcagcccggccaagtttgcttcatttatcactcagtactccactggacaggtcagcgtggaaattgagtgggagctacagaaagaaaacagcaaacgttggaatccagagattcagtacacttccaactacaacaagtctgttaatgtggactttactgtagacactaatggtgtttatagtgaacctcgccctattggaacccggtatctcacacgaaacttgtaatcctggttaatcaataaaccgtttaattcgtttcagttgaactttggctcttgtgcacttcttatcttatcttgtttccatggctactgcgtagataagcagcggcctgcggcgcttgcgcttcgcggtttacaactgctggttaatatttaactctcgccatacctctagtgatggagttggccactccctctatgcgcactcgctcgctcggtggggccggacgtgcaaagcacgtccgtctggcgacctttggtcgccaggccccaccgagcgagcgagtgcgcatagagggagtggccaa

SEQ ID NO: 42 - DNA, 1800 bp, Adeno-associated virus 4
  misc_feature (342)..(342): n is a, c, t, or g
acggctcctggaaagaagagaccgttgattgaatccccccagcagcccgactcctccacgggtatcggcaaaaaaggcaagcagccggctaaaaagaagctcgttttcgaagacgaaactggagcaggcgacggaccccctgagggatcaacttccggagccatgtctgatgacagtgagatgcgtgcagcagctggcggagctgcagtcgagggsggacaaggtgccgatggagtgggtaatgcctcgggtgattggcattgcgattccacctggtctgagggccacgtcacgaccaccagcaccagaacctgggtcttgcccacctacaacaaccacctntacaagcgactcggagagagcctgcagtccaacacctacaacggattctccaccccctggggatactttgacttcaaccgcttccactgccacttctcaccacgtgactggcagcgactcatcaacaacaactggggcatgcgacccaaagccatgcgggtcaaaatcttcaacatccaggtcaaggaggtcacgacgtcgaacggcgagacaacggtggctaataaccttaccagcacggttcagatctttgcggactcgtcgtacgaactgccgtacgtgatggatgcgggtcaagagggcagcctgcctccttttcccaacgacgtctttatggtgccccagtacggctactgtggactggtgaccggcaacacttcgcagcaacagactgacagaaatgccttctactgcctggagtactttccttcgcagatgctgcggactggcaacaactttgaaattacgtacagttttgagaaggtgcctttccactcgatgtacgcgcacagccagagcctggaccggctgatgaaccctctcatcgaccagtacctgtggggactgcaatcgaccaccaccggaaccaccctgaatgccgggactgccaccaccaactttaccaagctgcggcctaccaacttttccaactttaaaaagaactggctgcccgggccttcaatcaagcagcagggcttctcaaagactgccaatcaaaactacaagatccctgccaccgggtcagacagtctcatcaaatacgagacgcacagcactctggacggaagatggagtgccctgacccccggacctccaatggccacggctggacctgcggacagcaagttcagcaacagccagctcatctttgcggggcctaaacagaacggcaacacggccaccgtacccgggactctgatcttcacctctgaggaggagctggcagccaccaacgccaccgatacggacatgtggggcaacctacctggcggtgaccagagcaacagcaacctgccgaccgtggacagactgacagccttgggagccgtgcctggaatggtctggcaaaacagagacatttactaccagggtcccatttgggccaagattcctcataccgatggacactttcacccctcaccgctgattggtgggtttgggctgaaacacccgcctcctcaaatttttatcaagaacaccccggtacctgcgaatcctgcaacgaccttcagctctactccggtaaactccttcattactcagtacagcactggccaggtgtcggtgcagattgactgggagatccagaaggagcggtccaaacgctggaaccccgaggtccagtttacctccaactacggacagcaaaactctctgttgtgggctcccgatgcggctgggaaatacactgagcctagggctatcggtacccgctacctcacccaccacctgtaataa

SEQ ID NO: 43 - DNA, 2208 bp, Adeno-associated virus 4
  misc_feature (750)..(750): n is a, c, t, or g
atgactgacggttaccttccagattggctagaggacaacctctctgaaggcgttcgagagtggtgggcgctgcaacctggagcccctaaacccaaggcaaatcaacaacatcaggacaacgctcggggtcttgtgcttccgggttacaaatacctcggacccggcaacggactcgacaagggggaacccgtcaacgcagcggacgcggcagccctcgagcacgacaaggcctacgaccagcagctcaaggccggtgacaacccctacctcaagtacaaccacgccgacgcggagttccagcagcggcttcagggcgacacatcgtttgggggcaacctcggcagagcagtcttccaggccaaaaagagggttcttgaacctcttggtctggttgagcaagcgggtgagacggctcctggaaagaagagaccgttgattgaatccccccagcagcccgactcctccacgggtatcggcaaaaaaggcaagcagccggctaaaaagaagctcgttttcgaagacgaaactggagcaggcgacggaccccctgagggatcaacttccggagccatgtctgatgacagtgagatgcgtgcagcagctggcggagctgcagtcgagggsggacaaggtgccgatggagtgggtaatgcctcgggtgattggcattgcgattccacctggtctgagggccacgtcacgaccaccagcaccagaacctgggtcttgcccacctacaacaaccacctntacaagcgactcggagagagcctgcagtccaacacctacaacggattctccaccccctggggatactttgacttcaaccgcttccactgccacttctcaccacgtgactggcagcgactcatcaacaacaactggggcatgcgacccaaagccatgcgggtcaaaatcttcaacatccaggtcaaggaggtcacgacgtcgaacggcgagacaacggtggctaataaccttaccagcacggttcagatctttgcggactcgtcgtacgaactgccgtacgtgatggatgcgggtcaagagggcagcctgcctccttttcccaacgacgtctttatggtgccccagtacggctactgtggactggtgaccggcaacacttcgcagcaacagactgacagaaatgccttctactgcctggagtactttccttcgcagatgctgcggactggcaacaactttgaaattacgtacagttttgagaaggtgcctttccactcgatgtacgcgcacagccagagcctggaccggctgatgaaccctctcatcgaccagtacctgtggggactgcaatcgaccaccaccggaaccaccctgaatgccgggactgccaccaccaactttaccaagctgcggcctaccaacttttccaactttaaaaagaactggctgcccgggccttcaatcaagcagcagggcttctcaaagactgccaatcaaaactacaagatccctgccaccgggtcagacagtctcatcaaatacgagacgcacagcactctggacggaagatggagtgccctgacccccggacctccaatggccacggctggacctgcggacagcaagttcagcaacagccagctcatctttgcggggcctaaacagaacggcaacacggccaccgtacccgggactctgatcttcacctctgaggaggagctggcagccaccaacgccaccgatacggacatgtggggcaacctacctggcggtgaccagagcaacagcaacctgccgaccgtggacagactgacagccttgggagccgtgcctggaatggtctggcaaaacagagacatttactaccagggtcccatttgggccaagattcctcataccgatggacactttcacccctcaccgctgattggtgggtttgggctgaaacacccgcctcctcaaatttttatcaagaacaccccggtacctgcgaatcctgcaacgaccttcagctctactccggtaaactccttcattactcagtacagcactggccaggtgtcggtgcagattgactgggagatccagaaggagcggtccaaacgctggaaccccgaggtccagtttacctccaactacggacagcaaaactctctgttgtgggctcccgatgcggctgggaaatacactgagcctagggctatcggtacccgctacctcacccaccacctgtaataa

SEQ ID NO: 44 - DNA, 1872 bp, Adeno-associated virus 4
atgccggggttctacgagatcgtgctgaaggtgcccagcgacctggacgagcacctgcccggcatttctgactcttttgtgagctgggtggccgagaaggaatgggagctgccgccggattctgacatggacttgaatctgattgagcaggcacccctgaccgtggccgaaaagctgcaacgcgagttcctggtcgagtggcgccgcgtgagtaaggccccggaggccctcttctttgtccagttcgagaagggggacagctacttccacctgcacatcctggtggagaccgtgggcgtcaaatccatggtggtgggccgctacgtgagccagattaaagagaagctggtgacccgcatctaccgcggggtcgagccgcagcttccgaactggttcgcggtgaccaagacgcgtaatggcgccggaggcgggaacaaggtggtggacgactgctacatccccaactacctgctccccaagacccagcccgagctccagtgggcgtggactaacatggaccagtatataagcgcctgtttgaatctcgcggagcgtaaacggctggtggcgcagcatctgacgcacgtgtcgcagacgcaggagcagaacaaggaaaaccagaaccccaattctgacgcgccggtcatcaggtcaaaaacctccgccaggtacatggagctggtcgggtggctggtggaccgcgggatcacgtcagaaaagcaatggatccaggaggaccaggcgtcctacatctccttcaacgccgcctccaactcgcggtcacaaatcaaggccgcgctggacaatgcctccaaaatcatgagcctgacaaagacggctccggactacctggtgggccagaacccgccggaggacatttccagcaaccgcatctaccgaatcctcgagatgaacgggtacgatccgcagtacgcggcctccgtcttcctgggctgggcgcaaaagaagttcgggaagaggaacaccatctggctctttgggccggccacgacgggtaaaaccaacatcgcggaagccatcgcccacgccgtgcccttctacggctgcgtgaactggaccaatgagaactttccgttcaacgattgcgtcgacaagatggtgatctggtgggaggagggcaagatgacggccaaggtcgtagagagcgccaaggccatcctgggcggaagcaaggtgcgcgtggaccaaaagtgcaagtcatcggcccagatcgacccaactcccgtgatcgtcacctccaacaccaacatgtgcgcggtcatcgacggaaactcgaccaccttcgagcaccaacaaccactccaggaccggatgttcaagttcgagctcaccaagcgcctggagcacgactttggcaaggtcaccaagcaggaagtcaaagactttttccggtgggcgtcagatcacgtgaccgaggtgactcacgagttttacgtcagaaagggtggagctagaaagaggcccgcccccaatgacgcagatataagtgagcccaagcgggcctgtccgtcagttgcgcagccatcgacgtcagacgcggaagctccggtggactacgcggacaggtaccaaaacaaatgttctcgtcacgtgggtatgaatctgatgctttttccctgccggcaatgcgagagaatgaatcagaatgtggacatttgcttcacgcacggggtcatggactgtgccgagtgcttccccgtgtcagaatctcaacccgtgtctgtcgtcagaaagcggacgtatcagaaactgtgtccgattcatcacatcatggggagggcgcccgaggtggcctgctcggcctgcgaactggccaatgtggacttggatgactgtgacatggaacaataa

SEQ ID NO: 45 - DNA, 1611 bp, Adeno-associated virus 4
atgccggggttctacgagatcgtgctgaaggtgcccagcgacctggacgagcacctgcccggcatttctgactcttttgtgagctgggtggccgagaaggaatgggagctgccgccggattctgacatggacttgaatctgattgagcaggcacccctgaccgtggccgaaaagctgcaacgcgagttcctggtcgagtggcgccgcgtgagtaaggccccggaggccctcttctttgtccagttcgagaagggggacagctacttccacctgcacatcctggtggagaccgtgggcgtcaaatccatggtggtgggccgctacgtgagccagattaaagagaagctggtgacccgcatctaccgcggggtcgagccgcagcttccgaactggttcgcggtgaccaagacgcgtaatggcgccggaggcgggaacaaggtggtggacgactgctacatccccaactacctgctccccaagacccagcccgagctccagtgggcgtggactaacatggaccagtatataagcgcctgtttgaatctcgcggagcgtaaacggctggtggcgcagcatctgacgcacgtgtcgcagacgcaggagcagaacaaggaaaaccagaaccccaattctgacgcgccggtcatcaggtcaaaaacctccgccaggtacatggagctggtcgggtggctggtggaccgcgggatcacgtcagaaaagcaatggatccaggaggaccaggcgtcctacatctccttcaacgccgcctccaactcgcggtcacaaatcaaggccgcgctggacaatgcctccaaaatcatgagcctgacaaagacggctccggactacctggtgggccagaacccgccggaggacatttccagcaaccgcatctaccgaatcctcgagatgaacgggtacgatccgcagtacgcggcctccgtcttcctgggctgggcgcaaaagaagttcgggaagaggaacaccatctggctctttgggccggccacgacgggtaaaaccaacatcgcggaagccatcgcccacgccgtgcccttctacggctgcgtgaactggaccaatgagaactttccgttcaacgattgcgtcgacaagatggtgatctggtgggaggagggcaagatgacggccaaggtcgtagagagcgccaaggccatcctgggcggaagcaaggtgcgcgtggaccaaaagtgcaagtcatcggcccagatcgacccaactcccgtgatcgtcacctccaacaccaacatgtgcgcggtcatcgacggaaactcgaccaccttcgagcaccaacaaccactccaggaccggatgttcaagttcgagctcaccaagcgcctggagcacgactttggcaaggtcaccaagcaggaagtcaaagactttttccggtgggcgtcagatcacgtgaccgaggtgactcacgagttttacgtcagaaagggtggagctagaaagaggcccgcccccaatgacgcagatataagtgagcccaagcgggcctgtccgtcagttgcgcagccatcgacgtcagacgcggaagctccggtggactacgcggacagattggctagaggacaacctctctga

SEQ ID NO: 46 - DNA, 1872 bp, Adeno-associated virus 4; identical to SEQ ID NO: 44

SEQ ID NO: 47 - DNA, 1617 bp, Adeno-associated virus 4
  misc_feature (162)..(162): n is a, c, t, or g
atgcgtgcagcagctggcggagctgcagtcgagggsggacaaggtgccgatggagtgggtaatgcctcgggtgattggcattgcgattccacctggtctgagggccacgtcacgaccaccagcaccagaacctgggtcttgcccacctacaacaaccacctntacaagcgactcggagagagcctgcagtccaacacctacaacggattctccaccccctggggatactttgacttcaaccgcttccactgccacttctcaccacgtgactggcagcgactcatcaacaacaactggggcatgcgacccaaagccatgcgggtcaaaatcttcaacatccaggtcaaggaggtcacgacgtcgaacggcgagacaacggtggctaataaccttaccagcacggttcagatctttgcggactcgtcgtacgaactgccgtacgtgatggatgcgggtcaagagggcagcctgcctccttttcccaacgacgtctttatggtgccccagtacggctactgtggactggtgaccggcaacacttcgcagcaacagactgacagaaatgccttctactgcctggagtactttccttcgcagatgctgcggactggcaacaactttgaaattacgtacagttttgagaaggtgcctttccactcgatgtacgcgcacagccagagcctggaccggctgatgaaccctctcatcgaccagtacctgtggggactgcaatcgaccaccaccggaaccaccctgaatgccgggactgccaccaccaactttaccaagctgcggcctaccaacttttccaactttaaaaagaactggctgcccgggccttcaatcaagcagcagggcttctcaaagactgccaatcaaaactacaagatccctgccaccgggtcagacagtctcatcaaatacgagacgcacagcactctggacggaagatggagtgccctgacccccggacctccaatggccacggctggacctgcggacagcaagttcagcaacagccagctcatctttgcggggcctaaacagaacggcaacacggccaccgtacccgggactctgatcttcacctctgaggaggagctggcagccaccaacgccaccgatacggacatgtggggcaacctacctggcggtgaccagagcaacagcaacctgccgaccgtggacagactgacagccttgggagccgtgcctggaatggtctggcaaaacagagacatttactaccagggtcccatttgggccaagattcctcataccgatggacactttcacccctcaccgctgattggtgggtttgggctgaaacacccgcctcctcaaatttttatcaagaacaccccggtacctgcgaatcctgcaacgaccttcagctctactccggtaaactccttcattactcagtacagcactggccaggtgtcggtgcagattgactgggagatccagaaggagcggtccaaacgctggaaccccgaggtccagtttacctccaactacggacagcaaaactctctgttgtgggctcccgatgcggctgggaaatacactgagcctagggctatcggtacccgctacctcacccaccacctgtaa

SEQ ID NO: 48 - DNA, 939 bp, Adeno-associated virus 4
atggagctggtcgggtggctggtggaccgcgggatcacgtcagaaaagcaatggatccaggaggaccaggcgtcctacatctccttcaacgccgcctccaactcgcggtcacaaatcaaggccgcgctggacaatgcctccaaaatcatgagcctgacaaagacggctccggactacctggtgggccagaacccgccggaggacatttccagcaaccgcatctaccgaatcctcgagatgaacgggtacgatccgcagtacgcggcctccgtcttcctgggctgggcgcaaaagaagttcgggaagaggaacaccatctggctctttgggccggccacgacgggtaaaaccaacatcgcggaagccatcgcccacgccgtgcccttctacggctgcgtgaactggaccaatgagaactttccgttcaacgattgcgtcgacaagatggtgatctggtgggaggagggcaagatgacggccaaggtcgtagagagcgccaaggccatcctgggcggaagcaaggtgcgcgtggaccaaaagtgcaagtcatcggcccagatcgacccaactcccgtgatcgtcacctccaacaccaacatgtgcgcggtcatcgacggaaactcgaccaccttcgagcaccaacaaccactccaggaccggatgttcaagttcgagctcaccaagcgcctggagcacgactttggcaaggtcaccaagcaggaagtcaaagactttttccggtgggcgtcagatcacgtgaccgaggtgactcacgagttttacgtcagaaagggtggagctagaaagaggcccgcccccaatgacgcagatataagtgagcccaagcgggcctgtccgtcagttgcgcagccatcgacgtcagacgcggaagctccggtggactacgcggacagattggctagaggacaacctctctga

SEQ ID NO: 49 - DNA, 1197 bp, Adeno-associated virus 4
atggagctggtcgggtggctggtggaccgcgggatcacgtcagaaaagcaatggatccaggaggaccaggcgtcctacatctccttcaacgccgcctccaactcgcggtcacaaatcaaggccgcgctggacaatgcctccaaaatcatgagcctgacaaagacggctccggactacctggtgggccagaacccgccggaggacatttccagcaaccgcatctaccgaatcctcgagatgaacgggtacgatccgcagtacgcggcctccgtcttcctgggctgggcgcaaaagaagttcgggaagaggaacaccatctggctctttgggccggccacgacgggtaaaaccaacatcgcggaagccatcgcccacgccgtgcccttctacggctgcgtgaactggaccaatgagaactttccgttcaacgattgcgtcgacaagatggtgatctggtgggaggagggcaagatgacggccaaggtcgtagagagcgccaaggccatcctgggcggaagcaaggtgcgcgtggaccaaaagtgcaagtcatcggcccagatcgacccaactcccgtgatcgtcacctccaacaccaacatgtgcgcggtcatcgacggaaactcgaccaccttcgagcaccaacaaccactccaggaccggatgttcaagttcgagctcaccaagcgcctggagcacgactttggcaaggtcaccaagcaggaagtcaaagactttttccggtgggcgtcagatcacgtgaccgaggtgactcacgagttttacgtcagaaagggtggagctagaaagaggcccgcccccaatgacgcagatataagtgagcccaagcgggcctgtccgtcagttgcgcagccatcgacgtcagacgcggaagctccggtggactacgcggacaggtaccaaaacaaatgttctcgtcacgtgggtatgaatctgatgctttttccctgccggcaatgcgagagaatgaatcagaatgtggacatttgcttcacgcacggggtcatggactgtgccgagtgcttccccgtgtcagaatctcaacccgtgtctgtcgtcagaaagcggacgtatcagaaactgtgtccgattcatcacatcatggggagggcgcccgaggtggcctgctcggcctgcgaactggccaatgtggacttggatgactgtgacatggaacaa

SEQ ID NO: 50 - DNA, 245 bp, Adeno-associated virus 4
ctccatcatctaggtttgcccactgacgtcaatgtgacgtcctagggttagggaggtccctgtattagcagtcacgtgagtgtcgtatttcgcggagcgtagcggagcgcataccaagctgccacgtcacagccacgtggtccgtttgcgacagtttgcgacaccatgtggtcaggagggtatataaccgcgagtgagccagcgaggagctccattttgcccgcgaattttgaacgagcagcagc

SEQ ID NO: 51 - protein, 313 aa, Adeno-associated virus 4
  MOD_RES (313)..(313): Xaa = any amino acid
MELVGWLVDRGITSEKQWIQEDQASYISFNAASNSRSQIKAALDNASKIMSLTKTAPDYLVGQNPPEDISSNRIYRILEMNGYDPQYAASVFLGWAQKKFGKRNTIWLFGPATTGKTNIAEAIAHAVPFYGCVNWTNENFPFNDCVDKMVIWWEEGKMTAKVVESAKAILGGSKVRVDQKCKSSAQIDPTPVIVTSNTNMCAVIDGNSTTFEHQQPLQDRMFKFELTKRLEHDFGKVTKQEVKDFFRWASDHVTEVTHEFYVRKGGARKRPAPNDADISEPKRACPSVAQPSTSDAEAPVDYADRLARGQPLX

SEQ ID NO: 52 - protein, 399 aa, Adeno-associated virus 4
MELVGWLVDRGITSEKQWIQEDQASYISFNAASNSRSQIKAALDNASKIMSLTKTAPDYLVGQNPPEDISSNRIYRILEMNGYDPQYAASVFLGWAQKKFGKRNTIWLFGPATTGKTNIAEAIAHAVPFYGCVNWTNENFPFNDCVDKMVIWWEEGKMTAKVVESAKAILGGSKVRVDQKCKSSAQIDPTPVIVTSNTNMCAVIDGNSTTFEHQQPLQDRMFKFELTKRLEHDFGKVTKQEVKDFFRWASDHVTEVTHEFYVRKGGARKRPAPNDADISEPKRACPSVAQPSTSDAEAPVDYADRYQNKCSRHVGMNLMLFPCRQCERMNQNVDICFTHGVMDCAECFPVSESQPVSVVRKRTYQKLCPIHHIMGRAPEVACSACELANVDLDDCDMEQ

SEQ ID NO: 53 - protein, 623 aa, Adeno-associated virus 4
MPGFYEIVLKVPSDLDEHLPGISDSFVSWVAEKEWELPPDSDMDLNLIEQAPLTVAEKLQREFLVEWRRVSKAPEALFFVQFEKGDSYFHLHILVETVGVKSMVVGRYVSQIKEKLVTRIYRGVEPQLPNWFAVTKTRNGAGGGNKVVDDCYIPNYLLPKTQPELQWAWTNMDQYISACLNLAERKRLVAQHLTHVSQTQEQNKENQNPNSDAPVIRSKTSARYMELVGWLVDRGITSEKQWIQEDQASYISFNAASNSRSQIKAALDNASKIMSLTKTAPDYLVGQNPPEDISSNRIYRILEMNGYDPQYAASVFLGWAQKKFGKRNTIWLFGPATTGKTNIAEAIAHAVPFYGCVNWTNENFPFNDCVDKMVIWWEEGKMTAKVVESAKAILGGSKVRVDQKCKSSAQIDPTPVIVTSNTNMCAVIDGNSTTFEHQQPLQDRMFKFELTKRLEHDFGKVTKQEVKDFFRWASDHVTEVTHEFYVRKGGARKRPAPNDADISEPKRACPSVAQPSTSDAEAPVDYADRYQNKCSRHVGMNLMLFPCRQCERMNQNVDICFTHGVMDCAECFPVSESQPVSVVRKRTYQKLCPIHHIMGRAPEVACSACELANVDLDDCDMEQ

SEQ ID NO: 54 - protein, 537 aa, Adeno-associated virus 4
  MOD_RES (537)..(537): Xaa = any amino acid
MPGFYEIVLKVPSDLDEHLPGISDSFVSWVAEKEWELPPDSDMDLNLIEQAPLTVAEKLQREFLVEWRRVSKAPEALFFVQFEKGDSYFHLHILVETVGVKSMVVGRYVSQIKEKLVTRIYRGVEPQLPNWFAVTKTRNGAGGGNKVVDDCYIPNYLLPKTQPELQWAWTNMDQYISACLNLAERKRLVAQHLTHVSQTQEQNKENQNPNSDAPVIRSKTSARYMELVGWLVDRGITSEKQWIQEDQASYISFNAASNSRSQIKAALDNASKIMSLTKTAPDYLVGQNPPEDISSNRIYRILEMNGYDPQYAASVFLGWAQKKFGKRNTIWLFGPATTGKTNIAEAIAHAVPFYGCVNWTNENFPFNDCVDKMVIWWEEGKMTAKVVESAKAILGGSKVRVDQKCKSSAQIDPTPVIVTSNTNMCAVIDGNSTTFEHQQPLQDRMFKFELTKRLEHDFGKVTKQEVKDFFRWASDHVTEVTHEFYVRKGGARKRPAPNDADISEPKRACPSVAQPSTSDAEAPVDYADRLARGQPLX

SEQ ID NO: 55 - protein, 623 aa, Adeno-associated virus 4; identical to SEQ ID NO: 53

SEQ ID NO: 56 - protein, 544 aa, Adeno-associated virus 4
MSDDSEMRAAAGGAAVEGGQGADGVGNASGDWHCDSTWSEGHVTTTSTRTWVLPTYNNHLYKRLGESLQSNTYNGFSTPWGYFDFNRFHCHFSPRDWQRLINNNWGMRPKAMRVKIFNIQVKEVTTSNGETTVANNLTSTVQIFADSSYELPYVMDAGQEGSLPPFPNDVFMVPQYGYCGLVTGNTSQQQTDRNAFYCLEYFPSQMLRTGNNFEITYSFEKVPFHSMYAHSQSLDRLMNPLIDQYLWGLQSTTTGTTLNAGTATTNFTKLRPTNFSNFKKNWLPGPSIKQQGFSKTANQNYKIPATGSDSLIKYETHSTLDGRWSALTPGPPMATAGPADSKFSNSQLIFAGPKQNGNTATVPGTLIFTSEEELAATNATDTDMWGNLPGGDQSNSNLPTVDRLTALGAVPGMVWQNRDIYYQGPIWAKIPHTDGHFHPSPLIGGFGLKHPPPQIFIKNTPVPANPATTFSSTPVNSFITQYSTGQVSVQIDWEIQKERSKRWNPEVQFTSNYGQQNSLLWAPDAAGKYTEPRAIGTRYLTHHL

SEQ ID NO: 57 - protein, 734 aa, Adeno-associated virus 4
MTDGYLPDWLEDNLSEGVREWWALQPGAPKPKANQQHQDNARGLVLPGYKYLGPGNGLDKGEPVNAADAAALEHDKAYDQQLKAGDNPYLKYNHADAEFQQRLQGDTSFGGNLGRAVFQAKKRVLEPLGLVEQAGETAPGKKRPLIESPQQPDSSTGIGKKGKQPAKKKLVFEDETGAGDGPPEGSTSGAMSDDSEMRAAAGGAAVEGGQGADGVGNASGDWHCDSTWSEGHVTTTSTRTWVLPTYNNHLYKRLGESLQSNTYNGFSTPWGYFDFNRFHCHFSPRDWQRLINNNWGMRPKAMRVKIFNIQVKEVTTSNGETTVANNLTSTVQIFADSSYELPYVMDAGQEGSLPPFPNDVFMVPQYGYCGLVTGNTSQQQTDRNAFYCLEYFPSQMLRTGNNFEITYSFEKVPFHSMYAHSQSLDRLMNPLIDQYLWGLQSTTTGTTLNAGTATTNFTKLRPTNFSNFKKNWLPGPSIKQQGFSKTANQNYKIPATGSDSLIKYETHSTLDGRWSALTPGPPMATAGPADSKFSNSQLIFAGPKQNGNTATVPGTLIFTSEEELAATNATDTDMWGNLPGGDQSNSNLPTVDRLTALGAVPGMVWQNRDIYYQGPIWAKIPHTDGHFHPSPLIGGFGLKHPPPQIFIKNTPVPANPATTFSSTPVNSFITQYSTGQVSVQIDWEIQKERSKRWNPEVQFTSNYGQQNSLLWAPDAAGKYTEPRAIGTRYLTHHL

SEQ ID NO: 58 - protein, 598 aa, Adeno-associated virus 4
TAPGKKRPLIESPQQPDSSTGIGKKGKQPAKKKLVFEDETGAGDGPPEGSTSGAMSDDSEMRAAAGGAAVEGGQGADGVGNASGDWHCDSTWSEGHVTTTSTRTWVLPTYNNHLYKRLGESLQSNTYNGFSTPWGYFDFNRFHCHFSPRDWQRLINNNWGMRPKAMRVKIFNIQVKEVTTSNGETTVANNLTSTVQIFADSSYELPYVMDAGQEGSLPPFPNDVFMVPQYGYCGLVTGNTSQQQTDRNAFYCLEYFPSQMLRTGNNFEITYSFEKVPFHSMYAHSQSLDRLMNPLIDQYLWGLQSTTTGTTLNAGTATTNFTKLRPTNFSNFKKNWLPGPSIKQQGFSKTANQNYKIPATGSDSLIKYETHSTLDGRWSALTPGPPMATAGPADSKFSNSQLIFAGPKQNGNTATVPGTLIFTSEEELAATNATDTDMWGNLPGGDQSNSNLPTVDRLTALGAVPGMVWQNRDIYYQGPIWAKIPHTDGHFHPSPLIGGFGLKHPPPQIFIKNTPVPANPATTFSSTPVNSFITQYSTGQVSVQIDWEIQKERSKRWNPEVQFTSNYGQQNSLLWAPDAAGKYTEPRAIGTRYLTHHL

SEQ ID NO: 59 - DNA, 129 bp, Adeno-associated virus 4
ttggccactccctctatgcgcgctcgctcactcactcggccctgcggccagaggccggcagtctggagacctttggtgtccagggcagggccgagtgagtgagcgagcgcgcatagagggagtggccaa

SEQ ID NO: 60 - DNA, 125 bp, Adeno-associated virus 4
ttggccactccctctatgcgcgctcgctcactcactcggccctggagaccaaaggtctccagactgccggcctctggccggcagggccgagtgagtgagcgagcgcgcatagagggagtggccaa

SEQ ID NO: 61 - DNA, 4768 bp, Adeno-associated virus 4
  misc_feature (3009)..(3009): n is a, c, t, or g
ttggccactccctctatgcgcgctcgctcactcactcggccctggagaccaaaggtctccagactgccggcctctggccggcagggccgagtgagtgagcgagcgcgcatagagggagtggccaactccatcatctaggtttgcccactgacgtcaatgtgacgtcctagggttagggaggtccctgtattagcagtcacgtgagtgtcgtatttcgcggagcgtagcggagcgcataccaagctgccacgtcacagccacgtggtccgtttgcgacagtttgcgacaccatgtggtcaggagggtatataaccgcgagtgagccagcgaggagctccattttgcccgcgaattttgaacgagcagcagccatgccggggttctacgagatcgtgctgaaggtgcccagcgacctggacgagcacctgcccggcatttctgactcttttgtgagctgggtggccgagaaggaatgggagctgccgccggattctgacatggacttgaatctgattgagcaggcacccctgaccgtggccgaaaagctgcaacgcgagttcctggtcgagtggcgccgcgtgagtaaggccccggaggccctcttctttgtccagttcgagaagggggacagctacttccacctgcacatcctggtggagaccgtgggcgtcaaatccatggtggtgggccgctacgtgagccagattaaagagaagctggtgacccgcatctaccgcggggtcgagccgcagcttccgaactggttcgcggtgaccaagacgcgtaatggcgccggaggcgggaacaaggtggtggacgactgctacatccccaactacctgctccccaagacccagcccgagctccagtgggcgtggactaacatggaccagtatataagcgcctgtttgaatctcgcggagcgtaaacggctggtggcgcagcatctgacgcacgtgtcgcagacgcaggagcagaacaaggaaaaccagaaccccaattctgacgcgccggtcatcaggtcaaaaacctccgccaggtacatggagctggtcgggtggctggtggaccgcgggatcacgtcagaaaagcaatggatccaggaggaccaggcgtcctacatctccttcaacgccgcctccaactcgcggtcacaaatcaaggccgcgctggacaatgcctccaaaatcatgagcctgacaaagacggctccggactacctggtgggccagaacccgccggaggacatttccagcaaccgcatctaccgaatcctcgagatgaacgggtacgatccgcagtacgcggcctccgtcttcctgggctgggcgcaaaagaagttcgggaagaggaacaccatctggctctttgggccggccacgacgggtaaaaccaacatcgcggaagccatcgcccacgccgtgcccttctacggctgcgtgaactggaccaatgagaactttccgttcaacgattgcgtcgacaagatggtgatctggtgggaggagggcaagatgacggccaaggtcgtagagagcgccaaggccatcctgggcggaagcaaggtgcgcgtggaccaaaagtgcaagtcatcggcccagatcgacccaactcccgtgatcgtcacctccaacaccaacatgtgcgcggtcatcgacggaaactcgaccaccttcgagcaccaacaaccactccaggaccggatgttcaagttcgagctcaccaagcgcctggagcacgactttggcaaggtcaccaagcaggaagtcaaagactttttccggtgggcgtcagatcacgtgaccgaggtgactcacgagttttacgtcagaaagggtggagctagaaagaggcccgcccccaatgacgcagatataagtgagcccaagcgggcctgtccgtcagttgcgcagccatcgacgtcagacgcggaagctccggtggactacgcggacaggtaccaaaacaaatgttctcgtcacgtgggtatgaatctgatgctttttccctgccggcaatgcgagagaatgaatcagaatgtggacatttgcttcacgcacggggtcatggactgtgccgagtgcttccccgtgtcagaatctcaacccgtgtctgtcgtcagaaagcggacgtatcagaaactgtgtccgattcatcacatcatggggagggcgcccgaggtggcctgctcggcctgcgaactggccaatgtggacttggatgactgtgacatggaacaataaatgactcaaaccagatatgactgacggttaccttccagattggctagaggacaacctctctgaaggcgttcgagagtggtgggcgctgcaacctggagcccctaaacccaaggcaaatcaacaacatcaggacaacgctcggggtcttgtgcttccgggttacaaatacctcggacccggcaacggactcgacaagggggaacccgtcaacgcagcggacgcggcagccctcgagcacgacaaggcctacgaccagcagctcaaggccggtgacaacccctacctcaagtacaaccacgccgacgcggagttccagcagcggcttcagggcgacacaccgtttgggggcaacctcggcagagcagtcttccaggccaaaaagagggttcttgaacctcttggtctggttgagcaagcgggtgagacggctcctggaaagaagagaccgttgattgaatccccccagcagcccgactcctccacgggtatcggcaaaaaaggcaagcagccggctaaaaagaagctcgttttcgaagacgaaactggagcaggcgacggaccccctgagggatcaacttccggagccatgtctgatgacagtgagatgcgtgcagcagctggcggagctgcagtcgagggsggacaaggtgccgatggagtgggtaatgcctcgggtgattggcattgcgattccacctggtctgagggccacgtcacgaccaccagcaccagaacctgggtcttgcccacctacaacaaccacctntacaagcgactcggagagagcctgcagtccaacacctacaacggattctccaccccctggggatactttgacttcaaccgcttccactgccacttctcaccacgtgactggcagcgactcatcaacaacaactggggcatgcgacccaaagccatgcgggtcaaaatcttcaacatccaggtcaaggaggtcacgacgtcgaacggcgagacaacggtggctaataaccttaccagcacggttcagatctttgcggactcgtcgtacgaactgccgtacgtgatggatgcgggtcaagagggcagcctgcctccttttcccaacgacgtctttatggtgccccagtacggctactgtggactggtgaccggcaacacttcgcagcaacagactgacagaaatgccttctactgcctggagtactttccttcgcagatgctgcggactggcaacaactttgaaattacgtacagttttgagaaggtgcctttccactcgatgtacgcgcacagccagagcctggaccggctgatgaaccctctcatcgaccagtacctgtggggactgcaatcgaccaccaccggaaccaccctgaatgccgggactgccaccaccaactttaccaagctgcggcctaccaacttttccaactttaaaaagaactggctgcccgggccttcaatcaagcagcagggcttctcaaagactgccaatcaaaactacaagatccctgccaccgggtcagacagtctcatcaaatacgagacgcacagcactctggacggaagatggagtgccctgacccccggacctccaatggccacggctggacctgcggacagcaagttcagcaacagccagctcatctttgcggggcctaaacagaacggcaacacggccaccgtacccgggactctgatcttcacctctgaggaggagctggcagccaccaacgccaccgatacggacatgtggggcaacctacctggcggtgaccagagcaacagcaacctgccgaccgtggacagactgacagccttgggagccgtgcctggaatggtctggcaaaacagagacatttactaccagggtcccatttgggccaagattcctcataccgatggacactttcacccctcaccgctgattggtgggtttgggctgaaacacccgcctcctcaaatttttatcaagaacaccccggtacctgcgaatcctgcaacgaccttcagctctactccggtaaactccttcattactcagtacagcactggccaggtgtcggtgcagattgactgggagatccagaaggagcggtccaaacgctggaaccccgaggtccagtttacctccaactacggacagcaaaactctctgttgtgggctcccgatgcggctgggaaatacactgagcctagggctatcggtacccgctacctcacccaccacctgtaataacctgttaatcaataaaccggtttattcgtttcagttgaactttggtctccgtgtccttcttatcttatctcgtttccatggctactgcgtacataagcagcggcctgcggcgcttgcgcttcgcggtttacaactgccggttaatcagtaacttctggcaaaccatgatgatggagttggccactccctctatgcgcgctcgctcactcactcggccctggagaccaaaggtctccagactgccggcctctggccggcagggccgagtgagtgagcgagcgcgcatagagggagtggccaa

SEQ ID NO: 62 - DNA, 3098 bp, Adeno-associated virus
gaattcgccctttctacggctgcgtcaactggaccaatgagaactttcccttcaacgattgcgtcgacaagatggtgatctggtgggaggagggcaagatgacggccaaggtcgtggagtccgccaaggccattctcggcggcagcaaggtgcgcgtggaccaaaagtgcaagtcttccgcccagatcgatcccacccccgtgatcgtcacttccaacaccaacatgtgcgctgtgattgacgggaacagcaccaccttcgagcaccagcagccgttacaagaccggatgttcaaatttgaactcacccgccgtctggagcacgactttggcaaggtgacaaagcaggaagtcaaagagttcttccgctgggcgcaggatcacgtgaccgaggtggcgcatgagttctacgtcagaaagggtggagccaacaagagacccgcccccgatgacgcggataaaagcgagcccaagcgggcctgcccctcagtcgcggatccatcgacgtcagacgcggaaggagctccggtggactttgccgacaggtaccaaaacaaatgttctcgtcacgcgggcatgcttcagatgctgtttccctgcaagacatgcgagagaatgaatcagaatttcaacatttgcttcacgcacgggaccagagactgttcagaatgtttccccggcgtgtcagaatctcaaccggtcgtcagaaagaggacgtatcggaaactctgtgccattcatcatctgctggggcgggctcccgagattgcttgctcggcctgcgatctggtcaacgtggacctggatgaccgtgtttctgagcaataaatgacttaaaccaggtatggctgccgatggttatcttccagattggctcgaggacaacctctctgagggcattcgcgagtggtgggacttgaaacctggagccccgaaacccaaagccaaccagcaaaagcaggacgacggccggggtctggtgcttcctggctacaagtacctcggacccttcaacggactcgacaagggagagccggtcaacgaggcagacgccgcggccctcgagcacgacaaggcctacgacaagcagctcgagcagggggacaacccgtacctcaagtacaaccacgccgacgccgagtttcaggagcgtcttcaagaagatacgtcttttgggggcaacctcgggcgagcagtcttccaggccaagaagcgggttctcgaacctctcggtctggttgaggaaggcgctaagacggctcctggaaagaagagacccatagaatcccccgactcctccacgggcatcggcaagaaaggccagcagcccgctaaaaagaagctcaactttgggcagactggcgactcagagtcagtgcccgacccccaacctctcggagaacctcccgccgcgccctcaggtctgggatctggtacaatggctgcaggcggtggcgcaccaatggcagacaataacgaaggcgccgacggagtgggtaatgcctccggaaattggcattgcgattccacatggctgggcgacagagtcatcaccaccagcacccgcacctgggccctgcccacctacaacaaccacctctacaagcagatatcaagtcagagcggggctaccaacgacaaccacttcttcggctacagcaccccctggggctattttgacttcaacagattccactgccacttctcaccacgtgactggcagcgactcatcaacaacaactggggattccggcccagaaagctgcggttcaagttgttcaacatccaggtcaaggaggtcacgacgaacgacggcgttacgaccatcgctaataaccttaccagcacgattcaggtcttctcggactcggagtaccaactgccgtacgtcctcggctctgcgcaccagggctgcctccctccgttccctgcggacgtgttcatgattcctcagtacggatatctgactctaaacaacggcagtcagtctgtgggacgttcctccttctactgcctggagtactttccttctcagatgctgagaacgggcaataactttgaattcagctacacctttgaggaagtgcctttccacagcagctatgcgcacagccagagcctggaccggctgatgaatcccctcatcgaccagtacctgtactacctggcccggacccagagcactacggggtccacaagggagctgcagttccatcaggctgggcccaacaccatggccgagcaatcaaagaactggctgcccggaccctgttatcggcagcagagactgtcaaaaaacatagacagcaacaacaacagtaactttgcctggaccggggccactaaataccatctgaatggtagaaattcattaaccaacccgggcgtagccatggccaccaacaaggacgacgaggaccagttctttcccatcaacggagtgctggtttttggcgaaacgggggctgccaacaagacaacgctggaaaacgtgctaatgaccagcgaggaggagatcaaaaccaccaatcccgtggctacagaagaatacggtgtggtctccagcaacctgcaatcgtctacggccggaccccagacacagactgtcaacagccagggggctctgcccggcatggtctggcagaaccgggacgtgtacctgcagggtcccatctgggccaaaattcctcacacggacggcaactttcacccgtctcccctgatgggcggatttggactcaaacacccgcctcctcaaattctcatcaaaaacaccccggtacctgctaatcctccagaggtgtttactcctgccaagtttgcctcatttatcacgcagtacagcaccggccaggtcagcgtggagatcgagtgggaactgcagaaagaaaacagcaaacgctggaatccagagattcagtacacctcaaattatgccaagtctaataatgtggaatttgctgtcaacaacgaaggggtttatactgagcctcgccccattggcacccgttacctcacccgtaacctgtaattgcctgttaatcaataaaccggttaattcgtttcagttgaactttggtctctgcgaagggcgaattc

SEQ ID NO: 63 - protein, 728 aa, Artificial Sequence
  Description of Artificial Sequence: Synthetic polypeptide
MAADGYLPDWLEDNLSEGIREWWDLKPGAPKPKANQQKQDDGRGLVLPGYKYLGPFNGLDKGEPVNEADAAALEHDKAYDKQLEQGDNPYLKYNHADAEFQERLQEDTSFGGNLGRAVFQAKKRVLEPLGLVEEGAKTAPGKKRPIESPDSSTGIGKKGQQPAKKKLNFGQTGDSESVPDPQPLGEPPAAPSGLGSGTMAAGGGAPMADNNEGADGVGNASGNWHCDSTWLGDRVITTSTRTWALPTYNNHLYKQISSQSGATNDNHFFGYSTPWGYFDFNRFHCHFSPRDWQRLINNNWGFRPRKLRFKLFNIQVKEVTTNDGVTTIANNLTSTIQVFSDSEYQLPYVLGSAHQGCLPPFPADVFMIPQYGYLTLNNGSQSVGRSSFYCLEYFPSQMLRTGNNFEFSYTFEEVPFHSSYAHSQSLDRLMNPLIDQYLYYLARTQSTTGSTRELQFHQAGPNTMAEQSKNWLPGPCYRQQRLSKNIDSNNNSNFAWTGATKYHLNGRNSLTNPGVAMATNKDDEDQFFPINGVLVFGETGAANKTTLENVLMTSEEEIKTTNPVATEEYGVVSSNLQSSTAGPQTQTVNSQGALPGMVWQNRDVYLQGPIWAKIPHTDGNFHPSPLMGGFGLKHPPPQILIKNTPVPANPPEVFTPAKFASFITQYSTGQVSVEIEWELQKENSKRWNPEIQYTSNYAKSNNVEFAVNNEGVYTEPRPIGTRYLTRNL

SEQ ID NO: 64 - DNA, 2495 bp, Adeno-associated virus
gaattcgccctttctacggctgcgtcaactagaccaatgagaactttcccttcaacgattgcgtcgacaagatggtgatctggtgggaggagggcaagatgacggccaaggtcgtggagtccgccaaggccattcatcatctgctggggcgggctcccgagattgcttgctcggcctgcgatctggtcaacgtggacctggatgactgtgtttctgagcaataaatgacttaaaccaggtatggctgccgatggttatcttccagattggctcgaggacaacctctctgagggcattcgcgagtggtgggacttgaaacctggagccccgaaacccaaagccaaccagcaaaagcaggacgacggccggggtctggtgcttcctggctacaagtacctcggacccttcaacggactcgacaagggagagccggtcaacgaggcagacgccgcggccctcgagcacgacaaggcctacgacaagcagctcgagcagggggacaacccgtacctcaagtacaaccacgccgacgccgagtttcaggagcgtcttcaagaagatacgtcttttgggggcaacctcgggcgagcagtcttccaggccaagaagcgggttctcgaacctctcggtctggttgaggaaggcgctaagacggctcctggaaagaagagacccatagaatcccccgactcctccacgggcatcggcaagaaaggccagcagcccgctaaaaagaagctcaactttgggcagactggcgactcagagtcagtgcccgaccctcaaccaatcggagaaccccccgcaggcccctctggtctgggatctggtacaatggctgcaggcggtggcgctccaatggcagacaataacgaaggcgccgacggagtgggtaatgcctccggaaattggcattgcgattccacatggctgggcgacagagtcatcaccaccagcacccgcacctgggccctgcccacctacaacaaccacctctacaagcagatatcaagtcagagcggggctaccaacgacaaccacttcttcggctacagcaccccctggggctattttgacttcaacagattccactgccacttctcaccacgtgactggcagcgactcatcaacaacaactggggattccggcccagaaagctgcggttcaagttgttcaacatccaggtcaaggaggtcacgacgaacgacggcgttacgaccatcgctaataaccttaccagcacgattcaggtcttctcggactcggagtaccaactgccgtacgtcctcggctctgcgcaccagggctgcctccctccgttccctgcggacgtgttcatgattcctcagtacggatatctgactctaaacaacggcagtcagtctgtgggacgttcctccttctactgcctggagtactttccttctcagatgctgagaacgggcaataactttgaattcagctacacctttgaggaagtgcctttccacagcagctatgcgcacagccagagcctggaccggctgatgaatcccctcatcgaccagtacctgtactacctggcccggacccagagcactacggggtccacaagggagctgcagttccatcaggctgggcccaacaccatggccgagcaatcaaagaactggctgcccggaccctgttatcggcagcagagactgtcaaaaaacatagacagcaacaacaccagtaactttgcctggaccggggccactaaataccatctgaatggtagaaattcattaaccaacccgggcgtagccatggccaccaacaaggacgacgaggaccagttctttcccatcaacggagtgctggtttttggcaaaacgggggctgccaacaagacaacgctggaaaacgtgctaatgaccagcgaggaggagatcaaaaccaccaatcccgtggctacagaacagtacggtgtggtctccagcaacctgcaatcgtctacggccggaccccagacacagactgtcaacagccagggggctctgcccggcatggtctggcagaaccgggacgtgtacctgcagggtcccatctgggccaaaattcctcacacggacggcaactttcacccgtctcccctgatgggcggatttggactcaaacacccgcctcctcaaattctcatcaaaaacaccccggtacctgctaatcctccagaggtgtttactcctgccaagtttgcctcatttatcacgcagtacagcaccggccaggtcagcgtggagatcgagtgggaactgcagaaagaaaacagcaaacgctggaatccagagattcagtacacctcaaattatgccaagtctaataatgtggaatttgctgtcaacaacgaaggggtttatactgagcctcgccccattggcacccgttacctcacccgtaacctgtaattgcctgttaatcaataaaccggttaattcgtttcagttgaactttggtctctgcgaagggcgaattc

SEQ ID NO: 65 - protein, 728 aa, Artificial Sequence
  Description of Artificial Sequence: Synthetic polypeptide
MAADGYLPDWLEDNLSEGIREWWDLKPGAPKPKANQQKQDDGRGLVLPGYKYLGPFNGLDKGEPVNEADAAALEHDKAYDKQLEQGDNPYLKYNHADAEFQERLQEDTSFGGNLGRAVFQAKKRVLEPLGLVEEGAKTAPGKKRPIESPDSSTGIGKKGQQPAKKKLNFGQTGDSESVPDPQPIGEPPAGPSGLGSGTMAAGGGAPMADNNEGADGVGNASGNWHCDSTWLGDRVITTSTRTWALPTYNNHLYKQISSQSGATNDNHFFGYSTPWGYFDFNRFHCHFSPRDWQRLINNNWGFRPRKLRFKLFNIQVKEVTTNDGVTTIANNLTSTIQVFSDSEYQLPYVLGSAHQGCLPPFPADVFMIPQYGYLTLNNGSQSVGRSSFYCLEYFPSQMLRTGNNFEFSYTFEEVPFHSSYAHSQSLDRLMNPLIDQYLYYLARTQSTTGSTRELQFHQAGPNTMAEQSKNWLPGPCYRQQRLSKNIDSNNTSNFAWTGATKYHLNGRNSLTNPGVAMATNKDDEDQFFPINGVLVFGKTGAANKTTLENVLMTSEEEIKTTNPVATEQYGVVSSNLQSSTAGPQTQTVNSQGALPGMVWQNRDVYLQGPIWAKIPHTDGNFHPSPLMGGFGLKHPPPQILIKNTPVPANPPEVFTPAKFASFITQYSTGQVSVEIEWELQKENSKRWNPEIQYTSNYAKSNNVEFAVNNEGVYTEPRPIGTRYLTRNL

SEQ ID NO: 66 - DNA, 2504 bp, Adeno-associated virus
gaattcgccctttctacggctgcgtcaactggaccaatgagaactttcccttcaacgattgcgtcgacaagatggtgatctggtgggaggagggcaagatgacggccaaggtcgtggagtccgccaaggccattcatcatctgctggggcgggctcccgagattgcttgctcggcctgcgatctggtcaacgtggacctggatgactgtgtttctgagcaataaatgacttaaaccaggtatggctgccgatggttatcttccagattggctcgaggacaacctctctgagggcattcgcgagtggtgggacttgaaacctggagccccgaaacccaaagccaaccagcaaaagcaggacgacggccggggtctggtgcttcctggctacaagtacctcggacccttcaacggactcgacaagggagagccggtcaacgaggcagacgccgcggccctcgagcacgacaaggcctacgacaagcagctcgagcagggggacaacccgtacctcaagtacaaccacgccgacgccgagtttcaggagcgtcttcaagaagatacgtcttttgggggcaacctcgggcgagcagtcttccaggccaagaagcgggttctcgaacctctcggtctggttgaggaaggcgctaagacggctcctggaaagaagagacccatagaatcccccgactcctccacgggcatcggcaagaaaggccagcagcccgctaaaaagaagctcaactttgggcagactggcgactcagagtcagtgcccgaccctcaaccaatcggagaaccccccgcaggcccctctggtctgggatctggtacaatggctgcaggcggtggcgctccaatggcagacaataacgaaggcgccgacggagtgggtaatgcctccggaaattggcattgcgattccacatggctgggcgacagagtcatcaccaccagcacccgcacctgggccctgcccacctacaacaaccacctctacaagcagatatcaagtcagagcggggctaccaacgacaaccacttcttcggctacagcaccccctggggctattttgacttcaacagattccactgccacttctcatcacgtgactggcagcgactcatcaacaacaactggggattccggcccaagagactcaacttcaagctcttcaacatccaggtcaaggaggtcacgcagaatgaaggcaccaagaccatcgccaataaccttaccagcacgattcaggtctttacggactcggaataccggctcccgtacgtcctcggctctgcgcaccagggctgcctgcctccgttcccggcggacgtcttcatgattcctcagtacgggtacctgactctgaacaacggcagtcaggccgtgggccgttcctccttctactgcctggagtactttccttctcaaatgctgagaacgggcaacaactttgagttcagctaccagtttgaggacgtgccttttcacagcagctacgcgcacagccaaagcctggaccggctgatgaaccccctcatcgaccagtacctgtactacctgtctcggactcagtccacgggaggtaccgcaggaactcagcagttgctattttctcaggccgggcctaataacatgtcggctcaggccaaaaactggctacccgggccctgctaccggcagcaacgcgtctccacgacactgtcgcaaaataacaacagcaactttgcttggaccggtgccaccaagtatcatctgaatggcagagactctctggtaaatcccggtgtcgctatggcaacgcacaaggacgacgaagagcgattttttccatccagcggagtcttgatgtttgggaaacagggagctggaaaagacaacgtggactatagcagcgttatgctaaccagtgaggaagaaatcaaaaccaccaacccagtggccacagaacagtacggcgtggtggccgataacctgcaacagcaaaacgccgctcctattgtaggggccgtcaacagtcaaggagccttacctggcatggtctggcagaaccgggacgtgtacctgcagggtcctatctgggccaagattcctcacacggacggcaactttcatccttcgccgctgatgggaggctttggactgaaacacccgcctcctcagatcctgattaagaatacacctgttcccgcggatcctccaactaccttcagtcaagccaagccggcgtcgttcatcacgcagtacagcaccggacaggtcagcgtggaaattgaatgggagctgcagaaagagaacagcaagcgctggaacccagagattcagtatacttccaactactacaaatctacaaatgtggactttgctgtcaatactgagggtacttattcagagcctcgccccattggcacccgttacctcacccgtaacctgtaattgcctgttaatcaataaaccggttaattcgtttcagttgaactttggtctctgcgaagggcgaattc

SEQ ID NO: 67 - protein, 731 aa, Artificial Sequence
  Description of Artificial Sequence: Synthetic polypeptide
MAADGYLPDWLEDNLSEGIREWWDLKPGAPKPKANQQKQDDGRGLVLPGYKYLGPFNGLDKGEPVNEADAAALEHDKAYDKQLEQGDNPYLKYNHADAEFQERLQEDTSFGGNLGRAVFQAKKRVLEPLGLVEEGAKTAPGKKRPIESPDSSTGIGKKGQQPAKKKLNFGQTGDSESVPDPQPIGEPPAGPSGLGSGTMAAGGGAPMADNNEGADGVGNASGNWHCDSTWLGDRVITTSTRTWALPTYNNHLYKQISSQSGATNDNHFFGYSTPWGYFDFNRFHCHFSSRDWQRLINNNWGFRPKRLNFKLFNIQVKEVTQNEGTKTIANNLTSTIQVFTDSEYRLPYVLGSAHQGCLPPFPADVFMIPQYGYLTLNNGSQAVGRSSFYCLEYFPSQMLRTGNNFEFSYQFEDVPFHSSYAHSQSLDRLMNPLIDQYLYYLSRTQSTGGTAGTQQLLFSQAGPNNMSAQAKNWLPGPCYRQQRVSTTLSQNNNSNFAWTGATKYHLNGRDSLVNPGVAMATHKDDEERFFPSSGVLMFGKQGAGKDNVDYSSVMLTSEEEIKTTNPVATEQYGVVADNLQQQNAAPIVGAVNSQGALPGMVWQNRDVYLQGPIWAKIPHTDGNFHPSPLMGGFGLKHPPPQILIKNTPVPADPPTTFSQAKPASFITQYSTGQVSVEIEWELQKENSKRWNPEIQYTSNYYKSTNVDFAVNTEGTYSEPRPIGTRYLTRNL

SEQ ID NO: 68 - DNA, 3128 bp, Adeno-associated virus
gaattcgccctttctacggctgcgtcaactggaccaatgagaactttcccttcaacgattgcgtcgacaagatggtgatctggtgggaggagggcaagatgacggccaaggtcgtggagtccgccaaggccattctcggcggcagcaaggtgcgcgtggaccaaaagtgcaagtcttccgcccagatcgatcccacccccgtgatcgtcacttccaacaccaacatgtgcgccgtgattgacgggaacagcaccaccttcgagcaccagcagccgttacaagaccggatgttcaaatttgaactcacccgccgtctggagcacgactttggcaaggtgacaaagcaggaagtcaaagagttcttccgctgggcgcaggatcacgtgaccgaggtggcgcatgagttctacgtcagaaagggtggagccaacaagagacccgcccccgatgacgcggataaaagcgagcccaagcgggcctgcccctcagtcgcggatccatcgacgtcagacgcggaaggagctccggtggactttgccgacaggtaccaaaacaaatgttctcgtcacgcgggcatgcttcagatgctgtttccctgcaagacatgcgagagaatgaatcagaatttcaacatttgcttcacgcacgggaccagagactgttcagaatgtttccccggcgtgtcagaatctcaaccggtcgtcagaaagaggacgtatcggaaactctgtgccattcatcatctgctagggcgggctcccgagattgcttgctcggcctgcgatctggtcaacgtggacctggatgactgtgtttctgagcaataaatgacttaaaccaggtatggctgccgatggttatcttccagattggctcgaggacaacctctctgagggcattcgcgagtggtgggacttgaaacctggagccccgaaacccaaagccaaccagcaaaagcaggacgacggccggggtctggtgcttcctggctacaagtacctcggacccttcaacggactcgacaagggggagcccgtcaacgcggcggacgcagcggccctcgagcacgacaaggcctacgaccagcagctcaaagcgggtgacaatccgtacctgcggtataaccacgccgacgccgagtttcaggagcgtctgcaagaagatacgtcttttgggggcaacctcgggcgagcagtcttccaggccaagaagcgggttctcgaacctctcggtctggttgaggaaggcgctaagacggctcctggaaagaagagaccggtagagccatcaccccagcgttctccagactcctctacgggcatcggcaagacaggccagcagcccgcgaaaaagagactcaactttgggcagactggcgactcagagtcagtgcccgaccctcaaccaatcggagaaccccccgcaggcccctctggtctgggatctggtacaatggctgcaggcggtggcgctccaatggcagacaataacgaaggcgccgacggagtgggtagttcctcaggaaattggcattgcgattccacatggctgggcgacagagtcatcaccaccagcacccgaacctgggccctccccacctacaacaaccacctctacaagcaaatctccaacgggacatcgggaggaagcaccaacgacaacacctacttcggctacagcaccccctgggggtattttgactttaacagattccactgccacttctcaccacgtgactggcagcgactcatcaacaacaactggggattccggcccaagagactcaacttcaagctcttcaacatccaggtcaaggaggtcacgcagaatgaaggcaccaagaccatcgccaataaccttaccagcacgattcaggtctttacggactcggaataccagctcccgtacgtcctcggctctgcgcaccagggctgcctgcctccgttcccggcggacgtcttcatgattcctcagtacgggtacctgactctgaacaacggcagtcaggccgtgggccgttcctccttctactgcctggagtactttccttctcaaatgctgagaacgggcaacaactttgagttcagctaccagtttgaggacgtgccttttcacagcagctacgcgcacagccaaagcctggaccggctgatgaaccccctcatcgaccagtacctgtactacctgtctcggactcagtccacgggaggtaccgcaggaactcagcagttgctattttctcaggccgggcctaataacatgtcggctcaggccaaaaactggctacccgggccctgctaccggcagcaacgcgtctccacgacactgtcgcaaaataacaacagcaactttgcttggaccggtgccaccaagtatcatctgaatggcagagactctctggtaaatcccggtgtcgctatggcaacgcacaaggacgacgaagagcgattttttccatccagcggagtcttgatgtttgggaaacagggagctggaaaagacaacgtggactatagcagcgttatgctaaccagtgaggaagaaatcaaaaccaccaacccagtggccacagaacagtacggcgtggtggccgataacctgcaacagcaaaacgccgctcctattgtaggggccgtcaacagtcaaggagccttacctggcatggtctggcagaaccgggacgtgtacctgcagggtcctatctgggccaagattcctcacacggacggcaactttcatccttcgccgctgatgggaggctttggactgaaacacccgcctcctcagatcctgattaagaatacacctgttcccgcggatcctccaactaccttcagtcaagccaagctggcgtcgttcatcacgcagtacagcaccggacaggtcagcgtggaaattgaatgggagctgcagaaagagaacagcaagcgctggaacccagagattcagtatacttccaactactacaaatctacaaatgtggactttgctgtcaatactgagggtacttattcagagcctcgccccattggcacccgttacctcacccgtaacctgtaattgcctgttaatcaataaaccggctaattcgtttcagttgaactttggtctctgcgaagggcgaattc

SEQ ID NO: 69 - protein, 738 aa, Artificial Sequence
  Description of Artificial Sequence: Synthetic polypeptide
MAADGYLPDWLEDNLSEGIREWWDLKPGAPKPKANQQKQDDGRGLVLPGYKYLGPFNGLDKGEPVNAADAAALEHDKAYDQQLKAGDNPYLRYNHADAEFQERLQEDTSFGGNLGRAVFQAKKRVLEPLGLVEEGAKTAPGKKRPVEPSPQRSPDSSTGIGKTGQQPAKKRLNFGQTGDSESVPDPQPIGEPPAGPSGLGSGTMAAGGGAPMADNNEGADGVGSSSGNWHCDSTWLGDRVITTSTRTWALPTYNNHLYKQISNGTSGGSTNDNTYFGYSTPWGYFDFNRFHCHFSPRDWQRLINNNWGFRPKRLNFKLFNIQVKEVTQNEGTKTIANNLTSTIQVFTDSEYQLPYVLGSAHQGCLPPFPADVFMIPQYGYLTLNNGSQAVGRSSFYCLEYFPSQMLRTGNNFEFSYQFEDVPFHSSYAHSQSLDRLMNPLIDQYLYYLSRTQSTGGTAGTQQLLFSQAGPNNMSAQAKNWLPGPCYRQQRVSTTLSQNNNSNFAWTGATKYHLNGRDSLVNPGVAMATHKDDEERFFPSSGVLMFGKQGAGKDNVDYSSVMLTSEEEIKTTNPVATEQYGVVADNLQQQNAAPIVGAVNSQGALPGMVWQNRDVYLQGPIWAKIPHTDGNFHPSPLMGGFGLKHPPPQILIKNTPVPADPPTTFSQAKLASFITQYSTGQVSVEIEWELQKENSKRWNPEIQYTSNYYKSTNVDFAVNTEGTYSEPRPIGTRYLTRNL

SEQ ID NO: 70 - DNA, 3084 bp, Adeno-associated virus
gaattcgccctttctacggctgcatcaactggaccaatgagaactttcccttcaacgattgcgtcgacaagatggtgatctggtgggaggagggcaagatgacggccaaggtcgtggagtccgccaaggccattctcggcggcagcaaggtgcgcgtggaccaaaagtgcaagtcgtccgcccagatcgaccccacccccgtgatcgtcacctccaacaccaacatgtgcgccgtgattgacgggaacagcaccaccttcgagcaccagcagccgttgcaggaccggatgttcaagttcgaactcacccgccgtctggagcacgactttggcaaggtgaccaagcaggaagtcaaagagttcttccgctgggcgcaggatcacgtgaccgaggtggcgcatgagttctacgtcagaaagggcggagccagcaaaagacccgcccccgatgacgcggatataagcgagcccaagcgggcctgcccctcagtcgcggatccatcgacgtcagacgcggaaggagctccggtggactttgccgacaggtaccaaaacaaatgttctcgtcacgcgggcatgcttcagatgctgtttccctgcaaaacgtgcgagaaaatgaatcagaatttcaacatttgcttcacgcacggggtcagagactgctcagaatgtttccccggtgcatcagaatctcaaccggtcgtcagaaaaaaaacgtatcagaaactgtgtgccattcatcatctgctggggcgggcacccgagattgcttgctcggcctgcgatctggtcaacgtggacctggacgactgtgtttctgagcaataaatgacttaaaccaggtatggctgccgatggttatcttccagattggcttgaggacaacctctctgagggcattcgcgagtggtgggacctgaaacctggagccccgaaacccaaagccaaccagcaaaagcaggacgacggccggggtctggtgcttcctggctacaagtacctcggacccttcaacggactcgacaagggggagcccgtcaacgcggcggacgcagcggccctcgagcacgacaaggcctacgaccagcagctcaaagcgggtgacaatccgtacctgcggtataaccacgccgacgccgagtttcaggagcgtctgcaagaagatacgtcttttgggggcaacctcgggcgagcagtcttccaggccaagaagcgggttctcgaacctctcggtctggttgaggaaggcgctaagacggctcctggaaagaagagaccggtagagccatcacctcagcgttcccccgactcctccacgggcatcggcaagaaaggccaccagcccgcgagaaagagactgaactttgggcagactggcgactcggagtcagtccccgaccctcaaccaatcggagaaccaccagcaggcccctctggtctgggatctggtacaatggctgcaggcggtggcgctccaatggcagacaataacgaaggcgccgacggagtgggtagttcctcaggaaattggcattgcgattccacatggctgggcgacagagtcatcaccaccagcacccgaacctgggccctgcccacctacaacaaccatctctacaagcaaatctccaacgggacatcgggaggaagcactaacgacaacacctactttggctacagcaccccctgggggtattttgacttcaacagattccactgccacttctcaccacgtgactggcagcgactcatcaacaataactggggattccggcccaagagactcaacttcaagctcttcaacatccaggtcaaggaggtcacgcagaatgaaggcaccaagaccatcgccaataaccttaccagcacgattcaggtgtttacggactcggaataccagctcccgtacgtccccggctctgcgcaccagggctgcctccctccgttcccggcggacgtcttcatgattcctcagtacgggtatctgaccctaaacaatggcagtcaggctgtgggccgttcctccttctactgcctggaatacttcccttctcaaatgctgaggacgggcaacaactttgaattcagctacaccttcgaggacgtgcctttccacagcagctacgcgcacagccagagcctggaccggctgatgaaccctctcatcgaccagtacctgtattacttatccagaactcagtccacaggaggaactcaaggtactcagcaattgttattttctcaagccgggcccgcaaacatgtcggctcaggccaagaactggctacctggaccgtgttaccgtcagcaacgagtttccacgacactgtcgcaaaacaacaacagcaattttgcttggaccggtgccaccaagtatcacctgaatggcagagactccctggttaatcccggcgttgccatggctacccacaaggacgacgaggagcgcttcttcccgtcaagcggagttctaatgtttggcaagcagggggctggaaaagacaatgtggactacagcagcgtgatgctcaccagcgaagaagaaattaaaactactaacccagtggctacagagcagtatggtgtggtggcagacaacctgcagcagaccaacggagctcccattgtgggaactgtcaacagccagggggccttacctggtatggtctggcaaaaccgggacgtgtacctgcagggccccatctgggccaaaattcctcacacggacggcaactttcatccttcgccgctgatgggaggctttggactgaaacacccgcctcctcagatcctggtgaaaaacactcctgttcctgcggatcctccgaccaccttcagccaggccaagctggcttcttttatcacgcagtacagcaccggacaggtcagcgtggaaatcgaatgggagctgcagaaagaaaacagcaagcgctggaacccagagattcagtatacttccaactactacaaatctacaaatgtggactttgctgtcaatactgagggtacttattcagagcctcgccccattggcactcgttatctcacccgtaatctgtaattgcttgttaatcaataaaccggt

SEQ ID NO: 71 - protein, 738 aa, Artificial Sequence
  Description of Artificial Sequence: Synthetic polypeptide
MAADGYLPDWLEDNLSEGIREWWDLKPGAPKPKANQQKQDDGRGLVLPGYKYLGPFNGLDKGEPVNAADAAALEHDKAYDQQLKAGDNPYLRYNHADAEFQERLQEDTSFGGNLGRAVFQAKKRVLEPLGLVEEGAKTAPGKKRPVEPSPQRSPDSSTGIGKKGHQPARKRLNFGQTGDSESVPDPQPIGEPPAGPSGLGSGTMAAGGGAPMADNNEGADGVGSSSGNWHCDSTWLGDRVITTSTRTWALPTYNNHLYKQISNGTSGGSTNDNTYFGYSTPWGYFDFNRFHCHFSPRDWQRLINNNWGFRPKRLNFKLFNIQVKEVTQNEGTKTIANNLTSTIQVFTDSEYQLPYVPGSAHQGCLPPFPADVFMIPQYGYLTLNNGSQAVGRSSFYCLEYFPSQMLRTGNNFEFSYTFEDVPFHSSYAHSQSLDRLMNPLIDQYLYYLSRTQSTGGTQGTQQLLFSQAGPANMSAQAKNWLPGPCYRQQRVSTTLSQNNNSNFAWTGATKYHLNGRDSLVNPGVAMATHKDDEERFFPSSGVLMFGKQGAGKDNVDYSSVMLTSEEEIKTTNPVATEQYGVVADNLQQTNGAPIVGTVNSQGALPGMVWQNRDVYLQGPIWAKIPHTDGNFHPSPLMGGFGLKHPPPQILVKNTPVPADPPTTFSQAKLASFITQYSTGQVSVEIEWELQKENSKRWNPEIQYTSNYYKSTNVDFAVNTEGTYSEPRPIGTRYLTRNL

SEQ ID NO: 72 - DNA, 3123 bp, Adeno-associated virus
gaattcgcccttggctgcgtcaactggaccaatgagaactttcccttcaacgattgcgtcgacaagatggtgatctggtgggaggagggcaagatgacggccaaggtcgtggagtccgccaaggccattctcggcggcagcaaggtgcgcgtggaccaaaagtgcaagtcgtccgcccagatcgaccccacccccgtgatcgtcacctccaacaccaacatgtgcgccgtgattgacgggaacagcaccaccttcgagcaccagcagccgttgcaggaccggatgttcaagttcgaactcacccgccgtctggagcacgactttggcaaggtgaccaagcaggaagtcaaagagttcttccgctgggcgcaggatcacgtgaccgaggtggcgcatgagttctacgtcagaaagggcggagccagcaaaagacccgcccccgatgacgcggatataagcgagcccaagcgggcctgcccctcagtcgcggatccatcgacgtcagacgcggaaggagctccggtggactttgccgacaggtaccaaaacaaatgttctcgtcacgcgggcatgctccagatgctgtttccctgcaaaacgtgcgagagaatgaatcagaatttcaacatttgcttcacgcacggggtcagagactgctcagaatgtttccccggtgcatcagaatctcaaccggtcgtcagaaaaaaaacgtatcagaaactgtgtgccattcatcatctgctggggcgggcacccgagattgcttgctcggcctgcgatctggtcaacgtggacctggacgactgtgtttctgagcaataaatgacttaaaccaggtatggctgccgatggttatcttccagattggcttgaggacaacctctctgagggcattcgcgagtggtgggacctgaaacctggagccccgaaacccaaagccaaccagcaaaagcaggacgacggccggggtctggtgcttcctggctacaagtacctcggacccttcaacggactcgacaagggggagcccgtcaacgcggcggacgcagcggccctcgagcacgacaaggcctacgaccagcagctcaaagcgggtgacaatccgtacctgcggtataaccacgccgacgccgagtttcaggagcgtctgcaagaagatacgtcttttgggggcaacctcgggcgagcagtcttccaggccaagaagcgggttctcgaacctctcggtctggttgaggaaggcgctaagacggctcctggaaagaagagaccggtagagccatcacctcagcgttcccccgactcctccacgggcatcggcaagaaaggccaccagcccgcgagaaagagactgaactttgggcagactggcgactcggagtcagtccccgaccctcaaccaatcggagaaccaccagcaggcccctctggtctgggatctggtacaatggctgcaggcggtggcgctccaatggcagacaataacgaaggcgccgacggagtgggtagttcctcaggaaattggcattgcgattccacatggctgggcgacagagtcatcaccaccagcacccgaacctgggccctgcccacctacaacaaccatctctacaagcaaatctccaacgggacatcgggaggaagcactaacgacaacacctactttggctacagcaccccctgggggtattttgacttcaacagattccactgccacttctcaccacgtgactggcagcgactcatcaacaataactggggattccggcccaagagactcaacttcaagctcttcaacatccaggtcaaggaggtcacgcagaatgaaggcaccaagaccatcgccaataaccttaccagcacgattcaggtgtttacggactcggaataccagctcccgtacgtcctcggctctgcgcaccagggctgcctccctccgttcccggcggacgtcttcatgattcctcagtacgggtatctgaccctaaacaatggcagtcaggctgtgggccgttcctccttctactgcctggaatacttcccttctcaaatgctgaggacgggcaacaactttgaattcagctacaccttcgaggacgtgcctttccacagcagctacgcgcacagccagagcctggaccggctgatgaaccctctcatcgaccagtacctgtattacttatccagaactcagtccacaggaggaactcaaggtactcagcaattgttattttctcaagccgggcccgcaaacatgtcggctcaggccaagaactggctacctggaccgtgttaccgtcagcaacgagtttccacgacactgtcgcaaaacaacaacagcaattttgcttggaccggtgccaccaagtatcacctgaatggcagagactccctggttaatcccggcgttgccatggctacccacaaggacgacgaggagcgcttcttcccgtcaagcggagttctaatgtttggcaagcagggggctggaaaagacaatgtggactacagcagcgtgatgctcaccagcgaagaagaaattaaaactactaacccagtggctacagagcagtatggtgtggtggcagacaacctgcagcagaccaacggagctcccattgtgggaactgtcaacagccagggggccttacctggtatggtctggcaaaaccgggacgtgtacctgcagggccccatctgggccaaaattcctcacacggacggcaactttcatccttcgccgctgatgggaggctttggactgaaacacccgcctcctcagatcctggtgaaaaacactcctgttcctgcggatcctccgaccaccttcagccaggccaagctggcttcttttatcacgcagtacagcaccggacaggtcagcgtggaaatcgaatgggagctgcagaaagaaaacagcaagcgctggaacccagagattcagtatacttccaactactacaaatctacaaatgtggactttgctgtcaatactgagggtacttattcagagcctcgccccattggcactcgttatctcacccgtaatctgtaattgcttgttaatcaataaaccggttaattcgtttcagttgaactttggtctctgcgaagggcgaattc

SEQ ID NO: 73 - protein, 738 aa, Artificial Sequence
  Description of Artificial Sequence: Synthetic polypeptide
MAADGYLPDWLEDNLSEGIREWWDLKPGAPKPKANQQKQDDGRGLVLPGYKYLGPFNGLDKGEPVNAADAAALEHDKAYDQQLKAGDNPYLRYNHADAEFQERLQEDTSFGGNLGRAVFQAKKRVLEPLGLVEEGAKTAPGKKRPVEPSPQRSPDSSTGIGKKGHQPARKRLNFGQTGDSESVPDPQPIGEPPAGPSGLGSGTMAAGGGAPMADNNEGADGVGSSSGNWHCDSTWLGDRVITTSTRTWALPTYNNHLYKQISNGTSGGSTNDNTYFGYSTPWGYFDFNRFHCHFSPRDWQRLINNNWGFRPKRLNFKLFNIQVKEVTQNEGTKTIANNLTSTIQVFTDSEYQLPYVLGSAHQGCLPPFPADVFMIPQYGYLTLNNGSQAVGRSSFYCLEYFPSQMLRTGNNFEFSYTFEDVPFHSSYAHSQSLDRLMNPLIDQYLYYLSRTQSTGGTQGTQQLLFSQAGPANMSAQAKNWLPGPCYRQQRVSTTLSQNNNSNFAWTGATKYHLNGRDSLVNPGVAMATHKDDEERFFPSSGVLMFGKQGAGKDNVDYSSVMLTSEEEIKTTNPVATEQYGVVADNLQQTNGAPIVGTVNSQGALPGMVWQNRDVYLQGPIWAKIPHTDGNFHPSPLMGGFGLKHPPPQILVKNTPVPADPPTTFSQAKLASFITQYSTGQVSVEIEWELQKENSKRWNPEIQYTSNYYKSTNVDFAVNTEGTYSEPRPIGTRYLTRNL

SEQ ID NO: 74 - DNA, 3122 bp, Adeno-associated virus
gaattcgccctttctacggctgcgtcaactggaccaatgagaactttcccttcaacgattgcgtcgacaagatggtgatctggtgggaggagggcaagatgacggccaaggtcgtggagtccgccaaggccattctcggcggcagcaaggtgcgtgtggaccaaaagtgcaagtcttccgcccagatcgatcccacccccgtgatcgtcacctccaacaccaacatgtgcgccgtgattgacgggaacagcgccaccttcgagcaccagcagccgttgcaggaccggatgttcaaatttgaactcacccgccgtctggagcatgactttggcaaggtgacgaagcaggaagtcaaagagttcttccgctgggcgcaggatcacgtgaccgaggtggcgcatgagttccacgtcagaaagggtggagccaacaagagacccgcccccgatgacgcggatataagcgagcccaagcgggcctgcccctcagtcgcggatccatcgacgtcagacgcggaaggagctccggtggactttgccgacaggtaccaaaacaaatgttctcgtcacgcgggcatgcttcagatgctgtttccctgcaagacatgcgagagaatgaatcagaatttcaacatttgcttcacgcacgggaccagagactgttcagaatgtttccccggcgtgtcagaatctcaaccggtcgtcagaaagaggacgtatcggaaactctgtgcgattcatcatctgctggggcgggctcccgagattgcttgctcggcctgcgatctggtcaacgtggacctggatgactgtgtttctgagcaataaatgacttaaaccaggtatggctgccgatggttatcttccagattggctcgaggacaacctctctgagggcattcgcgagtggtgggacttgaaacctggagccccgaaacccaaagccaaccagcaaaagcaggacgacggccggggtctggtgcttcctggctacaagtacctcggacccttcaacggactcgacaagggggagcccgtcaacgcggcggacgcagcggccctcgagcacgacaaagcctacgaccagcagctcaaagcgggtgacaatccgtacctgcggtataatcacgccgacgccgagtttcaggagcgtctgcaagaagatacgtcttttgggggcaacctcgggcgagcagtcttccaggccaagaagcgggttctcgaacctctcggtctggttgaggaaggcgctaagacggctcctggaaagaagagactggtagagcagtcgccacaagagccagactcctcctcgggcatcggcaagacaggccagcagcccgctaaaaagagactcaattttggtcagactggcgactcagagtcagtccccgacccacaacctctcggagaacctccagcagccccctcaggtctgggacctaatacaatggcttcaggcggtggcgctccaatggcagacaataacgaaggcgccgacggagtgggtaattcctcgggaaattggcattgcgattccacatggctgggggacagagtcatcaccaccagcacccgaacctgggccctgcccacctacaacaaccacctctacaagcaaatctccaacggcacctcgggaggaagcaccaacgacaacacctattttggctacagcaccccctgggggtattttgacttcaacagattccactgtcacttttcaccacgtgactggcaacgactcatcaacaacaattggggattccggcccaaaagactcaacttcaagctgttcaacatccaggtcaaggaagtcacgacgaacgaaggcaccaagaccatcgccaataatctcaccagcaccgtgcaggtctttacggactcggagtaccagttaccgtacgtgctaggatccgctcaccagggatgtctgcctccgttcccggcggacgtcttcacggttcctcagtacggctatttaactttaaacaatggaagccaagccctgggacgttcctccttctactgtctggagtatttcccatcgcagatgctgagaaccggcaacaactttcagttcagctacaccttcgaggacgtgcctttccacagcagctacgcgcacagccagagcctggacaggctgatgaatcccctcatcgaccagtacctgtactacctggtcagaacgcaaacgactggaactggagggacgcagactctggcattcagccaagcgggtcctagctcaatggccaaccaggctagaaattgggtgcccggaccttgctaccggcagcagcgcgtctccacgacaaccaaccagaacaacaacagcaactttgcctggacgggagctgccaagtttaagctgaacggccgagactctctaatgaatccgggcgtggcaatggcttcccacaaggatgacgacgaccgcttcttcccttcgagcggggtcctgatttttggcaagcaaggagccgggaacgatggagtggattacagccaagtgctgattacagatgaggaagaaatcaaggctaccaaccccgtggccacagaagaatatggagcagtggccatcaacaaccaggccgccaatacgcaggcgcagaccggactcgtgcacaaccagggggtgattcccggcatggtgtggcagaatagagacgtgtacctgcagggtcccatctgggccaaaattcctcacacggacggcaactttcacccgtctcccctgatgggcggctttggactgaagcacccgcctcctcaaattctcatcaagaacacaccggttccagcggacccgccgcttaccttcaaccaggccaagctgaactctttcatcacgcagtacagcaccggacaggtcagcgtggaaatcgagtgggagctgcagaaagaaaacagcaaacgctggaatccagagattcaatacacttccaactactacaaatctacaaatgtggactttgctgtcaacacggaaggagtttatagcgagcctcgccccattggcacccgttacctcacccgcaacctgtaattacatgttaatcaataaaccggttaattcgtttcagttgaactttggtctctgcgaagggcgaattc

SEQ ID NO: 75 - protein, 736 aa, Artificial Sequence
  Description of Artificial Sequence: Synthetic polypeptide
MAADGYLPDWLEDNLSEGIREWWDLKPGAPKPKANQQKQDDGRGLVLPGYKYLGPFNGLDKGEPVNAADAAALEHDKAYDQQLKAGDNPYLRYNHADAEFQERLQEDTSFGGNLGRAVFQAKKRVLEPLGLVEEGAKTAPGKKRLVEQSPQEPDSSSGIGKTGQQPAKKRLNFGQTGDSESVPDPQPLGEPPAAPSGLGPNTMASGGGAPMADNNEGADGVGNSSGNWHCDSTWLGDRVITTSTRTWALPTYNNHLYKQISNGTSGGSTNDNTYFGYSTPWGYFDFNRFHCHFSPRDWQRLINNNWGFRPKRLNFKLFNIQVKEVTTNEGTKTIANNLTSTVQVFTDSEYQLPYVLGSAHQGCLPPFPADVFTVPQYGYLTLNNGSQALGRSSFYCLEYFPSQMLRTGNNFQFSYTFEDVPFHSSYAHSQSLDRLMNPLIDQYLYYLVRTQTTGTGGTQTLAFSQAGPSSMANQARNWVPGPCYRQQRVSTTTNQNNNSNFAWTGAAKFKLNGRDSLMNPGVAMASHKDDDDRFFPSSGVLIFGKQGAGNDGVDYSQVLITDEEEIKATNPVATEEYGAVAINNQAANTQAQTGLVHNQGVIPGMVWQNRDVYLQGPIWAKIPHTDGNFHPSPLMGGFGLKHPPPQILIKNTPVPADPPLTFNQAKLNSFITQYSTGQVSVEIEWELQKENSKRWNPEIQYTSNYYKSTNVDFAVNTEGVYSEPRPIGTRYLTRNL

SEQ ID NO: 76 - DNA, 3117 bp, Adeno-associated virus
gaattcgcccttggctgcgtcaactggaccaatgagaactttcccttcaacgattgcgtcgacaagatggtgatctggtgggaggagggcaagatgacggccaaggtcgtggagtccgccaaggccattctcggcggcagcaaggtgcgtgtggaccaaaagtgcaagtcttccgcccagatcgatcccacccccgtgatcgtcacctccaacaccaacatgtgcgccgtgattgacgggaacagcaccaccttcgagcaccagcagccgttgcaggaccggatgttcaaatttgaactcacccgccgtctggagcatgactttggcaaggtgacgaagcaggaagtcaaagagttcttccgctgggcgcaggatcacgtgaccgaggtggcgcatgagttccacgtcagaaagggtggagccaacaagagacccgcccccgatgacgcggatataagcgagcccaagcgggcctgcccctcagtcgcggatccatcgacgtcagacgcggaaggagctccggtggactttgccgacaggtaccaaaacaaatgttctcgtcacgcgggcatgcttcagatgctgtttccctgcaagacatgcgagagaatgaatcagaatttcaacatttgcttcacgcacgggaccagagactgttcagaatgtttccccggcgtgtcagaatctcaaccggtcgtcagaaagaggacgtatcggaaactctgtgcgattcatcatctgctggggcgggctcccgagattgcttgctcggcctgcgatctggtcaacgtggacctggatgactgtgtttctgagcaataaatgacttaaaccaggtatggctgccgatggttatcttccagattggctcgaggacaacctctctgagggcattcgcgagtggtgggacttgaaacctggagccccgaaacccaaagccaaccagcaaaagcaggacgacggccggggtctggtgcttcctggctacaagtacctcggacccttcaacggactcgacaagggggagcccgtcaacgcggcggacgcagcggccctcgagcacgacaaagcctacgaccagcagctcaaagcgggtgacaatccgtacctgcggtataatcacgccgacgccgagtttcaggagcgtctgcaagaagatacgtcttttgggggcaacctcgggcgagcagtcttccaggccaagaagcgggttctcgaacctctcggtctggttgaggaaggcgctaagacggctcctggaaagaagagaccggtagagcagtcgccacaagagccagactcctcctcgggcatcggcaagacaggccagcagcccgctaaaaagagactcaattttggtcagactggcgactcagagtcagtccccgacccacaacctctcggagaacctccagcagccccctcaggtctgggacctaatacaatggcttcaggcggtggcgctccaatggcagacaataacgaaggcgccgacggagtgggtaattcctcgggaaattggcattgcgattccacatggctgggggacagagtcatcaccaccagcacccgaacctgggccctgcccacctacaacaaccacctctacaagcaaatctccaacggcacctcgggaggaagcaccaacgacaacacctattttggctacagcaccccctgggggtattttgacttcaacagattccactgtcacttttcaccacgtgactggcaacgactcatcaacaacaattggggattccggcccaaaagactcaacttcaagctgttcaacatccaggtcaaggaagtcacgacgaacgaaggcaccaagaccatcgccaataatctcaccagcaccgtgcgggtctttacggactcggagtaccagttaccgtacgtgctaggatccgctcaccagggatgtctgcctccgttcccggcggacgtcttcatggttcctcagtacggctatttaactttaaacaatggaagccaagccctgggacgttcctccttctactgtctggagtatttcccatcgcagatgctgagaaccggcaacaactttcagttcagctacaccttcgaggacgtgcctttccacagcagctacgcgcacagccagagcctggacaggctgatgaatcccctcatcgaccagtacctgtactacctggtcagaacgcaaacgactggaactggagggacgcagactctggcattcagccaagcgggtcctagctcaatggccaaccaggctagaaattgggtgcccggaccttgctaccggcagcagcgcgtctccacgacaaccaaccagagcaacaacagcaactttgcctggacgggagctgccaagtttaagctgaacggccgagactctctaatgaatccgggcgtggcaatggcttcccacaaggatgacgacgaccgcttcttcccttcgagcggggtcctgatttttggcaagcaaggagccgggaacgatggagtggattacagccaagtgctgattacagatgaggaagaaatcaaggctaccaaccccgtggccacagaagaatatggagcagtggccatcaacaaccaggccgccaatacgcaggcgcagaccggactcgtgcacaaccagggggtgattcccggcatggtgtggcagaatagagacgtgtacctgcagggtcccatctgggccaaaattcctcacacggacggcaactttcacccgtctcccctgatgggcggctttggactgaagcacccgcctcctcaaattctcatcaagaacacaccggttccagcggacccgccgcttaccttcaaccaggccaagctgaactctttcatcacgcagtacagcaccggacaggtcagcgtggaaatcgagtgggagctgcagaaagaaaacagcaaacgctggaatccagagattcaatacacttccaactactacaaatctacaaatgtggactttgctgtcaacacggaaggagtttatagcgagcctcgccccattggcacccgttacctcacccgcaacctgtaattacatgttaatcaataaaccggttaattcgtttcagttgaactttggtctctgcgaagggcgaattc

SEQ ID NO: 77 - protein, 736 aa, Artificial Sequence
  Description of Artificial Sequence: Synthetic polypeptide
MAADGYLPDWLEDNLSEGIREWWDLKPGAPKPKANQQKQDDGRGLVLPGYKYLGPFNGLDKGEPVNAADAAALEHDKAYDQQLKAGDNPYLRYNHADAEFQERLQEDTSFGGNLGRAVFQAKKRVLEPLGLVEEGAKTAPGKKRPVEQSPQEPDSSSGIGKTGQQPAKKRLNFGQTGDSESVPDPQPLGEPPAAPSGLGPNTMASGGGAPMADNNEGADGVGNSSGNWHCDSTWLGDRVITTSTRTWALPTYNNHLYKQISNGTSGGSTNDNTYFGYSTPWGYFDFNRFHCHFSPRDWQRLINNNWGFRPKRLNFKLFNIQVKEVTTNEGTKTIANNLTSTVRVFTDSEYQLPYVLGSAHQGCLPPFPADVFMVPQYGYLTLNNGSQALGRSSFYCLEYFPSQMLRTGNNFQFSYTFEDVPFHSSYAHSQSLDRLMNPLIDQYLYYLVRTQTTGTGGTQTLAFSQAGPSSMANQARNWVPGPCYRQQRVSTTTNQSNNSNFAWTGAAKFKLNGRDSLMNPGVAMASHKDDDDRFFPSSGVLIFGKQGAGNDGVDYSQVLITDEEEIKATNPVATEEYGAVAINNQAANTQAQTGLVHNQGVIPGMVWQNRDVYLQGPIWAKIPHTDGNFHPSPLMGGFGLKHPPPQILIKNTPVPADPPLTFNQAKLNSFITQYSTGQVSVEIEWELQKENSKRWNPEIQYTSNYYKSTNVDFAVNTEGVYSEPRPIGTRYLTRNL

SEQ ID NO: 78 - DNA, 3121 bp, Adeno-associated virus
gaattcgcccttctacggctgcgtcaactggaccaatgagaactttcccttcaacgattgcgtcgacaagatggtgatctggtgggaggagggcaagatgacggccaaggtcgtggagtccgccaaggccattctcggcggcagcaaggtgcgtgtggaccaaaagtgcaagtcttccgcccagatcgatcccacccccgtgatcgtcacctccaacaccaacatgtgcgccgtgattgacgggaacagcaccaccttcgagcaccagcagccgttgcaggaccggatgttcaaatttgaactcacccgccgtctggagcatgactttggcaaggtgacgaagcaggaagtcaaagagttcttccgctgggcgcaggatcacgtgaccgaggtggcgcatgagttccacgtcagaaagggtggcgccaacaagagacccgcccccgatgacgcggatataagcgagcccaagcgggcctgcccctcagtcgcggatccatcgacgtcagacgcggaaggagctccggtggactttgccgacaggtaccaaaacaaatgttctcgtcacgcgggcatgcttcagatgctgtttccctgcaagacatgcgagagaatgaatcagaatttcaacatttgcttcacgcacgggaccagagactgttcagaatgtttccccggcgtgtcagaatctcaaccggtcgtcagaaagaggacgtatcggaaactctgtgcgattcatcatctgctggggcgggctcccgagattgcttgctcggcctgcgatctggtcaacgtggacctggatgactgtgtttctgagcaataaatgacttaaaccaggtatggctgccgatggttatcttccagattggctcgaggacaacctctctgagggcattcgcgagtggtgggacttgaaacctggagccccgaaacccaaagccaaccagcaaaagcaggacgacggccggggtctggtgcttcctggctacaagtacctcggacccttcaacggactcgacaagggggagcccgtcaacgcggcggacgcagcggccctcgagcacgacaaagcctacgaccagcagctcaaagcgggtgacaatccgtacctgcggtataatcacgccgacgccgagtttcaggagcgtctgcaagaagatacgtcctttgggggcaacctcgggcgagcagtcttccaggccaagaagcgggttctcgaacctctcggtctggttgaggaaggcgctaagacggctcctggaaagaagagaccggtagagcagtcgccacaagagccagactcctcctcgggcatcggcaagacaggccagcagcccgctaaaaagagactcaattttggtcagactggcgactcagagtcagtccccgacccacaacctctcggagaacctccagcagccccctcaggtctgggacctaatacaatggcttcaggcggtggcgctccaatggcagacaataacgaaggcgccgacggagtgggtaattcctcgggaaattggcattgcgattccacatggctgggggacagagtcatcaccaccagcacccgaacctgggccctgcccacctacaacaaccacctctacaagcaaatctccaacggcacctcgggaggaagcaccaacgacaacacctattttggctacagcaccccctgggggtattttgacttcaacagattccactgtcacttttcaccacgtgactggcaacgactcatcaacaacaattggggattccggcccaaaagactcaacttcaagctgttcaacatccaggtcaaggaagtcacgacgaacgaaggcaccaagaccatcgccaataatctcaccagcaccgtgcaggtctttacggacttggagtaccagttaccgtacgtgctaggatccgctcaccagggatgtctgcctccgttcccggcggacgtcttcatggttcctcagtacggctatttaactttaaacaatggaagccaagccctgggacgttcctccttctactgtctggagtatttcccatcgcagatgccgagaaccggcaacaactttcagttcagctacaccttcgaggacgtgcctttccacagcagctacgcgcacagccagagcctggacaggctgatgaatcccctcatcgaccagtacctgtactacctggtcagaacgcaaacgactggaactggagggacgcagactctggcattcagccaagcgggtcctagctcaatggccaaccaggctagaaattgggtgcccggaccttgctaccggcagcagcgcgtctccacgacaaccaaccagaacaacaacagcaactttgcctggacgggagctgccaagtttaagctgaacggccgagactctctaatgaatccgggcgtggcaatggcttcccacaaggatgacgacgaccgcttcttcccttcgagcggggtcctgatttttggcaagcaaggagccgggaacgatggagtggattacagccaagtgctgattacagatgaggaagaaatcaaggctaccaaccccgtggccacagaagaatatggagcagtggccatcaacaaccaggccgccaatacgcaggcgcagaccggactcgtgcacaaccagggggtgattcccggcatggtgtggcagaatagagacgtgtacctgcagggtcccatctgggccaaaattcctcacacggacggcaactttcacccgtctcccctgatgggcggctttggactgaagcacccgcctcctcaaattctcatcaagaacacaccggttccagcggacccgccgcttaccttcaaccaggccaagctgaactctttcatcacgcagtacagcaccggacaggtcagcgtggaaatcgagtgggagctgcagaaagaaaacagcaaacgctggaatccagagattcaatacacttccaactactacaaatctacaaatgtggactttgctgtcaacacggaaggagtttatagcgagcctcgccccattggcacccgttacctcacccgcaacctgtaattacatgttaatcaataaaccggttaattcgtttcagttgaactttggtctctgcgaagggcgaattc

SEQ ID NO: 79 - protein, 736 aa, Artificial Sequence
  Description of Artificial Sequence: Synthetic polypeptide
MAADGYLPDWLEDNLSEGIREWWDLKPGAPKPKANQQKQDDGRGLVLPGYKYLGPFNGLDKGEPVNAADAAALEHDKAYDQQLKAGDNPYLRYNHADAEFQERLQEDTSFGGNLGRAVFQAKKRVLEPLGLVEEGAKTAPGKKRPVEQSPQEPDSSSGIGKTGQQPAKKRLNFGQTGDSESVPDPQPLGEPPAAPSGLGPNTMASGGGAPMADNNEGADGVGNSSGNWHCDSTWLGDRVITTSTRTWALPTYNNHLYKQISNGTSGGSTNDNTYFGYSTPWGYFDFNRFHCHFSPRDWQRLINNNWGFRPKRLNFKLFNIQVKEVTTNEGTKTIANNLTSTVQVFTDLEYQLPYVLGSAHQGCLPPFPADVFMVPQYGYLTLNNGSQALGRSSFYCLEYFPSQMPRTGNNFQFSYTFEDVPFHSSYAHSQSLDRLMNPLIDQYLYYLVRTQTTGTGGTQTLAFSQAGPSSMANQARNWVPGPCYRQQRVSTTTNQNNNSNFAWTGAAKFKLNGRDSLMNPGVAMASHKDDDDRFFPSSGVLIFGKQGAGNDGVDYSQVLITDEEEIKATNPVATEEYGAVAINNQAANTQAQTGLVHNQGVIPGMVWQNRDVYLQGPIWAKIPHTDGNFHPSPLMGGFGLKHPPPQILIKNTPVPADPPLTFNQAKLNSFITQYSTGQVSVEIEWELQKENSKRWNPEIQYTSNYYKSTNVDFAVNTEGVYSEPRPIGTRYLTRNL

SEQ ID NO: 80 - DNA, 3122 bp, Adeno-associated virus
gaattcgccctttctacggctgcgtcaactggaccaatgagaactttcccttcaacgattgcgtcgacaagatggtgatctggtgggaggagggcaagatgacggccaaggtcgtggagtccgccaaggccattctcggcggcagcaaggtgcgtgtggaccaaaagtgcaagtcttccgcccagatcgatcccacccccgtgatcgtcacctccaacaccaacatgtgcgccgtgattgacgggaacagcaccaccttcgagcaccagcagccgttgcaggaccggatgttcaaatttgaactcacccgccgtctggagcatgactttggcaaggtgacgaagcaggaagtcaaagggttcttccgctgggcgcaggatcacgtgaccgaggtggcgcatgagttccacgtgcgagcccaagcgggcctgcccctcagtcgcggatccatcgacgtcagaccagaaagggtggagccaacaagagacccgcccccgatgacgcggatataagcggaaggagctccggtggactttgccgacaggtaccaaaacaaatgttctcgtcacgcgggcatgcttcagatgctgtttccctgcaagacatgcgagagaatgaatcagaatttcaacatttgcttcacgcacgggaccagagactgttcagaatgtttccccggcgtgtcagaatctcaaccggtcgtcagaaagaggacgtatcggaaactctgtgcgattcatcatctgctggggcgggctcccgagattgcttgctcggcctgcgatctggtcaacgtggacctggatgactgtgtttctgagcaataaatgacttaaaccaggtatggctgccgatggttatcttccagattggctcgaggacaacctctctgagggcattcgcgagtggtgggacttgaaacctggagccccgaaacccaaagccaaccagcaaaagcaggacgacggccggggtctggtgcttcctggctacaagtacctcggacccttcaacggactcgacaagggggagcccgtcaacgcggcggacgcagcggccctcgagcacgacaaagcctacgaccagcagctcaaagcgggtgacaatccgtacctgcggtataatcacgccgacgccgagtttcaggagcgtctgcaagaagatacgtcttttgggggcaacctcgggcgagcagtcttccaggccaagaagcgggttctcgaacctctcggtctggttgaggaaggcgctaagacggctcctggaaagaagagaccggtagagcagtcgccacaagagccagactcctcctcgggcatcggcaagacaggccagcagcccgctaaaaagagactcaattttggtcagactggcgactcagagtcagtccccgacccacaacctctcggagaacctccagcagccccctcaggtctgggacctaatacaatggcttcaggcggtggcgctccaatggcagacaataacgaaggcgccgacggagtgggtaattcctcgggaaattggcattgcgattccacatggctgggggacagagtcatcaccaccagcacccgaacctgggccctgcccacctacaacaaccacctctacaagcaaatctccaacggcacctcgggaggaagcaccaacgacaacacctattttggctacagcaccccctgggggtattttgacttcaacagattccactgtcacttttcaccacgtgactggcaacgactcatcaacaacaattggggattccggcccaaaagactcaacttcaagctgttcaacatccaggtcaaggaagtcacgacgaacgaaggcaccaagaccatcgccaataatctcaccagcaccgtgcaggtctttacggactcggagtaccagttaccgtacgtgctaggatccgctcaccagggatgtctgcctccgttcccggcggacgtcttcatggttcctcagtacggctatttaactttaaacaatggaagccaagccctgggacgttcctccttctactgtctggagtatttcccatcgcagatgctgagaaccggcaacaactttcagttcagctacaccttcgaggacgtgcctttccacagcagctacgcgcacagccagagcctggacaggctgatgaatcccctcatcgaccagtacctgtactacctggtcagaacgcaaacgactggaactggagggacgcagactctggcattcagccaagcgggtcctagctcaatggccaaccaggctagaaattgggtgcccggaccttgctaccggcagcagcgcgtctccacgacaaccaaccagaacaacaacagcaactttgcctggacgggagctgccaagtttaagctgaacggccgagactctctaatgaatccgggcgtggcaatggcttcccacaaggatgacgacgaccgcttcttcccttcgagcggggtcctgatttttggcaagcaaggagccgggaacgatggagtggattacagccaagtgctgattacagatgaggaagaaatcaaggctaccaaccccgtggccacagaagaatatggagcagtggccatcaacaaccaggccgccaatacgcaggcgcagaccggactcgtgcacaaccagggggtgattcccggcatggtgtggcagaatagagacgtgtacctgcagggtcccatctgggccaaaattcctcacacggacggcaactttcacccgtctcccctgatgggcggctttggactgaagcacccgcctcctcaaattctcatcaagaacacaccggttccagcggacccgccgcttaccttcaaccaggccaagctgaactctttcatcacgcagtacagcaccggacaggtcagcgtggaaatcgagtgggagctgcagaaagaaaacagcaaacgctggaatccagagattcaatacacttccaactactacaaatctacaaatgtggactttgctgtcaacacggagggggtttatagcgagcctcgccccattggcacccgttacctcacccgcaacctgtaattacatgttaatcaataaaccggttaattcgtttcagttgaactttggtctctgcgaagggcgaattc

SEQ ID NO: 81 - protein, 736 aa, Artificial Sequence
  Description of Artificial Sequence: Synthetic polypeptide
MAADGYLPDWLEDNLSEGIREWWDLKPGAPKPKANQQKQDDGRGLVLPGYKYLGPFNGLDKGEPVNAADAAALEHDKAYDQQLKAGDNPYLRYNHADAEFQERLQEDTSFGGNLGRAVFQAKKRVLEPLGLVEEGAKTAPGKKRPVEQSPQEPDSSSGIGKTGQQPAKKRLNFGQTGDSESVPDPQPLGEPPAAPSGLGPNTMASGGGAPMADNNEGADGVGNSSGNWHCDSTWLGDRVITTSTRTWALPTYNNHLYKQISNGTSGGSTNDNTYFGYSTPWGYFDFNRFHCHFSPRDWQRLINNNWGFRPKRLNFKLFNIQVKEVTTNEGTKTIANNLTSTVQVFTDSEYQLPYVLGSAHQGCLPPFPADVFMVPQYGYLTLNNGSQALGRSSFYCLEYFPSQMLRTGNNFQFSYTFEDVPFHSSYAHSQSLDRLMNPLIDQYLYYLVRTQTTGTGGTQTLAFSQAGPSSMANQARNWVPGPCYRQQRVSTTTNQNNNSNFAWTGAAKFKLNGRDSLMNPGVAMASHKDDDDRFFPSSGVLIFGKQGAGNDGVDYSQVLITDEEEIKATNPVATEEYGAVAINNQAANTQAQTGLVHNQGVIPGMVWQNRDVYLQGPIWAKIPHTDGNFHPSPLMGGFGLKHPPPQILIKNTPVPADPPLTFNQAKLNSFITQYSTGQVSVEIEWELQKENSKRWNPEIQYTSNYYKSTNVDFAVNTEGVYSEPRPIGTRYLTRNL

SEQ ID NO: 82 - DNA, 2370 bp, Adeno-associated virus
gaattcgccctttctacggctgcgtcaactggaccaatgagaactttcccttcaacgattgcgtcgacaagatggtgatctggtgggaggagggcaagatgacggccaaggtcgtggagtccgccaaggccattctcggcggcagcaaggtgcgcgtggaccaaaagtgcaagtcgtccgcccagatcgaccccacccccgtgatcgtcacctccaacaccaacatgtgcgccgtgattgacgggaacagcaccaccttcgagcaccagcagccgttgcaggaccggatgttcaagttcgaactcacccgccgtctggagcacgactttggcaaggtgaccaagcaggaagtcaaagagttcttccgctgggcgcaggatcacgtgaccgaggtggcgcatgagttctacgtcagaaagggcggagccagcaaaagacccgcccccgatgacgcggatataagcgagcccaagcgggcctgcccctcagtcgcggatccatcgacgtcagacgcggaaggagctccggtggactttgccgacaggtaccaaaacaaatgttctcgtcacgcgggcatgcttcagacgctgtttccctgcaaaacgtgcgagagaatgaatcagaatttcaacatttgcttcacgcacggggtcagagactgctcagaatgtttccccggtgcatcagaatctcaaccggtcgtcagaaaaaaaacgtatcagaaactgtgtgccattcatcatctgctggggcgggcacccgagattgcttgctcggcctgcgatctggtcaacgtggacctggacgactgtgtttctgagcaataaatgacttaaaccaggtatggctgccgatggttatcttccagattggcttgaggacaacctctctgagggcattcgcgagtggtgggacctgaaacctggagccccgaaacccaaagccaaccagcaaaagcaggacgacggccggggtctggtgcttcctggctacaagtacctcggacccttcaacggactcgacaagggggagcccgtcaacgcggcggacgcagcggccctcgagcacgacaaggcctacgaccagcagctcaaagcgggtgacaatccgtacctgcggtataaccacgccgacgccgagtttcaggagcgtctgcaagaagatacgtcttttgggggcaacctcgggcgagcagtcttccaggccaagaagcgggttctcgaacctctcggtctggttgaggaaggcgctaagacggctcctggaaagaagagaccggtagagccatcacctcagcgttcccccgactcctccacgggcatcggcaagaaaggccaccagcccgcgagaaagagactgaactttgggcagactggcgactcggagtcagtccccgaccctcaaccaatcggagaaccaccagcaggcccctctggtctgggatctggtacaatggctgcaggcggtggcgctccaatggcagacaataacgaaggcgccgacggagtgggtagttcctcaggaaattggcattgcgattccacatggctgggcgacagagtcatcaccaccagcacccgaacctgggccctgcccacctacaacaaccatctctacaagcaaatctccaacgggacatcgggaggaagcactaacgacaacacctactttggctacagcaccccctgggggtattttgacttcaacagattccactgccacttctcaccacgtgactggcagcgactcatcaacaataactggggattccggcccaagagactcaacttcaagctcttcaacatccaggtcaaggaggtcacgcagaatgaaggcaccaagaccatcgccaataaccttaccagcacgattcaggtgtttacggactcggaataccagctcccgtacgtcctcggctctgcgcaccagggctgcctccctccgttcccggcggacgtcttcatgattcctcagtacgggtatctgaccctaaacaatggcagtcaggctgtgggccgttcctccttctactgcctggaatacttcccttctcaaatgctgaggacgggcaacaactttgaattcagctacaccttcgaggacgtgcctttccacagcagctacgcgcacagccagagcctggaccggctgatgaaccctctcatcgaccagtacctgtattacttatccagaactcagtccacaggaggaactcaaggtactcagcaattgttattttctcaagccgggcccgcaaacatgtyggctcaggccaagaactggctacctggaccgtgttaccgtcagcaacgagtttccacgacactgtcgcaaaacaacaacagcaattttgctggaccggtgccacca

SEQ ID NO: 83 - protein, 738 aa, Artificial Sequence; identical to SEQ ID NO: 73
  Description of Artificial Sequence: Synthetic polypeptide

SEQ ID NO: 84 - DNA, 2205 bp, Adeno-associated virus
atgactgacggttaccttccagattggctagaggacaacctctctgaaggcgttcgagagtggtgggcgctgcaacctggagcccctaaacccaaggcaaatcaacaacatcaggacaacgctcggggtcttgtgcttccgggttacaaatacctcggacccggcaacggactcgacaagggggaacccgtcaacgcagcggacgcggcagccctcgagcacgacaaggcctacgaccagcagctcaaggccggtgacaacccctacctcaagtacaaccacgccgacgcggagttccagcagcggcttcagggcgacacatcgtttgggggcaacctcggcagagcagtcttccaggccaaaaagagggttcttgaacctcttggtctggttgagcaagcgggtgagacggctcctggaaagaagagaccgttgattgaatccccccagcagcccgactcctccacgggtatcggcaaaaaaggcaagcagccggctaaaaagaagctcgttttcgaagacgaaactggagcaggcgacggaccccctgagggatcaacttccggagccatgtctgatgacagtgagatgcgtgcagcagctggcggagctgcagtcgagggcggacaaggtgccgatggagtgggtaatgcctcgggtgattggcattgcgattccacctggtctgagggccacgtcacgaccaccagcaccagaacctgggtcttgcccacctacaacaaccacctctacaagcgactcggagagagcctgcagtccaacacctacaacggattctccaccccctggggatactttgacttcaaccgcttccactgccacttctcaccacgtgactggcagcgactcatcaacaacaactggggcatgcgacccaaagccatgcgggtcaaaatcttcaacatccaggtcaaggaggtcacgacgtcgaacggcgagacaacggtggctaataaccttaccagcacggttcagatctttgcggactcgtcgtacgaactgccgtacgtgatggatgcgggtcaagagggcagcctgcctccttttcccaacgacgtctttatggtgccccagtacggctactgtggactggtgaccggcaacacttcgcagcaacagactgacagaaatgccttctactgcctggagtactttccttcgcagatgctgcggactggcaacaactttgaaattacgtacagttttgagaaggtgcctttccactcgatgtacgcgcacagccagagcctggaccggctgatgaaccctctcatcgaccagtacctgtggggactgcaatcgaccaccaccggaaccaccctgaatgccgggactgccaccaccaactttaccaagctgcggcctaccaacttttccaactttaaaaagaactggctgcccgggccttcaatcaagcagcagggcttctcaaagactgccaatcaaaactacaagatccctgccaccgggtcagacagtctcatcaaatacgagacgcacagcactctggacggaagatggagtgccctgacccccggacctccaatggccacggctggacctgcggacagcaagttcagcaacagccagctcatctttgcggggcctaaacagaacggcaacacggccaccgtacccgggactctgatcttcacctctgaggaggagctggcagccaccaacgccaccgatacggacatgtggggcaacctacctggcggtgaccagagcaacagcaacctgccgaccgtggacagactgacagccttgggagccgtgcctggaatggtctggcaaaacagagacatttactaccagggtcccatttgggccaagattcctcataccgatggacactttcacccctcaccgctgattggtgggtttgggctgaaacacccgcctcctcaaatttttatcaagaacaccccggtacctgcgaatcctgcaacgaccttcagctctactccggtaaactccttcattactcagtacagcactggccaggtgtcggtgcagattgactgggagatccagaaggagcggtccaaacgctggaaccccgaggtccagtttacctccaactacggacagcaaaactctctgttgtgggctcccgatgcggctgggaaatacactgagcctagggctatcggtacccgctacctcacccaccacctgtaa

SEQ ID NO: 85 - protein, 734 aa, Adeno-associated virus; identical to SEQ ID NO: 57

SEQ ID NO: 86 - DNA, 3128 bp, Adeno-associated virus
gaattcgccctttctacggctgcgtcaactggaccaatgagaactttcccttcaacgattgcgtcgacaagatgttgatctggtgggaggagggcaagatgacggccaaggtcgtggagtccgccaaggccattctcggcggcagcaaagtgcgcgtggaccaaaagtgcaagccgtccgcccagatcgaccccacccccgtgatcgtcacctccaacaccaacatgtgcgccgtgattgacgggaacagcaccaccttcgagcaccagcagccgttgcgggaccggatgttcaagtttgaactcacccgccgtctggagcacgactttggcaaggtgacaaagcaggaagtcagagagttcttccgctgggcgcaggatcacgtgaccgaggtggcgcacgagttctacgtcagaaagggtggagccaacaagagacccgcccccgatgacgcggataaaagcgagcccaagcgggcctgcccctcagtcgcggatccatcgacgtcagacgcggaaggagctccggtggactttgccgacaggtaccaaaacaaatgttctcgtcacgcgggcatgcttcagatgctgtttccctgcaaaacatgcgagagaatgaatcagaatttcaacatttgcttcacgcacgggaccagagactgttcagaatgtttccccggcgtgtcagaatctcaaccggtcgtcagaaaaaagacgtatcggaaactctgtgcgattcatcatctgctggggcgggcacccgagattgcttgctcggcctgcgatctggtcaacgtggacctagatgactgtgtttctgagcaataaatgacttaaaccaggtatggctgccgatggttatcttccagattggctcgaggacaacctctctgagggcattcgcgagtggtgggacttgaaacctggagccccgaaacccaaagccaaccagcaaaagcaggacgacggccggggtctggtgcttcctggctacaagtacctcggacccttcaacggactcgacaagggggagcccgtcaacgcggcggacgcagcggccctcgagcacgacaaggcctacgaccagcagctcaaagcgggtgacaatccgtacctgcggtataaccacgccgacgccgagtttcaggagcgtctgcaagaagatacgtcttttgggggcaacctcgggcgagcagtcttccaggccaagaagcgggttctcgaacctctcggtctggttgaggaaggcgctaagacggctcctggaaagaagagaccggtagagccatcaccccagcgttctccagactcctctacgggcatcggcaagaaaggccagcagcccgcgaaaaagagactcaactttgggcagactggcgactcagagtcagtgcccgaccctcaaccaatcggagaaccccccgcaggcccctctggtctgggatctggtacaatggctgcaggcggtggcgctccaatggcagacaataacgaaggcgccgacggagtgggtagttcctcaggaaattggcattgcgattccacatggctgggcgacagagtcatcaccaccagcacccgaacctgggccctccccacctacaacaaccacctctacaagcaaatctccaacgggacttcgggaggaagcaccaacgacaacacctacttcggctacagcaccccctgggggtattttgactttaacagattccactgccacttctcaccacgtgactggcagcgactcatcaacaacaactggggattccggcccaagagactcaacttcaagctcttcaacatccaggtcaaggaggtcacgcagaatgaaggcaccaagaccatcgccaataaccttaccagcacgattcaggtctttacggactcggaataccagctcccgtacgtcctcggctctgcgcaccagggctgcctgcctccgttcccggcggacgtcttcatgattcctcagtacgggtacctgactctgaacaatggcagtcaggccgtgggccgttcctccttctactgcctggagtactttccttctcaaatgctgagaacgggcaacaactttgagttcagctaccagtttgaggacgtgccttttcacagcagctacgcgcacagccaaagcctggaccggctgatgaaccccctcatcgaccagtacctgtactacctgtctcggactcagtccacgggaggtaccgcaggaactcagcagttgctattttctcaggccgggcctaataacatgtcggctcaggccaaaaactggctacccgggccctgctaccggcagcaacgcgtctccacgacactgtcgcaaaataacaacagcaactgtaaatcccggtgtcgctatggcaacccacaaggacgacgaagagcgattttgcctggaccggtgccaccaagtatcatctgaatggcagagactctctgttttccgtccagcggagtcttaatgtttgggaaacagggagctggaaaagacaacgtggactatagcagcgttatgctaaccagtgaggaagaaattaaaaccaccaacccagtggccacggaacagtacggcgtggtggccgataacctgcaacagcaaaacgccgctcctattgtaggggccgtcaacagtcaaggagccttacctggcatggtctggcagaaccgggacgtgtacctgcagggtcctatctgggccaagattcctcacacggacggaaactttcatccctcgccgctgatgggaggctttggactgaaacacccgcctcctcagatcctgattaagaatacacctgttcccgcggatcctccaactaccttcagtcaagctaagctggcgtcgttcatcacgcagtacagcaccggacaggtcagcgtggaaattgaatgggagctgcagaaagaaaacagcaaacgctggaacccagagattcaatacacttccaactactacaaatctacaaatgtggacttcgctgttaacacagatggcacttattctgagcctcgccccattggcacccgttacctcacccgtaatctgtaattgctcgttaatcaataaaccggttgattcgtttcagttgaactttggtctctgcgaagggcgaattc

SEQ ID NO: 87 - protein, 738 aa, Artificial Sequence; identical to SEQ ID NO: 7
  Description of Artificial Sequence: Synthetic polypeptide

SEQ ID NO: 88 - DNA, 3128 bp, Adeno-associated virus
gaattcgccctttctacggctgcgtcaactggaccaatgagaactttcccttcaacgattgcgtcgacaagatggtgatctggtgggaggagggcaagatgacggccaaggtcgtggagtccgccaaggccattctcggcggcagcaaagtgcgcgtggaccaaaagtgcaagtcgtccgcccagatcgaccccacccccgtgatcgtcacctccaacaccaacatgtgcgccgtgattgacgggaacagcaccaccttcgagcaccagcagccgttgcaggaccggatgttcaagtttgaactcacccgccgtctggagcacgactttggcaaggtgacaaagcaggaagtcagagagttcttccgctgggcgcaggatcacgtgaccgaggtggcgcacgagttctacgtcagaaagggtggagccaacaagagacccgcccccgatgacgcggataaaagcgagcccaagcgggcctgcccctcagtcgcggatccatcgacgtcagacgcggaaggagctccggtggactttgccgacaggtaccaaaacaaatgttctcgtcacgcgggcatgcttcagatgctgtttccctgcaaaacatgcgagagaatgaatcagaatttcaacatttgcttcacgcacgggaccagagactgttcagaatgtttccccggcgtgtcagaatctcaaccggttgtcagaaaaaagacgtatcggaaactctgtgcgattcatcatctgctggggcgggcacccgagattgcttgctcggcctgcgatctggtcaacgtggacctagatgactgtgtttctgagcaataaatgacttaaaccaggtatggctgccgatggttatcttccagattggctcgaggacaacctctctgagggcattcgcgagtggtgggacttgaaacctggagccccgaaacccaaagccaaccagcaaaagcaggacgacggccggggtctggtgcttcctggctacaagtacctcggacccttcaacggactcgacaagggggagcccgtcaacgcggcggacgcagcggccctcgagcacgacaaggcctacgaccagcagctcaaagcgggtgacaatccgtacctgcggtataaccacgccgacgccgagtttcaggagcgtctgcaagaagatacgtcttttgggggcaacctcgggcgagcagtcttccaggccaagaagcgggttctcgaacctctcggtctggttgaggaaggcgctaagacggctcctggaaagaagagaccggtagagccatcaccccagcgttctccagactcctctacgggcatcggcaagaaaggccagcagcccgcgaaaaagagactcaactttgggcagactggcgactcagagtcagtgcccgaccctcaaccaatcggagaaccccccgcaggcccctctggtctgggatctggtacaatggctgcaggcggtggcgctccaatggcagacaataacgaaggcgccgacggagtgggtagttcctcaggaaattggcattgcgattccacatggctgggcgacagagtcatcaccaccagcacccgaacctgggccctccccacctacaacaaccacctctacaagcaaatctccaacgggacttcgggaggaagcaccaacgacaacacctacttcggctacagcaccccctgggggtattttgactttaacagattccactgccacttctcaccacgtgactggcagcgactcatcaacaacaactggggattccggcccaagagacccaacttcaagctcttcaacatccaggtcaaggaggtcacgcagaatgaaggcaccaagaccatcgccaataaccttaccagcacgattcaggtctttacggactcggaataccagctcccgtacgtcctcggctctgcgcaccagggctgcctgcctccgttcccggcggacgtcttcatgattcctcagtacgggtacctgactctgaacaatggcagtcaggccgtgggccgttcctccttctactgcctggagtactttccttctcaaatgctgagaacgggcaacaactttgagttcagctaccagtttgaggacgtgccttttcacagcagctacgcgcacagccaaagcctggaccggctgatgaaccccctcatcgaccagtacctgtactacctgtctcggactcagtccacgggaggtaccgcaggaactcagcagttgctattttctcaggccgggcctaataacatgtcggctcaggccaaaaactggctacccgggccctgctaccggcagcaacgcgtctccacgacactgtcgcaaaataacaacagcaactttgcctggaccggtgccaccaagtatcatctgaatggcagagactctctggtaaatcccggtgtcgctatggcaacccacaaggacgacgaagagcgattttttccgtccagcggagtcttaatgtttgggaaacagggagctggaaaagacaacgtggactatagcagcgttatgctaaccagtgaggaagaaattaaaaccaccaacccagtggccacagaacagtacggcgtggtggccgataacctgcaacagcaaaacgccgctcctattgtaggggccgtcaacagtcaaggagccttacctggcatggtctggcagaaccgggacgtgtacctgcagggtcctatctgggccaagattcctcacacggacggaaactttcatccctcgccgctgatgggaggctttggactgaaacacccgcctcctcagatcctgattaagaatacacctgttcccgcggatcctccaactaccttcagtcaagctaagctggcgtcgttcatcacgcagtacagcaccggacaggtcagcgtggaaattgaatgggagctgcagaaagaaaacagcaaacgctggaacccagagattcaatacacttccaactactacaaatctacaaatgtggactttgctgttaacacagatggcacttattctgagcctcgccccattggcacccgttacctcacccgtaatctgtaattgcttgttaatcaataaaccggttgattcgtttcagttgaactttggtctctgcgaagggcgaattc

SEQ ID NO: 89 - protein, 738 aa, Artificial Sequence
  Description of Artificial Sequence: Synthetic polypeptide
MAADGYLPDWLEDNLSEGIREWWDLKPGAPKPKANQQKQDDGRGLVLPGYKYLGPFNGLDKGEPVNAADAAALEHDKAYDQQLKAGDNPYLRYNHADAEFQERLQEDTSFGGNLGRAVFQAKKRVLEPLGLVEEGAKTAPGKKRPVEPSPQRSPDSSTGIGKKGQQPAKKRLNFGQTGDSESVPDPQPIGEPPAGPSGLGSGTMAAGGGAPMADNNEGADGVGSSSGNWHCDSTWLGDRVITTSTRTWALPTYNNHLYKQISNGTSGGSTNDNTYFGYSTPWGYFDFNRFHCHFSPRDWQRLINNNWGFRPKRPNFKLFNIQVKEVTQNEGTKTIANNLTSTIQVFTDSEYQLPYVLGSAHQGCLPPFPADVFMIPQYGYLTLNNGSQAVGRSSFYCLEYFPSQMLRTGNNFEFSYQFEDVPFHSSYAHSQSLDRLMNPLIDQYLYYLSRTQSTGGTAGTQQLLFSQAGPNNMSAQAKNWLPGPCYRQQRVSTTLSQNNNSNFAWTGATKYHLNGRDSLVNPGVAMATHKDDEERFFPSSGVLMFGKQGAGKDNVDYSSVMLTSEEEIKTTNPVATEQYGVVADNLQQQNAAPIVGAVNSQGALPGMVWQNRDVYLQGPIWAKIPHTDGNFHPSPLMGGFGLKHPPPQILIKNTPVPADPPTTFSQAKLASFITQYSTGQVSVEIEWELQKENSKRWNPEIQYTSNYYKSTNVDFAVNTDGTYSEPRPIGTRYLTRNL

SEQ ID NO: 90 - protein, 738 aa, Adeno-associated virus
MAADGYLPDWLEDNLSEGIREWWDLKPGAPKPKANQQKQDDGRGLVLPGYKYLGPFNGLDKGEPVNAADAAALEHDKAYDQQLKAGDNPYLRYNHADAEFQERLQEDTSFGGNLGRAVFQAKKRVLEPLGLVEEAAKTAPGKKRPVEPSPQRSPDSSTGIGKKGQQPAKKRLNFGQTGDSESVPDPQPIGEPPAGPSGLGSGTMAAGGGAPMADNNEGADGVGSSSGNWHCDSTWLGDRVITTSTRTWALPTYNNHLYKQISNGTSGGSTNDNTYFGYSTPWGYFDFNRFHCHFSPRDWQRLINNNWGFRPKRLSFKLFNIQVKEVTQNEGTKTIANNLTSTIQVFTDSEYQLPYVLGSAHQGCLPPFPADVFMIPQYGYLTLNNGSQAVGRSSFYCLEYFPSQMLRTGNNFEFSYTFEDVPFHSSYAHSQSLDRLMNPLIDQYLYYLSRTQSTGGTQGTQQLLFSQAGPANMSAQAKNWLPGPCYRQQRVSTTLSQNNNSNFAWTGATKYHLNGRDSLVNPGVAMATHKDDEERFFPSSGVLMFGKQGAGRDNVDYSSVMLTSEEEIKTTNPVATEQYGVVADNLQQTNTGPIVGNVNSQGALPGMVWQNRDVYLQGPIWAKIPHTDGNFHPSPLMGGFGLKHPPPQILIKNTPVPADPPTTFSQAKLASFITQYSTGQVSVEIEWELQKENSKRWNPEIQYTSNYYKSTNVDFAVNTEGTYSEPRPIGTRYLTRNL

SEQ ID NO: 91 - DNA, 2172 bp, Artificial Sequence
  Description of Artificial Sequence: Synthetic polynucleotide
atgtcttttgttgatcaccctccagattggttggaagaagttggtgaaggtcttcgcgagtttttgggccttgaagcgggcccaccgaaaccaaaacccaatcagcagcatcaagatcaagcccgtggtcttgtgctgcctggttataactatctcggacccggaaacggtctcgatcgaggagagcctgtcaacagggcagacgaggtcgcgcgagagcacgacatctcgtacaacgagcagcttgaggcgggagacaacccctacctcaagtacaaccacgcggacgccgagtttcaggagaagctcgccgacgacacatccttcgggggaaacctcggaaaggcagtctttcaggccaagaaaagggttctcgaaccttttggcctggttgaagagggtgctaagacggcccctaccggaaagcggatagacgaccactttccaaaaagaaagaaggctcggaccgaagaggactccaagccttccacctcgtcagacgccgaagctggacccagcggatcccagcagctgcaaatcccagcccaaccagcctcaagtttgggagctgatacaatgtctgcgggaggtggcggcccattgggcgacaataaccaaggtgccgatggagtgggcaatgcctcgggagattggcattgcgattccacgtggatgggggacagagtcgtcaccaagtccacccgaacctgggtgctgcccagctacaacaaccaccagtaccgagagatcaaaagcggctccgtcgacggaagcaacgccaacgcctactttggatacagcaccccctgggggtactttgactttaaccgcttccacagccactggagcccccgagactggcaaagactcatcaacaactactggggcttcagaccccggtccctcagagtcaaaatcttcaacattcaagtcaaagaggtcacggtgcaggactccaccaccaccatcgccaacaacctcacctccaccgtccaagtgtttacggacgacgactaccagctgccctacgtcgtcggcaacgggaccgagggatgcctgccggccttccctccgcaggtctttacgctgccgcagtacggttacgcgacgctgaaccgcgacaacacagaaaatcccaccgagaggagcagcttcttctgcctagagtactttcccagcaagatgctgagaacgggcaacaactttgagtttacctacaactttgaggaggtgcccttccactccagcttcgctcccagtcagaacctgttcaagctggccaacccgctggtggaccagtacttgtaccgcttcgtgagcacaaataacactggcggagtccagttcaacaagaacctggccgggagatacgccaacacctacaaaaactggttcccggggcccatgggccgaacccagggctggaacctgggctccggggtcaaccgcgccagtgtcagcgccttcgccacgaccaataggatggagctcgagggcgcgagttaccaggtgcccccgcagccgaacggcatgaccaacaacctccagggcagcaacacctatgccctggagaacactatgatcttcaacagccagccggcgaacccgggcaccaccgccacgtacctcgagggcaacatgctcatcaccagcgagagcgagacgcagccggtgaaccgcgtggcgtacaacgtcggcgggcagatggccaccaacaaccagagctccaccactgcccccgcgaccggcacgtacaacctccaggaaatcgtgcccggcagcgtgtggatggagagggacgtgtacctccaaggacccatctgggccaagatcccagagacgggggcgcactttcacccctctccggccatgggcggattcggactcaaacacccaccgcccatgatgctcatcaagaacacgcctgtgcccggaaatatcaccagcttctcggacgtgcccgtcagcagcttcatcacccagtacagcaccgggcaggtcaccgtggagatggagtgggagctcaagaaggaaaactccaagaggtggaacccagagatccagtacacaaacaactacaacgacccccagtttgtggactttgccccggacagcaccggggaatacagaaccaccagacctatcggaacccgataccttacccgacccctt

SEQ ID NO: 92 - protein, 720 aa, Artificial Sequence
  Description of Artificial Sequence: Synthetic polypeptide
MSFVDHPPDWLEEVGEGLREFLGLEAGPPKPKPNQQHQDQARGLVLPGYNYLGPGNGLDRGEPVNRADEVAREHDISYNEQLEAGDNPYLKYNHADAEFQEKLADDTSFGGNLGKAVFQAKKRVLEPFGLVEEGAKTAPTGKRIDDHFPKRKKARTEEDSKPSTSSDAEAGPSGSQQLQIPAQPASSLGADTMSAGGGGPLGDNNQGADGVGNASGDWHCDSTWMGDRVVTKSTRTWVLPSYNNHQYREIKSGSVDGSNANAYFGYSTPWGYFDFNRFHSHWSPRDWQRLINNYWGFRPRSLRVKIFNIQVKEVTVQDSTTTIANNLTSTVQVFTDDDYQLPYVVGNGTEGCLPAFPPQVFTLPQYGYATLNRDNTENPTERSSFFCLEYFPSKMLRTGNNFEFTYNFEEVPFHSSFAPSQNLFKLANPLVDQYLYRFVSTNNTGGVQFNKNLAGRYANTYKNWFPGPMGRTQGWNLGSGVNRASVSAFATTNRMELEGASYQVPPQPNGMTNNLQGSNTYALENTMIFNSQPANPGTTATYLEGNMLITSESETQPVNRVAYNVGGQMATNNQSSTTAPATGTYNLQEIVPGSVWMERDVYLQGPIWAKIPETGAHFHPSPAMGGFGLKHPPPMMLIKNTPVPGNITSFSDVPVSSFITQYSTGQVTVEMEWELKKENSKRWNPEIQYTNNYNDPQFVDFAPDSTGEYRTTRPIGTRYL

SEQ ID NO: 93 - protein, 724 aa, Adeno-associated virus 5
MSFVDHPPDWLEEVGEGLREFLGLEAGPPKPKPNQQHQDQARGLVLPGYNYLGPGNGLDRGEPVNRADEVAREHDISYNEQLEAGDNPYLKYNHADAEFQEKLADDTSFGGNLGKAVFQAKKRVLEPFGLVEEGAKTAPTGKRIDDHFPKRKKARTEEDSKPSTSSDAEAGPSGSQQLQIPAQPASSLGADTMSAGGGGPLGDNNQGADGVGNASGDWHCDSTWMGDRVVTKSTRTWVLPSYNNHQYREIKSGSVDGSNANAYFGYSTPWGYFDFNRFHSHWSPRDWQRLINNYWGFRPRSLRVKIFNIQVKEVTVQDSTTTIANNLTSTVQVFTDDDYQLPYVVGNGTEGCLPAFPPQVFTLPQYGYATLNRDNTENPTERSSFFCLEYFPSKMLRTGNNFEFTYNFEEVPFHSSFAPSQNLFKLANPLVDQYLYRFVSTNNTGGVQFNKNLAGRYANTYKNWFPGPMGRTQGWNLGSGVNRASVSAFATTNRMELEGASYQVPPQPNGMTNNLQGSNTYALENTMIFNSQPANPGTTATYLEGNMLITSESETQPVNRVAYNVGGQMATNNQSSTTAPATGTYNLQEIVPGSVWMERDVYLQGPIWAKIPETGAHFHPSPAMGGFGLKHPPPMMLIKNTPVPGNITSFSDVPVSSFITQYSTGQVTVEMEWELKKENSKRWNPEIQYTNNYNDPQFVDFAPDSTGEYRTTRPIGTRYLTRPL

SEQ ID NO: 94 - DNA, 2175 bp, Adeno-associated virus 5
atgtcttttgttgatcaccctccagattggttggaagaagttggtgaaggtcttcgcgagtttttgggccttgaagcgggcccaccgaaaccaaaacccaatcagcagcatcaagatcaagcccgtggtcttgtgctgcctggttataactatctcggacccggaaacggtctcgatcgaggagagcctgtcaacagggcagacgaggtcgcgcgagagcacgacatctcgtacaacgagcagcttgaggcgggagacaacccctacctcaagtacaaccacgcggacgccgagtttcaggagaagctcgccgacgacacatccttcgggggaaacctcggaaaggcagtctttcaggccaagaaaagggttctcgaaccttttggcctggttgaagagggtgctaagacggcccctaccggaaagcggatagacgaccactttccaaaaagaaagaaggctcggaccgaagaggactccaagccttccacctcgtcagacgccgaagctggacccagcggatcccagcagctgcaaatcccagcccaaccagcctcaagtttgggagctgatacaatgtctgcgggaggtggcggcccattgggcgacaataaccaaggtgccgatggagtgggcaatgcctcgggagattggcattgcgattccacgtggatgggggacagagtcgtcaccaagtccacccgaacctgggtgctgcccagctacaacaaccaccagtaccgagagatcaaaagcggctccgtcgacggaagcaacgccaacgcctactttggatacagcaccccctgggggtactttgactttaaccgcttccacagccactggagcccccgagactggcaaagactcatcaacaactactggggcttcagaccccggtccctcagagtcaaaatcttcaacattcaagtcaaagaggtcacggtgcaggactccaccaccaccatcgccaacaacctcacctccaccgtccaagtgtttacggacgacgactaccagctgccctacgtcgtcggcaacgggaccgagggatgcctgccggccttccctccgcaggtctttacgctgccgcagtacggttacgcgacgctgaaccgcgacaacacagaaaatcccaccgagaggagcagcttcttctgcctagagtactttcccagcaagatgctgagaacgggcaacaactttgagtttacctacaactttgaggaggtgcccttccactccagcttcgctcccagtcagaacctgttcaagctggccaacccgctggtggaccagtacttgtaccgcttcgtgagcacaaataacactggcggagtccagttcaacaagaacctggccgggagatacgccaacacctacaaaaactggttcccggggcccatgggccgaacccagggctggaacctgggctccggggtcaaccgcgccagtgtcagcgccttcgccacgaccaataggatggagctcgagggcgcgagttaccaggtgcccccgcagccgaacggcatgaccaacaacctccagggcagcaacacctatgccctggagaacactatgatcttcaacagccagccggcgaacccgggcaccaccgccacgtacctcgagggcaacatgctcatcaccagcgagagcgagacgcagccggtgaaccgcgtggcgtacaacgtcggcgggcagatggccaccaacaaccagagctccaccactgcccccgcgaccggcacgtacaacctccaggaaatcgtgcccggcagcgtgtggatggagagggacgtgtacctccaaggacccatctgggccaagatcccagagacgggggcgcactttcacccctctccggccatgggcggattcggactcaaacacccaccgcccatgatgctcatcaagaacacgcctgtgcccggaaatatcaccagcttctcggacgtgcccgtcagcagcttcatcacccagtacagcaccgggcaggtcaccgtggagatggagtgggagctcaagaaggaaaactccaagaggtggaacccagagatccagtacacaaacaactacaacgacccccagtttgtggactttgccccggacagcaccggggaatacagaaccaccagacctatcggaacccgataccttacccgacccctttaa

SEQ ID NO: 95 - DNA, 2208 bp, Adeno-associated virus
atggctgccgatggttatcttccagattggctcgaggacaacctctctgagggcattcgcgagtggtgggacttgaaacctggagccccgaaacccaaagccaaccagcaaaagcaggacgacggccggggtctggtgcttcctggctacaagtacctcggacccttcaacggactcgacaagggggagcccgtcaacgcggcggatgcagcggccctcgagcacgacaaggcctacgaccagcagctcaaagcgggtgacaatccgtacctgcggtataaccacgccgacgccgagtttcaggagcgtctgcaagaagatacgtcttttgggggcaacctcgggcgagcagtcttccaggccaagaagagggttctcgaaccttttggtctggttgaggaaggtgctaagacggctcctggaaagaaacgtccggtagagcagtcgccacaagagccagactcctcctcgggcattggcaagacaggccagcagcccgctaaaaagagactcaattttggtcagactggcgactcagagtcagtccccgacccacaacctctcggagaacctccagcaacccccgctgctgtgggacctactacaatggcttcaggcggtggcgcaccaatggcagacaataacgaaggcgccgacggagtgggtaatgcctcaggaaattggcattgcgattccacatggctgggcgacagagtcatcaccaccagcacccgaacatgggccttgcccacctataacaaccacctctacaagcaaatctccagtgcttcaacgggggccagcaacgacaaccactacttcggctacagcaccccctgggggtattttgatttcaacagattccactgccatttctcaccacgtgactggcagcgactcatcaacaacaattggggattccggcccaagagactcaacttcaagctcttcaacatccaagtcaaggaggtcacgacgaatgatggcgtcacgaccatcgctaataaccttaccagcacggttcaagtcttctcggactcggagtaccagttgccgtacgtcctcggctctgcgcaccagggctgcctccctccgttcccggcggacgtgttcatgattccgcagtacggctacctaacgctcaacaatggcagccaggcagtgggacggtcatccttttactgcctggaatatttcccatcgcagatgctgagaacgggcaataactttaccttcagctacaccttcgaggacgtgcctttccacagcagctacgcgcacagccagagcctggaccggctgatgaatcctctcatcgaccagtacctgtattacctgaacagaactcagaatcagtccggaagtgcccaaaacaaggacttgctgtttagccgggggtctccagctggcatgtctgttcagcccaaaaactggctacctggaccctgttaccggcagcagcgcgtttctaaaacaaaaacagacaacaacaacagcaactttacctggactggtgcttcaaaatataaccttaatgggcgtgaatctataatcaaccctggcactgctatggcctcacacaaagacgacaaagacaagttctttcccatgagcggtgtcatgatttttggaaaggagagcgccggagcttcaaacactgcattggacaatgtcatgatcacagacgaagaggaaatcaaagccactaaccccgtggccaccgaaagatttgggactgtggcagtcaatctccagagcagcagcacagaccctgcgaccggagatgtgcatgttatgggagccttacctggaatggtgtggcaagacagagacgtatacctgcagggtcctatttgggccaaaattcctcacacggatggacactttcacccgtctcctctcatgggcggctttggacttaagcacccgcctcctcagatcctcatcaaaaacacgcctgttcctgcgaatcctccggcagagttttcggctacaaagtttgcttcattcatcacccagtattccacaggacaagtgagcgtggagattgaatgggagctgcagaaagaaaacagcaaacgctggaatcccgaagtgcagtatacatctaactatgcaaaatctgccaacgttgatttcactgtggacaacaatggactttatactgagcctcgccccattggcacccgttacctcacccgtcccctg

SEQ ID NO: 96 - protein, 736 aa, Adeno-associated virus 6
MAADGYLPDWLEDNLSEGIREWWDLKPGAPKPKANQQKQDDGRGLVLPGYKYLGPFNGLDKGEPVNAADAAALEHDKAYDQQLKAGDNPYLRYNHADAEFQERLQEDTSFGGNLGRAVFQAKKRVLEPFGLVEEGAKTAPGKKRPVEQSPQEPDSSSGIGKTGQQPAKKRLNFGQTGDSESVPDPQPLGEPPATPAAVGPTTMASGGGAPMADNNEGADGVGNASGNWHCDSTWLGDRVITTSTRTWALPTYNNHLYKQISSASTGASNDNHYFGYSTPWGYFDFNRFHCHFSPRDWQRLINNNWGFRPKRLNFKLFNIQVKEVTTNDGVTTIANNLTSTVQVFSDSEYQLPYVLGSAHQGCLPPFPADVFMIPQYGYLTLNNGSQAVGRSSFYCLEYFPSQMLRTGNNFTFSYTFEDVPFHSSYAHSQSLDRLMNPLIDQYLYYLNRTQNQSGSAQNKDLLFSRGSPAGMSVQPKNWLPGPCYRQQRVSKTKTDNNNSNFTWTGASKYNLNGRESIINPGTAMASHKDDKDKFFPMSGVMIFGKESAGASNTALDNVMITDEEEIKATNPVATERFGTVAVNLQSSSTDPATGDVHVMGALPGMVWQDRDVYLQGPIWAKIPHTDGHFHPSPLMGGFGLKHPPPQILIKNTPVPANPPAEFSATKFASFITQYSTGQVSVEIEWELQKENSKRWNPEVQYTSNYAKSANVDFTVDNNGLYTEPRPIGTRYLTRPL

SEQ ID NO: 97 - protein, 623 aa, Adeno-associated virus 6
MPGFYEIVIKVPSDLDEHLPGISDSFVNWVAEKEWELPPDSDMDLNLIEQAPLTVAEKLQRDFLVQWRRVSKAPEALFFVQFEKGESYFHLHILVETTGVKSMVLGRFLSQIRDKLVQTIYRGIEPTLPNWFAVTKTRNGAGGGNKVVDECYIPNYLLPKTQPELQWAWTNMEEYISACLNLAERKRLVAHDLTHVSQTQEQNKENLNPNSDAPVIRSKTSARYMELVGWLVDRGITSEKQWIQEDQASYISFNAASNSRSQIKAALDNAGKIMALTKSAPDYLVGPAPPADIKTNRIYRILELNGYDPAYAGSVFLGWAQKRFGKRNTIWLFGPATTGKTNIAEAIAHAVPFYGCVNWTNENFPFNDCVDKMVIWWEEGKMTAKVVESAKAILGGSKVRVDQKCKSSAQIDPTPVIVTSNTNMCAVIDGNSTTFEHQQPLQDRMFKFELTRRLEHDFGKVTKQEVKEFFRWAQDHVTEVAHEFYVRKGGANKRPAPDDADKSEPKRACPSVADPSTSDAEGAPVDFADRYQNKCSRHAGMLQMLFPCKTCERMNQNFNICFTHGTRDCSECFPGVSESQPVVRKRTYRKLCAIHHLLGRAPEIACSACDLVNVDLDDCVSEQ

SEQ ID NO: 98 - DNA, 4683 bp, Adeno-associated virus 6
ttggccactccctctctgcgcgctcgctcgctcactgaggccgggcgaccaaaggtcgcccgacgcccgggctttgcccgggcggcctcagtgagcgagcgagcgcgcagagagggagtggccaactccatcactaggggttcctggaggggtggagtcgtgacgtgaattacgtcatagggttagggaggtcctgtattagaggtcacgtgagtgttttgcgacattttgcgacaccatgtggtcacgctgggtatttaagcccgagtgagcacgcagggtctccattttgaagcgggaggtttgaacgcgcagcgccatgccggggttttacgagattgtgattaaggtccccagcgaccttgacgagcatctgcccggcatttctgacagctttgtgaactgggtggccgagaaggaatgggagttgccgccagattctgacatggatctgaatctgattgagcaggcacccctgaccgtggccgagaagctgcagcgcgacttcctggtccagtggcgccgcgtgagtaaggccccggaggccctcttctttgttcagttcgagaagggcgagtcctacttccacctccatattctggtggagaccacgggggtcaaatccatggtgctgggccgcttcctgagtcagattagggacaagctggtgcagaccatctaccgcgggatcgagccgaccctgcccaactggttcgcggtgaccaagacgcgtaatggcgccggaggggggaacaaggtggtggacgagtgctacatccccaactacctcctgcccaagactcagcccgagctgcagtgggcgtggactaacatggaggagtatataagcgcgtgtttaaacctggccgagcgcaaacggctcgtggcgcacgacctgacccacgtcagccagacccaggagcagaacaaggagaatctgaaccccaattctgacgcgcctgtcatccggtcaaaaacctccgcacgctacatggagctggtcgggtggctggtggaccggggcatcacctccgagaagcagtggatccaggaggaccaggcctcgtacatctccttcaacgccgcctccaactcgcggtcccagatcaaggccgctctggacaatgccggcaagatcatggcgctgaccaaatccgcgcccgactacctggtaggccccgctccgcccgccgacattaaaaccaaccgcatttaccgcatcctggagctgaacggctacgaccctgcctacgccggctccgtctttctcggctgggcccagaaaaggttcggaaaacgcaacaccatctggctgtttgggccggccaccacgggcaagaccaacatcgcggaagccatcgcccacgccgtgcccttctacggctgcgtcaactggaccaatgagaactttcccttcaacgattgcgtcgacaagatggtgatctggtgggaggagggcaagatgacggccaaggtcgtggagtccgccaaggccattctcggcggcagcaaggtgcgcgtggaccaaaagtgcaagtcgtccgcccagatcgatcccacccccgtgatcgtcacctccaacaccaacatgtgcgccgtgattgacgggaacagcaccaccttcgagcaccagcagccgttgcaggaccggatgttcaaatttgaactcacccgccgtctggagcatgactttggcaaggtgacaaagcaggaagtcaaagagttcttccgctgggcgcaggatcacgtgaccgaggtggcgcatgagttctacgtcagaaagggtggagccaacaagagacccgcccccgatgacgcggataaaagcgagcccaagcgggcctgcccctcagtcgcggatccatcgacgtcagacgcggaaggagctccggtggactttgccgacaggtaccaaaacaaatgttctcgtcacgcgggcatgcttcagatgctgtttccctgcaaaacatgcgagagaatgaatcagaatttcaacatttgcttcacgcacgggaccagagactgttcagaatgtttccccggcgtgtcagaatctcaaccggtcgtcagaaagaggacgtatcggaaactctgtgccattcatcatctgctggggcgggctcccgagattgcttgctcggcctgcgatctggtcaacgtggatctggatgactgtgtttctgagcaataaatgacttaaaccaggtatggctgccgatggttatcttccagattggctcgaggacaacctctctgagggcattcgcgagtggtgggacttgaaacctggagccccgaaacccaaagccaaccagcaaaagcaggacgacggccggggtctggtgcttcctggctacaagtacctcggacccttcaacggactcgacaagggggagcccgtcaacgcggcggatgcagcggccctcgagcacgacaaggcctacgaccagcagctcaaagcgggtgacaatccgtacctgcggtataaccacgccgacgccgagtttcaggagcgtctgcaagaagatacgtcttttgggggcaacctcgggcgagcagtcttccaggccaagaagagggttctcgaaccttttggtctggttgaggaaggtgctaagacggctcctggaaagaaacgtccggtagagcagtcgccacaagagccagactcctcctcgggcattggcaagacaggccagcagcccgctaaaaagagactcaattttggtcagactggcgactcagagtcagtccccgacccacaacctctcggagaacctccagcaacccccgctgctgtgggacctactacaatggcttcaggcggtggcgcaccaatggcagacaataacgaaggcgccgacggagtgggtaatgcctcaggaaattggcattgcgattccacatggctgggcgacagagtcatcaccaccagcacccgaacatgggccttgcccacctataacaaccacctctacaagcaaatctccagtgcttcaacgggggccagcaacgacaaccactacttcggctacagcaccccctgggggtattttgatttcaacagattccactgccatttctcaccacgtgactggcagcgactcatcaacaacaattggggattccggcccaagagactcaacttcaagctcttcaacatccaagtcaaggaggtcacgacgaatgatggcgtcacgaccatcgctaataaccttaccagcacggttcaagtcttctcggactcggagtaccagttgccgtacgtcctcggctctgcgcaccagggctgcctccctccgttcccggcggacgtgttcatgattccgcagtacggctacctaacgctcaacaatggcagccaggcagtgggacggtcatccttttactgcctggaatatttcccatcgcagatgctgagaacgggcaataactttaccttcagctacaccttcgaggacgtgcctttccacagcagctacgcgcacagccagagcctggaccggctgatgaatcctctcatcgaccagtacctgtattacctgaacagaactcagaatcagtccggaagtgcccaaaacaaggacttgctgtttagccgggggtctccagctggcatgtctgttcagcccaaaaactggctacctggaccctgttaccggcagcagcgcgtttctaaaacaaaaacagacaacaacaacagcaactttacctggactggtgcttcaaaatataaccttaatgggcgtgaatctataatcaaccctggcactgctatggcctcacacaaagacgacaaagacaagttctttcccatgagcggtgtcatgatttttggaaaggagagcgccggagcttcaaacactgcattggacaatgtcatgatcacagacgaagaggaaatcaaagccactaaccccgtggccaccgaaagatttgggactgtggcagtcaatctccagagcagcagcacagaccctgcgaccggagatgtgcatgttatgggagccttacctggaatggtgtggcaagacagagacgtatacctgcagggtcctatttgggccaaaattcctcacacggatggacactttcacccgtctcctctcatgggcggctttggacttaagcacccgcctcctcagatcctcatcaaaaacacgcctgttcctgcgaatcctccggcagagttttcggctacaaagtttgcttcattcatcacccagtattccacaggacaagtgagcgtggagattgaatgggagctgcagaaagaaaacagcaaacgctggaatcccgaagtgcagtatacatctaactatgcaaaatctgccaacgttgatttcactgtggacaacaatggactttatactgagcctcgccccattggcacccgttacctcacccgtcccctgtaattgtgtgttaatcaataaaccggttaattcgtgtcagttgaactttggtctcatgtcgttattatcttatctggtcaccatagcaaccggttacacattaactgcttagttgcgcttcgcgaatacccctagtgatggagttgcccactccctctatgcgcgctcgctcgctcggtggggccggcagagcagagctctgccgtctgcggacctttggtccgcaggccccaccgagcgagcgagcgcgcatagagggagtgggcaa

SEQ ID NO: 99 - DNA, 2211 bp, Adeno-associated virus
atggctgccgatggttatcttccagattggctcgaggacaacctctctgagggcattcgcgagtggtgggacttgaaacctggagccccgaaacccaaagccaaccagcaaaagcaggacgacggccggggtctggtgcttcctggctacaagtacctcggacccttcaacggactcgacaagggggagcccgtcaacgcggcggatgcagcggccctcgagcacgacaaggcctacgaccagcagctcaaagcgggtgacaatccgtacctgcggtataaccacgccgacgccgagtttcaggagcgtctgcaagaagatacgtcttttgggggcaacctcgggcgagcagtcttccaggccaagaagagggttctcgaaccttttggtctggttgaggaaggtgctaagacggctcctggaaagaaacgtccggtagagcagtcgccacaagagccagactcctcctcgggcattggcaagacaggccagcagcccgctaaaaagagactcaattttggtcagactggcgactcagagtcagtccccgacccacaacctctcggagaacctccagcaacccccgctgctgtgggacctactacaatggcttcaggcggtggcgcaccaatggcagacaataacgaaggcgccgacggagtgggtaatgcctcaggaaattggcattgcgattccacatggctgggcgacagagtcatcaccaccagcacccgaacatgggccttgcccacctataacaaccacctctacaagcaaatctccagtgcttcaacgggggccagcaacgacaaccactacttcggctacagcaccccctgggggtattttgatttcaacagattccactgccatttctcaccacgtgactggcagcgactcatcaacaacaattggggattccggcccaagagactcaacttcaagctcttcaacatccaagtcaaggaggtcacgacgaatgatggcgtcacgaccatcgctaataaccttaccagcacggttcaagtcttctcggactcggagtaccagttgccgtacgtcctcggctctgcgcaccagggctgcctccctccgttcccggcggacgtgttcatgattccgcagtacggctacctaacgctcaacaatggcagccaggcagtgggacggtcatccttttactgcctggaatatttcccatcgcagatgctgagaacgggcaataactttaccttcagctacaccttcgaggacgtgcctttccacagcagctacgcgcacagccagagcctggaccggctgatgaatcctctcatcgaccagtacctgtattacctgaacagaactcagaatcagtccggaagtgcccaaaacaaggacttgctgtttagccgggggtctccagctggcatgtctgttcagcccaaaaactggctacctggaccctgttaccggcagcagcgcgtttctaaaacaaaaacagacaacaacaacagcaactttacctggactggtgcttcaaaatataaccttaatgggcgtgaatctataatcaaccctggcactgctatggcctcacacaaagacgacaaagacaagttctttcccatgagcggtgtcatgatttttggaaaggagagcgccggagcttcaaacactgcattggacaatgtcatgatcacagacgaagaggaaatcaaagccactaaccccgtggccaccgaaagatttgggactgtggcagtcaatctccagagcagcagcacagaccctgcgaccggagatgtgcatgttatgggagccttacctggaatggtgtggcaagacagagacgtatacctgcagggtcctatttgggccaaaattcctcacacggatggacactttcacccgtctcctctcatgggcggctttggacttaagcacccgcctcctcagatcctcatcaaaaacacgcctgttcctgcgaatcctccggcagagttttcggctacaaagtttgcttcattcatcacccagtattccacaggacaagtgagcgtggagattgaatgggagctgcagaaagaaaacagcaaacgctggaatcccgaagtgcagtatacatctaactatgcaaaatctgccaacgttgatttcactgtggacaacaatggactttatactgagcctcgccccattggcacccgttacctcacccgtcccctgtaa

SEQ ID NO: 100 - protein, 736 aa, Adeno-associated virus; identical to SEQ ID NO: 96

SEQ ID NO: 101 - protein, 736 aa, Adeno-associated virus
MAADGYLPDWLEDNLSEGIREWWDLKPGAPKPKANQQKQDDGRGLVLPGYKYLGPFNGLDKGEPVNAADAAALEHDKAYDQQLKAGDNPYLRYNHADAEFQERLQEDTSFGGNLGRAVFQAKKRVLEPFGLVEEGAKTAPGKKRPVEQSPQEPDSSSGIGKTGQQPAKKRLNFGQTGDSESVPDPQPLGEPPATPAAVGPTTMASGGGAPMADNNEGADGVGNASGNWHCDSTWLGDRVITTSTRTWALPTYNNHLYKQISSASTGASNDNHYFGYSTPWGYFDFNRFHCHFSPRDWQRLINNNWGFRPKRLNFKLFNIQVKEVTTNDGVTTIANNLTSTVQVFSDSEYQLPYVLGSAHQGCLPPFPADVFMIPQYGYLTLNNGSQAVGRSSFYCLEYFPSQMLRTGNNFTFSYTFEDVPFHSSYAHSQSLDRLMNPLIDQYLYYLNRTQNQSGSAQNKDLLFSRGSPAGMSVQPKNWLPGPCYRQQRVSKTKTDNNNSNFTWTGASKYNLNGRESIINPGTAMASHKDDEDKFFPMSGVMIFGKESAGASNTALDNVMITDEEEIKATNPVATERFGTVAVNLQSSSTDPATGDVHVMGALPGMVWQDRDVYLQGPIWAKIPHTDGHFHPSPLMGGFGLKHPPPQILIKNTPVPANPPAEFSATKFASFITQYSTGQVSVEIEWELQKENSKRWNPEVQYTSNYAKSANVDFTVDNNGLYTEPRPIGTRYLTRPL

SEQ ID NO: 102 - protein, 736 aa, Adeno-associated virus
MAADGYLPDWLEDNLSEGIREWWDLKPGAPKPKANQQKQDDGRGLVLPGYKYLGPFNGLDKGEPVNAADAAALEHDKAYDQQLKAGDNPYLRYNHADAEFQERLQEDTSFGGNLGRAVFQAKKRVLEPLGLVEEGAKTAPGKKRPVEQSPQEPDSSSGIGKTGQQPAKKRLNFGQTGDSESVPDPQPLGEPPATPAAVGPTTMASGGGAPMADNNEGADGVGNASGNWHCDSTWLGDRVITTSTRTWALPTYNNHLYKQISSASTGASNDNHYFGYSTPWGYFDFNRFHCHFSPRDWQRLINNNWGFRPKRLNFKLFNIQVKEVTTNDGVTTIANNLTSTVQVFSDSEYQLPYVLGSAHQGCLPPFPADVFMIPQYGYLTLNNGSQAVGRSSFYCLEYFPSQMLRTGNNFTFSYTFEDVPFHSSYAHSQSLDRLMNPLIDQYLYYLNRTQNQSGSAQNKDLLFSRGSPAGMSVQPKNWLPGPCYRQQRVSKTKTDNNNSNFTWTGASKYNLNGRESIINPGTAMASHKDDEDKFFPMSGVMIFGKESAGASNTALDNVMITDEEEIKATNPVATERFGTVAVNLQSSSTDPATGDVHVMGALPGMVWQDRDVYLQGPIWAKIPHTDGHFHPSPLMGGFGLKHPPPQILIKNTPVPANPPAEFSATKFASFITQYSTGQVSVEIEWELQKENSKRWNPEVQYTSNYAKSANVDFTVDNNGLYTEPRPIGTRYLTRPL

SEQ ID NO: 103 - protein, 736 aa, Adeno-associated virus
MAADGYLPDWLEDNLSEGIREWWDLKPGAPKPKANQQKQDDGRGLVLPGYKYLGPFNGLDKGEPVNAADAAALEHDKAYDQQLKAGDNPYLRYNHADAEFQERLQEDTSFGGNLGRAVFQAKKRVLEPLGLVEEGAKTAPGKKRPVEQSPQEPDSSSGIGKTGQQPAKKRLNFGQTGDSESVPDPQPLGEPPATPAAVGPTTMASGGGAPMADNNEGADGVGNASGNWHCDSTWLGDRVITTSTRTWALPTYNNHLYKQISSASTGASNDNHYFGYSTPWGYFDFNRFHCHFSPRDWQRLINNNWGFRPKRLNFKLFNIQVKEVTTNDGVTTIANNLTSTVQVFSDSEYQLPYVLGSAHQGCLPPFPADVFMIPQYGYLTLNNGSQAVGRSSFYCLEYFPSQMLRTGNNFTFSYTFEDVPFHSSYAHSQSLDRLMNPLIDQYLYYLNRTQNQSGSAQNKDLLFSRGSPAGMSVQPKNWLPGPCYRQQRVSKTKTDNNNSNFTWTGASKYNLNGRESIINPGTAMASHKDDKDKFFPMSGVMIFGKESAGASNTALDNVMITDEEEIKATNPVATERFGTVAVNLQSSSTDPATGDVHVMGALPGMVWQDRDVYLQGPIWAKIPHTDGHFHPSPLMGGFGLKHPPPQILIKNTPVPANPPAEFSATKFASFITQYSTGQVSVEIEWELQKENSKRWNPEVQYTSNYAKSANVDFTVDNNGLYTEPRPIGTRYLTRPL

SEQ ID NO: 104 - DNA, 2214 bp, Adeno-associated virus
atggctgccgatggttatcttccagattggctcgaggacaacctctctgagggcattcgcgagtggtgggacctgaaacctggagccccgaaacccaaagccaaccagcaaaagcaggacaacggccggggtctggtgcttcctggctacaagtacctcggacccttcaacggactcgacaagggggagcccgtcaacgcggcggacgcagcggccctcgagcacgacaaggcctacgaccagcagctcaaagcgggtgacaatccgtacctgcggtataaccacgccgacgccgagtttcaggagcgtctgcaagaagatacgtcatttgggggcaacctcgggcgagcagtcttccaggccaagaagcgggttctcgaacctctcggtctggttgaggaaggcgctaagacggctcctgcaaagaagagaccggtagagccgtcacctcagcgttcccccgactcctccacgggcatcggcaagaaaggccagcagcccgccagaaagagactcaatttcggtcagactggcgactcagagtcagtccccgaccctcaacctctcggagaacctccagcagcgccctctagtgtgggatctggtacagtggctgcaggcggtggcgcaccaatggcagacaataacgaaggtgccgacggagtgggtaatgcctcaggaaattggcattgcgattccacatggctgggcgacagagtcattaccaccagcacccgaacctgggccctgcccacctacaacaaccacctctacaagcaaatctccagtgaaactgcaggtagtaccaacgacaacacctacttcggctacagcaccccctgggggtattttgactttaacagattccactgccacttctcaccacgtgactggcagcgactcatcaacaacaactggggattccggcccaagaagctgcggttcaagctcttcaacatccaggtcaaggaggtcacgacgaatgacggcgttacgaccatcgctaataaccttaccagcacgattcaggtattctcggactcggaataccagctgccgtacgtcctcggctctgcgcaccagggctgcctgcctccgttcccggcggacgtcttcatgattcctcagtacggctacctgactctcaacaatggcagtcagtctgtgggacgttcctccttctactgcctggagtacttcccctctcagatgctgagaacgggcaacaactttgagttcagctacagcttcgaggacgtgcctttccacagcagctacgcacacagccagagcctggaccggctgatgaatcccctcatcgaccagtacttgtactacctggccagaacacagagtaacccaggaggcacagctggcaatcgggaactgcagttttaccagggcgggccttcaactatggccgaacaagccaagaattggttacctggaccttgcttccggcaacaaagagtctccaaaacgctggatcaaaacaacaacagcaactttgcttggactggtgccaccaaatatcacctgaacggcagaaactcgttggttaatcccggcgtcgccatggcaactcacaaggacgacgaggaccgctttttcccatccagcggagtcctgatttttggaaaaactggagcaactaacaaaactacattggaaaatgtgttaatgacaaatgaagaagaaattcgtcctactaatcctgtagccacggaagaatacgggatagtcagcagcaacttacaagcggctaatactgcagcccagacacaagttgtcaacaaccagggagccttacctggcatggtctggcagaaccgggacgtgtacctgcagggtcccatctgggccaagattcctcacacggatggcaactttcacccgtctcctttgatgggcggctttggacttaaacatccgcctcctcagatcctgatcaagaacactcccgttcccgctaatcctccggaggtgtttactcctgccaagtttgcttcgttcatcacacagtacagcaccggacaagtcagcgtggaaatcgagtgggagctgcagaaggaaaacagcaagcgctggaacccggagattcagtacacctccaactttgaaaagcagactggtgtggactttgccgttgacagccagggtgtttactctgagcctcgccctattggcactcgttacctcacccgtaatctgtaa

SEQ ID NO: 105 - protein, 738 aa, Adeno-associated virus
MAADGYLPDWLEDNLSEGIREWWALKPGAPKPKANQQKQDDGRGLVLPGYKYLGPFNGLDKGEPVNAADAAALEHDKAYDQQLQAGDNPYLRYNHADAEFQERLQEDTSFGGNLGRAVFQAKKRVLEPLGLVEEGAKTAPGKKRPVEPSPQRSPDSSTGIGKKGQQPARKRLNFGQTGDSESVPDPQPLGEPPAAPSGVGPNTMAAGGGAPMADNNEGADGVGSSSGNWHCDSTWLGDRVITTSTRTWALPTYNNHLYKQISNGTSGGATNDNTYFGYSTPWGYFDFNRFHCHFSPRDWQRLINNNWGFRPKRLSFKLFNIQVKEVTQNEGTKTIANNLTSTIQVFTDSEYQLPYVLGSAHQGCLPPFPADVFMIPQYGYLTLNNGSQAVGRSSFYCLEYFPSQMLRTGNNFQFTYTFEDVPFHSSYAHSQSLDRLMNPLIDQYLYYLSRTQTTGGTANTQTLGFSQGGPNTMANQAKNWLPGPCYRQQRVSTTTGQNNNSNFAWTAGTKYHLNGRNSLANPGIAMATHKDDEERFFPSNGILIFGKQNAARDNADYSDVMLTSEEEIKTTNPVATEEYGIVADNLQQQNTAPQIGTVNSQGALPGMVWQNRDVYLQGPIWAKIPHTDGNFHPSPLMGGFGLKHPPPQILIKNTPVPADPPTTFNQSKLNSFITQYSTGQVSVEIEWELQKENSKRWNPEIQYTSNYYKSTSVDFAVNTEGVYSEPRPIGTRYLTRNL

SEQ ID NO: 106 - protein, 737 aa, Adeno-associated virus 7
MAADGYLPDWLEDNLSEGIREWWDLKPGAPKPKANQQKQDNGRGLVLPGYKYLGPFNGLDKGEPVNAADAAALEHDKAYDQQLKAGDNPYLRYNHADAEFQERLQEDTSFGGNLGRAVFQAKKRVLEPLGLVEEGAKTAPAKKRPVEPSPQRSPDSSTGIGKKGQQPARKRLNFGQTGDSESVPDPQPLGEPPAAPSSVGSGTVAAGGGAPMADNNEGADGVGNASGNWHCDSTWLGDRVITTSTRTWALPTYNNHLYKQISSETAGSTNDNTYFGYSTPWGYFDFNRFHCHFSPRDWQRLINNNWGFRPKKLRFKLFNIQVKEVTTNDGVTTIANNLTSTIQVFSDSEYQLPYVLGSAHQGCLPPFPADVFMIPQYGYLTLNNGSQSVGRSSFYCLEYFPSQMLRTGNNFEFSYSFEDVPFHSSYAHSQSLDRLMNPLIDQYLYYLARTQSNPGGTAGNRELQFYQGGPSTMAEQAKNWLPGPCFRQQRVSKTLDQNNNSNFAWTGATKYHLNGRNSLVNPGVAMATHKDDEDRFFPSSGVLIFGKTGATNKTTLENVLMTNEEEIRPTNPVATEEYGIVSSNLQAANTAAQTQVVNNQGALPGMVWQNRDVYLQGPIWAKIPHTDGNFHPSPLMGGFGLKHPPPQILIKNTPVPANPPEVFTPAKFASFITQYSTGQVSVEIEWELQKENSKRWNPEIQYTSNFEKQTGVDFAVDSQGVYSEPRPIGTRYLTRNL

SEQ ID NO: 107 - protein, 623 aa, Artificial Sequence
  Description of Artificial Sequence: Synthetic polypeptide
MPGFYEIVIKVPSDLDEHLPGISDSFVNWVAEKEWELPPDSDMDLNLIEQAPLTVAEKLQRDFLVQWRRVSKAPEALFFVQFEKGESYFHLHVLVETTGVKSMVLGRFLSQIREKLVQTIYRGVEPTLPNWFAVTKTRNGAGGGNKVVDECYIPNYLLPKTQPELQWAWTNMEEYISACLNLAERKRLVAQHLTHVSQTQEQNKENLNPNSDAPVIRSKTSARYMELVGWLVDRGITSEKQWIQEDQASYISFNAASNSRSQIKAALDNAGKIMALTKSAPDYLVGPSLPADIKTNRIYRILELNGYDPAYAGSVFLGWAQKKFGKRNTIWLFGPATTGKTNIAEAIAHAVPFYGCVNWTNENFPFNDCVDKMVIWWEEGKMTAKVVESAKAILGGSKVRVDQKCKSSAQIDPTPVIVTSNTNMCAVIDGNSTTFEHQQPLQDRMFKFELTRRLEHDFGKVTKQEVKEFFRWASDHVTEVAHEFYVRKGGASKRPAPDDADISEPKRACPSVADPSTSDAEGAPVDFADRYQNKCSRHAGMIQMLFPCKTCERMNQNFNICFTHGVRDCLECFPGVSESQPVVRKKTYRKLCAIHHLLGRAPEIACSACDLVNVDLDDCVSEQ

SEQ ID NO: 108 - DNA, 4721 bp, Adeno-associated virus 7
ttggccactccctctatgcgcgctcgctcgctcggtggggcctgcggaccaaaggtccgcagacggcagagctctgctctgccggccccaccgagcgagcgagcgcgcatagagggagtggccaactccatcactaggggtaccgcgaagcgcctcccacgctgccgcgtcagcgctgacgtaaatcacgtcataggggagtggtcctgtattagctgtcacgtgagtgcttttgcgacattttgcgacaccacgtggccatttgaggtatatatggccgagtgagcgagcaggatctccattttgaccgcgaaatttgaacgagcagcagccatgccgggtttctacgagatcgtgatcaaggtgccgagcgacctggacgagcacctgccgggcatttctgactcgtttgtgaactgggtggccgagaaggaatgggagctgcccccggattctgacatggatctgaatctgatcgagcaggcacccctgaccgtggccgagaagctgcagcgcgacttcctggtccaatggcgccgcgtgagtaaggccccggaggccctgttctttgttcagttcgagaagggcgagagctacttccaccttcacgttctggtggagaccacgggggtcaagtccatggtgctaggccgcttcctgagtcagattcgggagaagctggtccagaccatctaccgcggggtcgagcccacgctgcccaactggttcgcggtgaccaagacgcgtaatggcgccggcggggggaacaaggtggtggacgagtgctacatccccaactacctcctgcccaagacccagcccgagctgcagtgggcgtggactaacatggaggagtatataagcgcgtgtttgaacctggccgaacgcaaacggctcgtggcgcagcacctgacccacgtcagccagacgcaggagcagaacaaggagaatctgaaccccaattctgacgcgcccgtgatcaggtcaaaaacctccgcgcgctacatggagctggtcgggtggctggtggaccggggcatcacctccgagaagcagtggatccaggaggaccaggcctcgtacatctccttcaacgccgcctccaactcgcggtcccagatcaaggccgcgctggacaatgccggcaagatcatggcgctgaccaaatccgcgcccgactacctggtggggccctcgctgcccgcggacattaaaaccaaccgcatctaccgcatcctggagctgaacgggtacgatcctgcctacgccggctccgtctttctcggctgggcccagaaaaagttcgggaagcgcaacaccatctggctgtttgggcccgccaccaccggcaagaccaacattgcggaagccatcgcccacgccgtgcccttctacggctgcgtcaactggaccaatgagaactttcccttcaacgattgcgtcgacaagatggtgatctggtgggaggagggcaagatgacggccaaggtcgtggagtccgccaaggccattctcggcggcagcaaggtgcgcgtggaccaaaagtgcaagtcgtccgcccagatcgaccccacccccgtgatcgtcacctccaacaccaacatgtgcgccgtgattgacgggaacagcaccaccttcgagcaccagcagccgttgcaggaccggatgttcaaatttgaactcacccgccgtctggagcacgactttggcaaggtgacgaagcaggaagtcaaagagttcttccgctgggccagtgatcacgtgaccgaggtggcgcatgagttctacgtcagaaagggcggagccagcaaaagacccgcccccgatgacgcggatataagcgagcccaagcgggcctgcccctcagtcgcggatccatcgacgtcagacgcggaaggagctccggtggactttgccgacaggtaccaaaacaaatgttctcgtcacgcgggcatgattcagatgctgtttccctgcaaaacgtgcgagagaatgaatcagaatttcaacatttgcttcacacacggggtcagagactgtttagagtgtttccccggcgtgtcagaatctcaaccggtcgtcagaaaaaagacgtatcggaaactctgcgcgattcatcatctgctggggcgggcgcccgagattgcttgctcggcctgcgacctggtcaacgtggacctggacgactgcgtttctgagcaataaatgacttaaaccaggtatggctgccgatggttatcttccagattggctcgaggacaacctctctgagggcattcgcgagtggtgggacctgaaacctggagccccgaaacccaaagccaaccagcaaaagcaggacaacggccggggtctggtgcttcctggctacaagtacctcggacccttcaacggactcgacaagggggagcccgtcaacgcggcggacgcagcggccctcgagcacgacaaggcctacgaccagcagctcaaagcgggtgacaatccgtacctgcggtataaccacgccgacgccgagtttcaggagcgtctgcaagaagatacgtcatttgggggcaacctcgggcgagcagtcttccaggccaagaagcgggttctcgaacctctcggtctggttgaggaaggcgctaagacggctcctgcaaagaagagaccggtagagccgtcacctcagcgttcccccgactcctccacgggcatcggcaagaaaggccagcagcccgccagaaagagactcaatttcggtcagactggcgactcagagtcagtccccgaccctcaacctctcggagaacctccagcagcgccctctagtgtgggatctggtacagtggctgcaggcggtggcgcaccaatggcagacaataacgaaggtgccgacggagtgggtaatgcctcaggaaattggcattgcgattccacatggctgggcgacagagtcattaccaccagcacccgaacctgggccctgcccacctacaacaaccacctctacaagcaaatctccagtgaaactgcaggtagtaccaacgacaacacctacttcggctacagcaccccctgggggtattttgactttaacagattccactgccacttctcaccacgtgactggcagcgactcatcaacaacaactggggattccggcccaagaagctgcggttcaagctcttcaacatccaggtcaaggaggtcacgacgaatgacggcgttacgaccatcgctaataaccttaccagcacgattcaggtattctcggactcggaataccagctgccgtacgtcctcggctctgcgcaccagggctgcctgcctccgttcccggcggacgtcttcatgattcctcagtacggctacctgactctcaacaatggcagtcagtctgtgggacgttcctccttctactgcctggagtacttcccctctcagatgctgagaacgggcaacaactttgagttcagctacagcttcgaggacgtgcctttccacagcagctacgcacacagccagagcctggaccggctgatgaatcccctcatcgaccagtacttgtactacctggccagaacacagagtaacccaggaggcacagctggcaatcgggaactgcagttttaccagggcgggccttcaactatggccgaacaagccaagaattggttacctggaccttgcttccggcaacaaagagtctccaaaacgctggatcaaaacaacaacagcaactttgcttggactggtgccaccaaatatcacctgaacggcagaaactcgttggttaatcccggcgtcgccatggcaactcacaaggacgacgaggaccgctttttcccatccagcggagtcctgatttttggaaaaactggagcaactaacaaaactacattggaaaatgtgttaatgacaaatgaagaagaaattcgtcctactaatcctgtagccacggaagaatacgggatagtcagcagcaacttacaagcggctaatactgcagcccagacacaagttgtcaacaaccagggagccttacctggcatggtctggcagaaccgggacgtgtacctgcagggtcccatctgggccaagattcctcacacggatggcaactttcacccgtctcctttgatgggcggctttggacttaaacatccgcctcctcagatcctgatcaagaacactcccgttcccgctaatcctccggaggtgtttactcctgccaagtttgcttcgttcatcacacagtacagcaccggacaagtcagcgtggaaatcgagtgggagctgcagaaggaaaacagcaagcgctggaacccggagattcagtacacctccaactttgaaaagcagactggtgtggactttgccgttgacagccagggtgtttactctgagcctcgccctattggcactcgttacctcacccgtaatctgtaattgcatgttaatcaataaaccggttgattcgtttcagttgaactttggtctcctgtgcttcttatcttatcggtttccatagcaactggttacacattaactgcttgggtgcgcttcacgataagaacactgacgtcaccgcggtacccctagtgatggagttggccactccctctatgcgcgctcgctcgctcggtggggcctgcggaccaaaggtccgcagacggcagagctctgctctgccggccccaccgagcgagcgagcgcgcatagagggagtggccaa

SEQ ID NO: 109 - DNA, 2214 bp, Adeno-associated virus; identical to SEQ ID NO: 104

SEQ ID NO: 110 - protein, 737 aa, Adeno-associated virus; identical to SEQ ID NO: 106

SEQ ID NO: 111 - DNA, 2217 bp, Adeno-associated virus
atggctgccgatggttatcttccagattggctcgaggacaacctctctgagggcattcgcgagtggtgggcgctgaaacctggagccccgaagcccaaagccaaccagcaaaagcaggacgacggccggggtctggtgcttcctggctacaagtacctcggacccttcaacggactcgacaagggggagcccgtcaacgcggcggacgcagcggccctcgagcacgacaaggcctacgaccagcagctgcaggcgggtgacaatccgtacctgcggtataaccacgccgacgccgagtttcaggagcgtctgcaagaagatacgtcttttgggggcaacctcgggcgagcagtcttccaggccaagaagcgggttctcgaacctctcggtctggttgaggaaggcgctaagacggctcctggaaagaagagaccggtagagccatcaccccagcgttctccagactcctctacgggcatcggcaagaaaggccaacagcccgccagaaaaagactcaattttggtcagactggcgactcagagtcagttccagaccctcaacctctcggagaacctccagcagcgccctctggtgtgggacctaatacaatggctgcaggcggtggcgcaccaatggcagacaataacgaaggcgccgacggagtgggtagttcctcgggaaattggcattgcgattccacatggctgggcgacagagtcatcaccaccagcacccgaacctgggccctgcccacctacaacaaccacctctacaagcaaatctccaacgggacatcgggaggagccaccaacgacaacacctacttcggctacagcaccccctgggggtattttgactttaacagattccactgccacttttcaccacgtgactggcagcgactcatcaacaacaactggggattccggcccaagagactcagcttcaagctcttcaacatccaggtcaaggaggtcacgcagaatgaaggcaccaagaccatcgccaataacctcaccagcaccatccaggtgtttacggactcggagtaccagctgccgtacgttctcggctctgcccaccagggctgcctgcctccgttcccggcggacgtgttcatgattccccagtacggctacctaacactcaacaacggtagtcaggccgtgggacgctcctccttctactgcctggaatactttccttcgcagatgctgagaaccggcaacaacttccagtttacttacaccttcgaggacgtgcctttccacagcagctacgcccacagccagagcttggaccggctgatgaatcctctgattgaccagtacctgtactacttgtctcggactcaaacaacaggaggcacggcaaatacgcagactctgggcttcagccaaggtgggcctaatacaatggccaatcaggcaaagaactggctgccaggaccctgttaccgccaacaacgcgtctcaacgacaaccgggcaaaacaacaatagcaactttgcctggactgctgggaccaaataccatctgaatggaagaaattcattggctaatcctggcatcgctatggcaacacacaaagacgacgaggagcgtttttttcccagtaacgggatcctgatttttggcaaacaaaatgctgccagagacaatgcggattacagcgatgtcatgctcaccagcgaggaagaaatcaaaaccactaaccctgtggctacagaggaatacggtatcgtggcagataacttgcagcagcaaaacacggctcctcaaattggaactgtcaacagccagggggccttacccggtatggtctggcagaaccgggacgtgtacctgcagggtcccatctgggccaagattcctcacacggacggcaacttccacccgtctccgctgatgggcggctttggcctgaaacatcctccgcctcagatcctgatcaagaacacgcctgtacctgcggatcctccgaccaccttcaaccagtcaaagctgaactctttcatcacgcaatacagcaccggacaggtcagcgtggaaattgaatgggagctgcagaaggaaaacagcaagcgctggaaccccgagatccagtacacctccaactactacaaatctacaagtgtggactttgctgttaatacagaaggcgtgtactctgaaccccgccccattggcacccgttacctcacccgtaatctgtaa

SEQ ID NO: 112 - DNA, 2213 bp, Adeno-associated virus 8
atggctgccgatggttatcttccagattggctcgaggacaacctctctgagggcattcgcgagtggtgggcgctgaaacctggagccccgaagcccaaagccaaccagcaaaagcaggacgacggccggggtctggtgcttcctggctacaagtacctcggacccttcaacggactcgacaagggggagcccgtcaacgcggcggacgcagcggccctcgagcacgacaaggcctacgaccagcagctgcaggcgggtgacaatccgtacctgcggtataaccacgccgacgccgagtttcaggagcgtctgcaagaagatacgtcttttgggggcaacctcgggcgagcagtcttccaggccaagaagcgggttctcgaacctctcggtctggttgaggaaggcgctaagacggctcctggaaagaagagaccggtagagccatcaccccagcgttctccagactcctctacgggcatcggcaagaaaggccaacagcccgccagaaaaagactcaattttggtcagactggcgactcagagtcagttccagaccctcaacctctcggagaacctccagcagcgccctctggtgtgggacctaatacaatggctgcaggcggtggcgcaccaatggcagacaataacgaaggcgccgacggagtgggtagttcctcgggaaattggcattgcgattccacatggctgggcgacagagtcatcaccaccagcacccgaacctgggccctgcccacctacaacaaccacctctacaagcaaatctccaacgggacatcgggaggagccaccaacgacaacacctacttcggctacagcaccccctgggggtattttgactttaacagattccactgccacttttcaccacgtgactggcagcgactcatcaacaacaactggggattccggcccaagagactcagcttcaagctcttcaacatccaggtcaaggaggtcacgcagaatgaaggcaccaagaccatcgccaataacctcaccagcaccatccaggtgtttacggactcggagtaccagctgccgtacgttctcggctctgcccaccagggctgcctgcctccgttcccggcggacgtgttcatgattccccagtacggctacctaacactcaacaacggtagtcaggccgtgggacgctcctccttctactgcctggaatactttccttcgcagatgctgagaaccggcaacaacttccagtttacttacaccttcgaggacgtgcctttccacagcagctacgcccacagccagagcttggaccggctgatgaatcctctgattgaccagtacctgtactacttgtctcggactcaaacaacaggaggcacggcaaatacgcagactctgggcttcagccaaggtgggcctaatacaatggccaatcaggcaaagaactggctgccaggaccctgttaccgccaacaacgcgtctcaacgacaaccgggcaaaacaacaatagcaactttgcctggactgctgggaccaaataccatctgaatggaagaaattcattggctaatcctggcatcgctatggcaacacacaaagacgacgaggagcgtttttttcccagtaacgggatcctgatttttggcaaacaaaatgctgccagagacaatgcggattacagcgatgtcatgctcaccagcgaggaagaaatcaaaaccactaaccctgtggctacagaggaatacggtatcgtggcagataacttgcagcagcaaaacacggctcctcaaattggaactgtcaacagccagggggccttacccggtatggtctggcagaaccgggacgtgtacctgcagggtcccatctgggccaagattcctcacacggacggcaacttccacccgtctccgctgatgggcggctttggcctgaaacatcctccgcctcagatcctgatcaagaacacgcctgtacctgcggatcctccgaccaccttcaaccagtcaaagctgaactctttcatcacgcaatacagcaccggacaggtcagcgtggaaattgaatgggagctgcagaaggaaaacagcaagcgctggaaccccgagatccagtacacctccaactactacaaatctacaagtgtggactttgctgtaatacagaaggcgtgtactctgaaccccgccccattggcacccgttacctcacccgtaatctg

SEQ ID NO: 113 - DNA, 4393 bp, Adeno-associated virus 8
cagagagggagtggccaactccatcactaggggtagcgcgaagcgcctcccacgctgccgcgtcagcgctgacgtaaattacgtcataggggagtggtcctgtattagctgtcacgtgagtgcttttgcggcattttgcgacaccacgtggccatttgaggtatatatggccgagtgagcgagcaggatctccattttgaccgcgaaatttgaacgagcagcagccatgccgggcttctacgagatcgtgatcaaggtgccgagcgacctggacgagcacctgccgggcatttctgactcgtttgtgaactgggtggccgagaaggaatgggagctgcccccggattctgacatggatcggaatctgatcgagcaggcacccctgaccgtggccgagaagctgcagcgcgacttcctggtccaatggcgccgcgtgagtaaggccccggaggccctcttctttgttcagttcgagaagggcgagagctactttcacctgcacgttctggtcgagaccacgggggtcaagtccatggtgctaggccgcttcctgagtcagattcgggaaaagcttggtccagaccatctacccgcggggtcgagccccaccttgcccaactggttcgcggtgaccaaagacgcggtaatggcgccggcgggggggaacaaggtggtggacgagtgctacatccccaactacctcctgcccaagactcagcccgagctgcagtgggcgtggactaacatggaggagtatataagcgcgtgcttgaacctggccgagcgcaaacggctcgtggcgcagcacctgacccacgtcagccagacgcaggagcagaacaaggagaatctgaaccccaattctgacgcgcccgtgatcaggtcaaaaacctccgcgcgctatatggagctggtcgggtggctggtggaccggggcatcacctccgagaagcagtggatccaggaggaccaggcctcgtacatctccttcaacgccgcctccaactcgcggtcccagatcaaggccgcgctggacaatgccggcaagatcatggcgctgaccaaatccgcgcccgactacctggtggggccctcgctgcccgcggacattacccagaaccgcatctaccgcatcctcgctctcaacggctacgaccctgcctacgccggctccgtctttctcggctgggctcagaaaaagttcgggaaacgcaacaccatctggctgtttggacccgccaccaccggcaagaccaacattgcggaagccatcgcccacgccgtgcccttctacggctgcgtcaactggaccaatgagaactttcccttcaatgattgcgtcgacaagatggtgatctggtgggaggagggcaagatgacggccaaggtcgtggagtccgccaaggccattctcggcggcagcaaggtgcgcgtggaccaaaagtgcaagtcgtccgcccagatcgaccccacccccgtgatcgtcacctccaacaccaacatgtgcgccgtgattgacgggaacagcaccaccttcgagcaccagcagcctctccaggaccggatgtttaagttcgaactcacccgccgtctggagcacgactttggcaaggtgacaaagcaggaagtcaaagagttcttccgctgggccagtgatcacgtgaccgaggtggcgcatgagttttacgtcagaaagggcggagccagcaaaagacccgcccccgatgacgcggataaaagcgagcccaagcgggcctgcccctcagtcgcggatccatcgacgtcagacgcggaaggagctccggtggactttgccgacaggtaccaaaacaaatgttctcgtcacgcgggcatgcttcagatgctgtttccctgcaaaacgtgcgagagaatgaatcagaatttcaacatttgcttcacacacggggtcagagactgctcagagtgtttccccggcgtgtcagaatctcaaccggtcgtcagaaagaggacgtatcggaaactctgtgcgattcatcatctgctggggcgggctcccgagattgcttgctcggcctgcgatctggtcaacgtggacctggatgactgtgtttctgagcaataaatgacttaaaccaggtatggctgccgatggttatcttccagattggctcgaggacaacctctctgagggcattcgcgagtggtgggcgctgaaacctggagccccgaagcccaaagccaaccagcaaaagcaggacgacggccggggtctggtgcttcctggctacaagtacctcggacccttcaacggactcgacaagggggagcccgtcaacgcggcggacgcagcggccctcgagcacgacaaggcctacgaccagcagctgcaggcgggtgacaatccgtacctgcggtataaccacgccgacgccgagtttcaggagcgtctgcaagaagatacgtcttttgggggcaacctcgggcgagcagtcttccaggccaagaagcgggttctcgaacctctcggtctggttgaggaaggcgctaagacggctcctggaaagaagagaccggtagagccatcaccccagcgttctccagactcctctacgggcatcggcaagaaaggccaacagcccgccagaaaaagactcaattttggtcagactggcgactcagagtcagttccagaccctcaacctctcggagaacctccagcagcgccctctggtgtgggacctaatacaatggctgcaggcggtggcgcaccaatggcagacaataacgaaggcgccgacggagtgggtagttcctcgggaaattggcattgcgattccacatggctgggcgacagagtcatcaccaccagcacccgaacctgggccctgcccacctacaacaaccacctctacaagcaaatctccaacgggacatcgggaggagccaccaacgacaacacctacttcggctacagcaccccctgggggtattttgactttaacagattccactgccacttttcaccacgtgactggcagcgactcatcaacaacaactggggattccggcccaagagactcagcttcaagctcttcaacatccaggtcaaggaggtcacgcagaatgaaggcaccaagaccatcgccaataacctcaccagcaccatccaggtgtttacggactcggagtaccagctgccgtacgttctcggctctgcccaccagggctgcctgcctccgttcccggcggacgtgttcatgattccccagtacggctacctaacactcaacaacggtagtcaggccgtgggacgctcctccttctactgcctggaatactttccttcgcagatgctgagaaccggcaacaacttccagtttacttacaccttcgaggacgtgcctttccacagcagctacgcccacagccagagcttggaccggctgatgaatcctctgattgaccagtacctgtactacttgtctcggactcaaacaacaggaggcacggcaaatacgcagactctgggcttcagccaaggtgggcctaatacaatggccaatcaggcaaagaactggctgccaggaccctgttaccgccaacaacgcgtctcaacgacaaccgggcaaaacaacaatagcaactttgcctggactgctgggaccaaataccatctgaatggaagaaattcattggctaatcctggcatcgctatggcaacacacaaagacgacgaggagcgtttttttcccagtaacgggatcctgatttttggcaaacaaaatgctgccagagacaatgcggattacagcgatgtcatgctcaccagcgaggaagaaatcaaaaccactaaccctgtggctacagaggaatacggtatcgtggcagataacttgcagcagcaaaacacggctcctcaaattggaactgtcaacagccagggggccttacccggtatggtctggcagaaccgggacgtgtacctgcagggtcccatctgggccaagattcctcacacggacggcaacttccacccgtctccgctgatgggcggctttggcctgaaacatcctccgcctcagatcctgatcaagaacacgcctgtacctgcggatcctccgaccaccttcaaccagtcaaagctgaactctttcatcacgcaatacagcaccggacaggtcagcgtggaaattgaatgggagctgcagaaggaaaacagcaagcgctggaaccccgagatccagtacacctccaactactacaaatctacaagtgtggactttgctgttaatacagaaggcgtgtactctgaaccccgccccattggcacccgttacctcacccgtaatctgtaattgcctgttaatcaataaaccggttgattcgtttcagttgaactttggtctctgcg

SEQ ID NO: 114 - protein, 738 aa, Adeno-associated virus 8; identical to SEQ ID NO: 105

SEQ ID NO: 115 - protein, 737 aa, Adeno-associated virus 8
MAADGYLPDWLEDNLSEGIREWWALKPGAPKPKANQQKQDDGRGLVLPGYKYLGPFNGLDKGEPVNAADAAALEHDKAYDQQLQAGDNPYLRYNHADAEFQERLQEDTSFGGNLGRAVFQAKKRVLEPLGLVEEGAKTAPGKKRPVEPSPQRSPDSSTGIGKKGQQPARKRLNFGQTGDSESVPDPQPLGEPPAAPSGVGPNTMAAGGGAPMADNNEGADGVGSSSGNWHCDSTWLGDRVITTSTRTWALPTYNNHLYKQISNGTSGGATNDNTYFGYSTPWGYFDFNRFHCHFSPRDWQRLINNNWGFRPKRLSFKLFNIQVKEVTQNEGTKTIANNLTSTIQVFTDSEYQLPYVLGSAHQGCLPPFPADVFMIPQYGYLTLNNGSQAVGRSSFYCLEYFPSQMLRTGNNFQFTYTFEDVPFHSSYAHSQSLDRLMNPLIDQYLYYLSRTQTTGGTANTQTLGFSQGGPNTMANQAKNWLPGPCYRQQRVSTTTGQNNNSNFAWTAGTKYHLNGRNSLANPGIAMATHKDDEERFFPSNGILIFGKQNAARDNADYSDVMLTSEEEIKTTNPVATEEYGIVADNLQQQNTAPQIGTVNSQGALPGMVWQNRDVYLQGPIWAKIPHTDGNFHPSPLMGGFGLKHPPPQILIKNTPVPADPPTTFNQSKLNSFITQYSTGQVSVEIEWELQKENSKRWNPEIQYTSNYYKSTSVDFAVIQKACTLNPAPLAPVTSPVI

SEQ ID NO: 116 - DNA, 2217 bp, Adeno-associated virus; identical to SEQ ID NO: 111

SEQ ID NO: 117 - DNA, 2214 bp, Artificial Sequence
  Description of Artificial Sequence: Synthetic polynucleotide
atggctgccgatggttatcttccagattggctcgaggacaacctctctgagggcattcgcgagtggtgggcgctgaaacctggagccccgaagcccaaagccaaccagcaaaagcaggacgacggccggggtctggtgcttcctggctacaagtacctcggacccttcaacggactcgacaagggggagcccgtcaacgcggcggacgcagcggccctcgagcacgacaaggcctacgaccagcagctgcaggcgggtgacaatccgtacctgcggtataaccacgccgacgccgagtttcaggagcgtctgcaagaagatacgtcttttgggggcaacctcgggcgagcagtcttccaggccaagaagcgggttctcgaacctctcggtctggttgaggaaggcgctaagacggctcctggaaagaagagaccggtagagccatcaccccagcgttctccagactcctctacgggcatcggcaagaaaggccaacagcccgccagaaaaagactcaattttggtcagactggcgactcagagtcagttccagaccctcaacctctcggagaacctccagcagcgccctctggtgtgggacctaatacaatggctgcaggcggtggcgcaccaatggcagacaataacgaaggcgccgacggagtgggtagttcctcgggaaattggcattgcgattccacatggctgggcgacagagtcatcaccaccagcacccgaacctgggccctgcccacctacaacaaccacctctacaagcaaatctccaacgggacatcgggaggagccaccaacgacaacacctacttcggctacagcaccccctgggggtattttgactttaacagattccactgccacttttcaccacgtgactggcagcgactcatcaacaacaactggggattccggcccaagagactcagcttcaagctcttcaacatccaggtcaaggaggtcacgcagaatgaaggcaccaagaccatcgccaataacctcaccagcaccatccaggtgtttacggactcggagtaccagctgccgtacgttctcggctctgcccaccagggctgcctgcctccgttcccggcggacgtgttcatgattccccagtacggctacctaacactcaacaacggtagtcaggccgtgggacgctcctccttctactgcctggaatactttccttcgcagatgctgagaaccggcaacaacttccagtttacttacaccttcgaggacgtgcctttccacagcagctacgcccacagccagagcttggaccggctgatgaatcctctgattgaccagtacctgtactacttgtctcggactcaaacaacaggaggcacggcaaatacgcagactctgggcttcagccaaggtgggcctaatacaatggccaatcaggcaaagaactggctgccaggaccctgttaccgccaacaacgcgtctcaacgacaaccgggcaaaacaacaatagcaactttgcctggactgctgggaccaaataccatctgaatggaagaaattcattggctaatcctggcatcgctatggcaacacacaaagacgacgaggagcgtttttttcccagtaacgggatcctgatttttggcaaacaaaatgctgccagagacaatgcggattacagcgatgtcatgctcaccagcgaggaagaaatcaaaaccactaaccctgtggctacagaggaatacggtatcgtggcagataacttgcctgagcggacggcgatgagtcttccgggaactgtcaacagccagggggccttacccggtatggtctggcagaaccgggacgtgtacctgcagggtcccatctgggccaagattcctcacacggacggcaacttccacccgtctccgctgatgggcggctttggcctgaaacatcctccgcctcagatcctgatcaagaacacgcctgtacctgcggatcctccgaccaccttcaaccagtcaaagctgaactctttcatcacgcaatacagcaccggacaggtcagcgtggaaattgaatgggagctgcagaaggaaaacagcaagcgctggaaccccgagatccagtacacctccaactactacaaatctacaagtgtggactttgctgttaatacagaaggcgtgtactctgaaccccgccccattggcacccgttacctcacccgtaatctg

SEQ ID NO: 118 - protein, 738 aa, Artificial Sequence
  Description of Artificial Sequence: Synthetic polypeptide
MAADGYLPDWLEDNLSEGIREWWALKPGAPKPKANQQKQDDGRGLVLPGYKYLGPFNGLDKGEPVNAADAAALEHDKAYDQQLQAGDNPYLRYNHADAEFQERLQEDTSFGGNLGRAVFQAKKRVLEPLGLVEEGAKTAPGKKRPVEPSPQRSPDSSTGIGKKGQQPARKRLNFGQTGDSESVPDPQPLGEPPAAPSGVGPNTMAAGGGAPMADNNEGADGVGSSSGNWHCDSTWLGDRVITTSTRTWALPTYNNHLYKQISNGTSGGATNDNTYFGYSTPWGYFDFNRFHCHFSPRDWQRLINNNWGFRPKRLSFKLFNIQVKEVTQNEGTKTIANNLTSTIQVFTDSEYQLPYVLGSAHQGCLPPFPADVFMIPQYGYLTLNNGSQAVGRSSFYCLEYFPSQMLRTGNNFQFTYTFEDVPFHSSYAHSQSLDRLMNPLIDQYLYYLSRTQTTGGTANTQTLGFSQGGPNTMANQAKNWLPGPCYRQQRVSTTTGQNNNSNFAWTAGTKYHLNGRNSLANPGIAMATHKDDEERFFPSNGILIFGKQNAARDNADYSDVMLTSEEEIKTTNPVATEEYGIVADNLPERTAMSLPGTVNSQGALPGMVWQNRDVYLQGPIWAKIPHTDGNFHPSPLMGGFGLKHPPPQILIKNTPVPADPPTTFNQSKLNSFITQYSTGQVSVEIEWELQKENSKRWNPEIQYTSNYYKSTSVDFAVNTEGVYSEPRPIGTRYLTRNL

SEQ ID NO: 119 - DNA, 2214 bp, Artificial Sequence
  Description of Artificial Sequence: Synthetic polynucleotide
atggctgccgatggttatcttccagattggctcgaggacaacctctctgagggcattcgcgagtggtgggcgctgaaacctggagccccgaagcccaaagccaaccagcaaaagcaggacgacggccggggtctggtgcttcctggctacaagtacctcggacccttcaacggactcgacaagggggagcccgtcaacgcggcggacgcagcggccctcgagcacgacaaggcctacgaccagcagctgcaggcgggtgacaatccgtacctgcggtataaccacgccgacgccgagtttcaggagcgtctgcaagaagatacgtcttttgggggcaacctcgggcgagcagtcttccaggccaagaagcgggttctcgaacctctcggtctggttgaggaaggcgctaagacggctcctggaaagaagagaccggtagagccatcaccccagcgttctccagactcctctacgggcatcggcaagaaaggccaacagcccgccagaaaaagactcaattttggtcagactggcgactcagagtcagttccagaccctcaacctctcggagaacctccagcagcgccctctggtgtgggacctaatacaatggctgcaggcggtggcgcaccaatggcagacaataacgaaggcgccgacggagtgggtagttcctcgggaaattggcattgcgattccacatggctgggcgacagagtcatcaccaccagcacccgaacctgggccctgcccacctacaacaaccacctctacaagcaaatctccaacgggacatcgggaggagccaccaacgacaacacctacttcggctacagcaccccctgggggtattttgactttaacagattccactgccacttttcaccacgtgactggcagcgactcatcaacaacaactggggattccggcccaagagactcagcttcaagctcttcaacatccaggtcaaggaggtcacgcagaatgaaggcaccaagaccatcgccaataacctcaccagcaccatccaggtgtttacggactcggagtaccagctgccgtacgttctcggctctgcccaccagggctgcctgcctccgttcccggcggacgtgttcatgattccccagtacggctacctaacactcaacaacggtagtcaggccgtgggacgctcctccttctactgcctggaatactttccttcgcagatgctgagaaccggcaacaacttccagtttacttacaccttcgaggacgtgcctttccacagcagctacgcccacagccagagcttggaccggctgatgaatcctctgattgaccagtacctgtactacttgtctcggactcaaacaacaggaggcacggcaaatacgcagactctgggcttcagccaaggtgggcctaatacaatggccaatcaggcaaagaactggctgccaggaccctgttaccgccaacaacgcgtctcaacgacaaccgggcaaaacaacaatagcaactttgcctggactgctgggaccaaataccatctgaatggaagaaattcattggctaatcctggcatcgctatggcaacacacaaagacgacgaggagcgtttttttcccagtaacgggatcctgatttttggcaaacaaaatgctgccagagacaatgcggattacagcgatgtcatgctcaccagcgaggaagaaatcaaaaccactaaccctgtggctacagaggaatacggtatcgtggcagataacttgagttttagtcgtgcggttctttgtgatggaactgtcaacagccagggggccttacccggtatggtctggcagaaccgggacgtgtacctgcagggtcccatctgggccaagattcctcacacggacggcaacttccacccgtctccgctgatgggcggctttggcctgaaacatcctccgcctcagatcctgatcaagaacacgcctgtacctgcggatcctccgaccaccttcaaccagtcaaagctgaactctttcatcacgcaatacagcaccggacaggtcagcgtggaaattgaatgggagctgcagaaggaaaacagcaagcgctggaaccccgagatccagtacacctccaactactacaaatctacaagtgtggactttgctgttaatacagaaggcgtgtactctgaaccccgccccattggcacccgttacctcacccgtaatctg

SEQ ID NO: 120 - protein, 738 aa, Artificial Sequence
  Description of Artificial Sequence: Synthetic polypeptide
MAADGYLPDWLEDNLSEGIREWWALKPGAPKPKANQQKQDDGRGLVLPGYKYLGPFNGLDKGEPVNAADAAALEHDKAYDQQLQAGDNPYLRYNHADAEFQERLQEDTSFGGNLGRAVFQAKKRVLEPLGLVEEGAKTAPGKKRPVEPSPQRSPDSSTGIGKKGQQPARKRLNFGQTGDSESVPDPQPLGEPPAAPSGVGPNTMAAGGGAPMADNNEGADGVGSSSGNWHCDSTWLGDRVITTSTRTWALPTYNNHLYKQISNGTSGGATNDNTYFGYSTPWGYFDFNRFHCHFSPRDWQRLINNNWGFRPKRLSFKLFNIQVKEVTQNEGTKTIANNLTSTIQVFTDSEYQLPYVLGSAHQGCLPPFPADVFMIPQYGYLTLNNGSQAVGRSSFYCLEYFPSQMLRTGNNFQFTYTFEDVPFHSSYAHSQSLDRLMNPLIDQYLYYLSRTQTTGGTANTQTLGFSQGGPNTMANQAKNWLPGPCYRQQRVSTTTGQNNNSNFAWTAGTKYHLNGRNSLANPGIAMATHKDDEERFFPSNGILIFGKQNAARDNADYSDVMLTSEEEIKTTNPVATEEYGIVADNLSFSRAVLCDGTVNSQGALPGMVWQNRDVYLQGPIWAKIPHTDGNFHPSPLMGGFGLKHPPPQILIKNTPVPADPPTTFNQSKLNSFITQYSTGQVSVEIEWELQKENSKRWNPEIQYTSNYYKSTSVDFAVNTEGVYSEPRPIGTRYLTRNL

SEQ ID NO: 121 - DNA, 4385 bp, Adeno-associated virus 9
cagagagggagtggccaactccatcactaggggtaatcgcgaagcgcctcccacgctgccgcgtcagcgctgacgtagattacgtcataggggagtggtcctgtattagctgtcacgtgagtgcttttgcgacattttgcgacaccacatggccatttgaggtatatatggccgagtgagcgagcaggatctccattttgaccgcgaaatttgaacgagcagcagccatgccgggcttctacgagattgtgatcaaggtgccgagcgacctggacgagcacctgccgggcatttctgactcttttgtgaactgggtggccgagaaggaatgggagctgcccccggattctgacatggatcggaatctgatcgagcaggcacccctgaccgtggccgagaagctgcagcgcgacttcctggtccaatggcgccgcgtgagtaaggccccggaggccctcttctttgttcagttcgagaagggcgagagctactttcacctgcacgttctggtcgagaccacgggggtcaagtccatggtgctaggccgcttcctgagtcagattcgggagaagctggtccagaccatctaccgcgggatcgagccgaccctgcccaactggttcgcggtgaccaagacgcgtaatggcgccggcggggggaacaaggtggtggacgagtgctacatccccaactacctcctgcccaagactcagcccgagctgcagtgggcgtggactaacatggaggagtatataagcgcgtgcttgaacctggccgagcgcaaacggctcgtggcgcagcacctgacccacgtcagccagacgcaggagcagaacaaggagaatctgaaccccaattctgacgcgcccgtgatcaggtcaaaaacctccgcgcgctacatggagctggtcgggtggctggtggaccggggcatcacctccgagaagcagtggatccaggaggaccaggcctcgtacatctccttcaacgccgcctccaactcgcggtcccagatcaaggccgcgctggacaatgccggcaagatcatggcgctgaccaaatccgcgcccgactacctggtaggcccttcacttccggtggacattacgcagaaccgcatctaccgcatcctgcagctcaacggctacgaccctgcctacgccggctccgtctttctcggctgggcacaaaagaagttcgggaaacgcaacaccatctggctgtttgggccggccaccacgggaaagaccaacatcgcagaagccattgcccacgccgtgcccttctacggctgcgtcaactggaccaatgagaactttcccttcaacgattgcgtcgacaagatggtgatctggtgggaggagggcaagatgacggccaaggtcgtggagtccgccaaggccattctcggcggcagcaaggtgcgcgtggaccaaaagtgcaagtcgtccgcccagatcgaccccactcccgtgatcgtcacctccaacaccaacatgtgcgccgtgattgacgggaacagcaccaccttcgagcaccagcagcctctccaggaccggatgtttaagttcgaactcacccgccgtctggagcacgactttggcaaggtgacaaagcaggaagtcaaagagttcttccgctgggccagtgatcacgtgaccgaggtggcgcatgagttttacgtcagaaagggcggagccagcaaaagacccgcccccgatgacgcggataaaagcgagcccaagcgggcctgcccctcagtcgcggatccatcgacgtcagacgcggaaggagctccggtggactttgccgacaggtaccaaaacaaatgttctcgtcacgcgggcatgcttcagatgctgcttccctgcaaaacgtgcgagagaatgaatcagaatttcaacatttgcttcacacacggggtcagagactgctcagagtgtttccccggcgtgtcagaatctcaaccggtcgtcagaaagaggacgtatcggaaactctgtgcgattcatcatctgctggggcgggctcccgagattgcttgctcggcctgcgatctggtcaacgtggacctggatgactgtgtttctgagcaataaatgacttaaaccaggtatggctgccgatggttatcttccagattggctcgaggacaacctctctgagggcattcgcgagtggtgggcgctgaaacctggagccccgaagcccaaagccaaccagcaaaagcaggacgacggccggggtctggtgcttcctggctacaagtacctcggacccttcaacggactcgacaagggggagcccgtcaacgcggcggacgcagcggccctcgagcacggcaaggcctacgaccagcagctgcaggcgggtgacaatccgtacctgcggtataaccacgccgacgccgagtttcaggagcgtctgcaagaagatacgtcttttgggggcaacctcgggcgagcagtcttccaggccaagaagcgggttctcgaacctctcggtctggttgaggaaggcgctaagacggctcctggaaagaagagaccggtagagccatcaccccagcgttctccagactcctctacgggcatcggcaagaaaggccaacagcccgccagaaaaagactcaattttggtcagactggcgactcagagtcagttccagaccctcaacctctcggagaacctccagcagcgccctctggtgtgggacctaatacaatggctgcaggcggtggcgcaccaatggcagacaataacgaaggcgccgacggagtgggtaattcctcgggaaattggcattgcgattccacatggctgggggacagagtcatcaccaccagcacccgaacctgggcattgcccacctacaacaaccacctctacaagcaaatctccaatggaacatcgggaggaagcaccaacgacaacacctactttggctacagcaccccctgggggtattttgacttcaacagattccactgccacttctcaccacgtgactggcagcgactcatcaacaacaactggggattccggccaaagagactcaacttcaagctgttcaacatccaggtcaaggaggttacgacgaacgaaggcaccaagaccatcgccaataaccttaccagcaccgtccaggtctttacggactcggagtaccagctaccgtacgtcctaggctctgcccaccaaggatgcctgccaccgtttcctgcagacgtcttcatggttcctcagtacggctacctgacgctcaacaatggaagtcaagcgttaggacgttcttctttctactgtctggaatacttcccttctcagatgctgagaaccggcaacaactttcagttcagctacactttcgaggacgtgcctttccacagcagctacgcacacagccagagtctagatcgactgatgaaccccctcatcgaccagtacctatactacctggtcagaacacagacaactggaactgggggaactcaaactttggcattcagccaagcaggccctagctcaatggccaatcaggctagaaactgggtacccgggccttgctaccgtcagcagcgcgtctccacaaccaccaaccaaaataacaacagcaactttgcgtggacgggagctgctaaattcaagctgaacgggagagactcgctaatgaatcctggcgtggctatggcatcgcacaaagacgacgaggaccgcttctttccatcaagtggcgttctcatatttggcaagcaaggagccgggaacgatggagtcgactacagccaggtgctgattacagatgaggaagaaattaaagccaccaaccctgtagccacagaggaatacggagcagtggccatcaacaaccaggccgctaacacgcaggcgcaaactggacttgtgcataaccagggagttattcctggtatggtctggcagaaccgggacgtgtacctgcagggccctatttgggctaaaatacctcacacagatggcaactttcacccgtctcctctgatgggtggatttggactgaaacacccacctccacagattctaattaaaaatacaccagtgccggcagatcctcctcttaccttcaatcaagccaagctgaactctttcatcacgcagtacagcacgggacaagtcagcgtggaaatcgagtgggagctgcagaaagaaaacagcaagcgctggaatccagagatccagtatacttcaaactactacaaatctacaaatgtggactttgctgtcaataccaaaggtgtttactctgagcctcgccccattggtactcgttacctcacccgtaatttgtaattgcctgttaatcaataaaccggttaattcgtttcagttgaactttggtctctgcg

SEQ ID NO: 122 - DNA, 4382 bp, Adeno-associated virus 9
cagagagggagtggccaactccatcactaggggtaatcgcgaagcgcctcccacgctgccgcgtcagcgctgacgtagattacgtcataggggagtggtcctgtattagctgtcacgtgagtgcttttgcgacattttgcgacaccacatggccatttgaggtatatatggccgagtgagcgagcaggatctccattttgaccgcgaaatttgaacgagcagcagccatgccgggcttctacgagattgtgatcaaggtgccgagcgacctggacgagcacctgccgggcatttctgactcttttgtgaactgggtggccgagaaggaatgggagctgcccccggattctgacatggatcggaatctgatcgagcaggcacccctgaccgtggccgagaagctgtagcgcgacttcctggtccaatggcgccgcgtgagtaaggccccggaggccctcttctttgttcagttcgagaagggcgagagctactttcacctgcacgttctggtcgagaccacgggggtcaagtccatggtgctaggccgcttcctgagtcagattcgggagaagctggtccagaccatctaccgcgggatcgagccgaccctgcccaactggttcgcggtgaccaagacgcgtaatggcgccggcggggggaacaaggtggtggacgagtgctacatccccaactacctcctgcccaagactcagcccgagctgcagtgggcgtggactaacatggaggagtatataagcgcgtgcttgaacctggccgagcgcaaacggctcgtggcgcagcacctgacccacgtcagccagacgcaggagcagaacaaggagaatctgaaccccaattctgacgcgcccgtgatcaggtcaaaaacctccgcgcgctacatggagctggtcgggtggctggtggaccggggcatcacctccgagaagcagtggatccaggaggaccaggcctcgtacatctccttcaacgccgcctccaactcgcggtcccagatcaaggccgcgctggacaatgccggcaagatcatggcgctgaccaaatccgcgcccgactacctggtaggcccttcacttccggtggacattacgcagaaccgcatctaccgcatcctgcagctcaacggctacgaccctgcctacgccggctccgtctttctcggctgggcacaaaagaagttcgggaaacgcaacaccatctggctgtttgggccggccaccacgggaaagaccaacatcgcagaagccattgcccacgccgtgcccttctacggctgcgtcaactggaccaatgagaactttcccttcaacgattgcgtcgacaagatggtgatctggtgggaggagggcaagatgacggccaaggtcgtggagtccgccaaggccattctcggcggcagcaaggtgcgcgtggaccaaaagtgcaagtcgtccgcccagatcgaccccactcccgtgatcgtcacctccaacaccaacatgtgcgccgtgattgacgggaacagcaccaccttcgagcaccagcagcctctccaggaccggatgtttaagttcgaactcacccgccgtctggagcacgactttggcaaggtgacaaagcaggaagtcaaagagttcttccgctgggccagtgatcacgtgaccgaggtggcgcatgagttttacgtcagaaagggcggagccagcaaaagacccgcccccgatgacgcggataaaagcgagcccaagcgggcctgcccctcagtcgcggatccatcgacgtcagacgcggaaggagctccggtggactttgccgacaggtaccaaaacaaatgttctcgtcacgcgggcatgcttcagatgctgcttccctgcaaaacgtgcgagagaatgaatcagaatttcaacatttgcttcacacacggggtcagagactgctcagagtgtttccccggcgtgtcagaatctcaaccggtcgtcagaaagaggacgtatcggaaactctgtgcgattcatcatctgctggggcgggctcccgagattgcttgctcggcctgcgatctggtcaacgtggacctggatgactgtgtttctgagcaataaatgacttaaaccaggtatggctgccgatggttatcttccagattggctcgaggacaacctctctgagggcattcgcgagtggtgggacctgaaacctggagccccgaaacccaaagccaaccagcaaaagcaggacgacggccggggtctggtgcttcctggctacaagtacctcggacccttcaacggactcgacaagggggagcccgtcaacgcggcggacgcagcggccctcgagcacgacaaggcctacgaccagcagctcaaagcgggtgacaatccgtacctgcggtataaccacgccgacgccgagtttcaggagcgtctgcaagaagatacgtcttttgggggcaacctcgggcgagcagtcttccaggccaagaagcgggttctcgaacctctcggtctggttgaggaaggcgctaagacggctcctggaaagaagagaccggtagagcagtcaccccaagaaccagactcatcctcgggcatcggcaaatcaggccagcagcccgctaaaaagagactcaattttggtcagactggcgactcagagtcagtccccgacccacaacctctcggagaacctccagaagccccctcaggtctgggacctaatacaatggcttcaggcggtggcgctccaatggcagacaataacgaaggcgccgacggagtgggtaattcctcgggaaattggcattgcgattccacatggctgggggacagagtcatcaccaccagcacccgaacctgggcattgcccacctacaacaaccacctctacaagcaaatctccaatggaacatcgggaggaagcaccaacgacaacacctactttggctacagcaccccctgggggtattttgacttcaacagattccactgccacttctcaccacgtgactggcagcgactcatcaacaacaactggggattccggccaaagagactcaacttcaagctgttcaacatccaggtcaaggaggttacgacgaacgaaggcaccaagaccatcgccaataaccttaccagcaccgtccaggtctttacggactcggagtaccagctaccgtacgtcctaggctctgcccaccaaggatgcctgccaccgtttcctgcagacgtcttcatggttcctcagtacggctacctgacgctcaacaatggaagtcaagcgttaggacgttcttctttctactgtctggaatacttcccttctcagatgctgagaaccggcaacaactttcagttcagctacactttcgaggacgtgcctttccacagcagctacgcacacagccagagtctagatcgactgatgaaccccctcatcgaccagtacctatactacctggtcagaacacagacaactggaactgggggaactcaaactttggcattcagccaagcaggccctagctcaatggccaatcaggctagaaactgggtacccgggccttgctaccgtcagcagcgcgtctccacaaccaccaaccaaaataacaacagcaactttgcgtggacgggagctgctaaattcaagctgaacgggagagactcgctaatgaatcctggcgtggctatggcatcgcacaaagacgacgaggaccgcttctttccatcaagtggcgttctcatatttggcaagcaaggagccgggaacgatggagtcgactacagccaggtgctgattacagatgaggaagaaattaaagccaccaaccctgtagccacagaggaatacggagcagtggccatcaacaaccaggccgctaacacgcaggcgcaaactggacttgtgcataaccagggagttattcctggtatggtctggcagaaccgggacgtgtacctgcagggccctatttgggctaaaatacctcacacagatggcaactttcacccgtctcctctgatgggtggatttggactgaaacacccacctccacagattctaattaaaaatacaccagtgccggcagatcctcctcttaccttcaatcaagccaagctgaactctttcatcacgcagtacagcacgggacaagtcagcgtggaaatcgagtgggagctgcagaaagaaaacagcaagcgctggaatccagagatccagtatacttcaaactactacaaatctacaaatgtggactttgctgtcaataccgaaggtgtttactctgagcctcgccccattggtactcgttacctcacccgtaatttgtaattgcctgttaatcaataaaccggttaattcgtttcagttgaactttggtctctgcg

SEQ ID NO: 123 - protein, 736 aa, Adeno-associated virus 9
MAADGYLPDWLEDNLSEGIREWWALKPGAPQPKANQQHQDNARGLVLPGYKYLGPGNGLDKGEPVNAADAAALEHDKAYDQQLKAGDNPYLKYNHADAEFQERLKEDTSFGGNLGRAVFQAKKRLLEPLGLVEEAAKTAPGKKRPVEQSPQEPDSSAGIGKSGAQPAKKRLNFGQTGDTESVPDPQPIGEPPAAPSGVGSLTMASGGGAPVADNNEGADGVGSSSGNWHCDSQWLGDRVITTSTRTWALPTYNNHLYKQISNSTSGGSSNDNAYFGYSTPWGYFDFNRFHCHFSPRDWQRLINNNWGFRPKRLNFKLFNIQVKEVTDNNGVKTIANNLTSTVQVFTDSDYQLPYVLGSAHEGCLPPFPADVFMIPQYGYLTLNDGSQAVGRSSFYCLEYFPSQMLRTGNNFQFSYEFENVPFHSSYAHSQSLDRLMNPLIDQYLYYLSKTINGSGQNQQTLKFSVAGPSNMAVQGRNYIPGPSYRQQRVSTTVTQNNNSEFAWPGASSWALNGRNSLMNPGPAMASHKEGEDRFFPLSGSLIFGKQGTGRDNVDADKVMITNEEEIKTTNPVATESYGQVATNHQSAQAQAQTGWVQNQGILPGMVWQDRDVYLQGPIWAKIPHTDGNFHPSPLMGGFGMKHPPPQILIKNTPVPADPPTAFNKDKLNSFITQYSTGQVSVEIEWELQKENSKRWNPEIQYTSNYYKSNNVEFAVNTEGVYSEPRPIGTRYLTRNL

SEQ ID NO: 124 - protein, 736 aa, Artificial Sequence
  Description of Artificial Sequence: Synthetic polypeptide
MAADGYLPDWLEDNLSEGIREWWDLKPGAPKPKANQQKQDDGRGLVLPGYKYLGPFNGLDKGEPVNAADAAALEHDKAYDQQLKAGDNPYLRYNHADAEFQERLQEDTSFGGNLGRAVFQAKKRVLEPLGLVEEGAKTAPGKKRPVEQSPQEPDSSSGIGKSGQQPAKKRLNFGQTGDSESVPDPQPLGEPPEAPSGLGPNTMASGGGAPMADNNEGADGVGNSSGNWHCDSTWLGDRVITTSTRTWALPTYNNHLYKQISNGTSGGSTNDNTYFGYSTPWGYFDFNRFHCHFSPRDWQRLINNNWGFRPKRLNFKLFNIQVKEVTTNEGTKTIANNLTSTVQVFTDSEYQLPYVLGSAHQGCLPPFPADVFMVPQYGYLTLNNGSQALGRSSFYCLEYFPSQMLRTGNNFQFSYTFEDVPFHSSYAHSQSLDRLMNPLIDQYLYYLVRTQTTGTGGTQTLAFSQAGPSSMANQARNWVPGPCYRQQRVSTTTNQNNNSNFAWTGAAKFKLNGRDSLMNPGVAMASHKDDEDRFFPSSGVLIFGKQGAGNDGVDYSQVLITDEEEIKATNPVATEEYGAVAINNQAANTQAQTGLVHNQGVIPGMVWQNRDVYLQGPIWAKIPHTDGNFHPSPLMGGFGLKHPPPQILIKNTPVPADPPLTFNQAKLNSFITQYSTGQVSVEIEWELQKENSKRWNPEIQYTSNYYKSTNVDFAVNTEGVYSEPRPIGTRYLTRNL

SEQ ID NO: 125 - protein, 623 aa, Artificial Sequence
  Description of Artificial Sequence: Synthetic polypeptide
MPGFYEIVIKVPSDLDEHLPGISDSFVNWVAEKEWELPPDSDMDRNLIEQAPLTVAEKLQRDFLVQWRRVSKAPEALFFVQFEKGESYFHLHVLVETTGVKSMVLGRFLSQIREKLVQTIYRGIEPTLPNWFAVTKTRNGAGGGNKVVDECYIPNYLLPKTQPELQWAWTNMEEYISACLNLAERKRLVAQHLTHVSQTQEQNKENLNPNSDAPVIRSKTSARYMELVGWLVDRGITSEKQWIQEDQASYISFNAASNSRSQIKAALDNAGKIMALTKSAPDYLVGPSLPVDITQNRIYRILQLNGYDPAYAGSVFLGWAQKKFGKRNTIWLFGPATTGKTNIAEAIAHAVPFYGCVNWTNENFPFNDCVDKMVIWWEEGKMTAKVVESAKAILGGSKVRVDQKCKSSAQIDPTPVIVTSNTNMCAVIDGNSTTFEHQQPLQDRMFKFELTRRLEHDFGKVTKQEVKEFFRWASDHVTEVAHEFYVRKGGASKRPAPDDADKSEPKRACPSVADPSTSDAEGAPVDFADRYQNKCSRHAGMLQMLLPCKTCERMNQNFNICFTHGVRDCSECFPGVSESQPVVRKRTYRKLCAIHHLLGRAPEIACSACDLVNVDLDDCVSEQ

SEQ ID NO: 126 - DNA, 2211 bp, Adeno-associated virus
atggctgccgatggttatcttccagattggctcgaggacaaccttagtgaaggaattcgcgagtggtgggctttgaaacctggagcccctcaacccaaggcaaatcaacaacatcaagacaacgctcgaggtcttgtgcttccgggttacaaataccttggacccggcaacggactcgacaagggggagccggtcaacgcagcagacgcggcggccctcgagcacgacaaggcctacgaccagcagctcaaggccggagacaacccgtacctcaagtacaaccacgccgacgccgagttccaggagcggctcaaagaagatacgtcttttgggggcaacctcgggcgagcagtcttccaggccaaaaagaggcttcttgaacctcttggtctggttgaggaagcggctaagacggctcctggaaagaagaggcctgtagagcagtctcctcaggaaccggactcctccgcgggtattggcaaatcgggtgcacagcccgctaaaaagagactcaatttcggtcagactggcgacacagagtcagtcccagaccctcaaccaatcggagaacctcccgcagccccctcaggtgtgggatctcttacaatggcttcaggtggtggcgcaccagtggcagacaataacgaaggtgccgatggagtgggtagttcctcgggaaattggcattgcgattcccaatggctgggggacagagtcatcaccaccagcacccgaacctgggccctgcccacctacaacaatcacctctacaagcaaatctccaacagcacatctggaggatcttcaaatgacaacgcctacttcggctacagcaccccctgggggtattttgacttcaacagattccactgccacttctcaccacgtgactggcagcgactcatcaacaacaactggggattccggcctaagcgactcaacttcaagctcttcaacattcaggtcaaagaggttacggacaacaatggagtcaagaccatcgccaataaccttaccagcacggtccaggtcttcacggactcagactatcagctcccgtacgtgctcgggtcggctcacgagggctgcctcccgccgttcccagcggacgttttcatgattcctcagtacgggtatctgacgcttaatgatggaagccaggccgtgggtcgttcgtccttttactgcctggaatatttcccgtcgcaaatgctaagaacgggtaacaacttccagttcagctacgagtttgagaacgtacctttccatagcagctacgctcacagccaaagcctggaccgactaatgaatccactcatcgaccaatacttgtactatctctcaaagactattaacggttctggacagaatcaacaaacgctaaaattcagtgtggccggacccagcaacatggctgtccagggaagaaactacatacctggacccagctaccgacaacaacgtgtctcaaccactgtgactcaaaacaacaacagcgaatttgcttggcctggagcttcttcttgggctctcaatggacgtaatagcttgatgaatcctggacctgctatggccagccacaaagaaggagaggaccgtttctttcctttgtctggatctttaatttttggcaaacaaggaactggaagagacaacgtggatgcggacaaagtcatgataaccaacgaagaagaaattaaaactactaacccggtagcaacggagtcctatggacaagtggccacaaaccaccagagtgcccaagcacaggcgcagaccggctgggttcaaaaccaaggaatacttccgggtatggtttggcaggacagagatgtgtacctgcaaggacccatttgggccaaaattcctcacacggacggcaactttcacccttctccgctgatgggagggtttggaatgaagcacccgcctcctcagatcctcatcaaaaacacacctgtacctgcggatcctccaacggccttcaacaaggacaagctgaactctttcatcacccagtattctactggccaagtcagcgtggagatcgagtgggagctgcagaaggaaaacagcaagcgctggaacccggagatccagtacacttccaactattacaagtctaataatgttgaatttgctgttaatactgaaggtgtatatagtgaaccccgccccattggcaccagatacctgactcgtaatctgtaa

SEQ ID NO: 127 - protein, 736 aa, Adeno-associated virus; identical to SEQ ID NO: 123

SEQ ID NO: 128 - DNA, 2460 bp, Adeno-associated virus
ggtaattcctccggaaattggcattgcgattccacatggctgggcgaccgagtcattaccaccagcacccggacttgggccctgcccacctacaacaaccacctctacaagcaaatctccagccaatcgggtgccaccaacgacaaccactacttcggctacagcaccccttgggggtattttgatttcaacagattccactgccatttctcaccacgtgactggcagcgactcatcaacaacaactggggattcatggctgccgatggttatcttccagattggctcgaggacactctctctgaaggaatcagacagtggtggaagctcaaacctggcccaccaccgccgaaacctaaccaacaacaccgggacgacagtaggggtcttgtgcttcctgggtacaagtacctcggacccttcaacggactcgacaaaggagagccggtcaacgaggcagacgccgcggccctcgagcacgacaaagcctacgaccaccagctcaagcaaggggacaacccgtacctcaaatacaaccacgcggacgctgaatttcaggagcgtcttcaagaagatacgtctttcgggggcaacctcgggcgagcagtcttccaggccaaaaagagggtactcgagcctcttggtctggttgaggaagctgttaagacggctcctggaaaaaagagacctatagagcagtctcctgcagaaccggactcttcctcgggcatcggcaaatcaggccagcagcccgctaagaaaagactcaattttggtcagactggcgacacagagtcagtcccagaccctcaaccaatcggagaaccccccgcagccccctctggtgtgggatctaatacaatggcttcaggcggtggggcaccaatggcagacaataacgaaggcgccgacggagtgggtaattcctcgggaaattggcattgcgattccacatggatgggcgacagagttatcaccaccagcacaagaacctgggccctccccacctacaataatcacctctacaagcaaatctccagcgaatcgggagccaccaacgacaaccactacttcggctacagcaccccctgggggtattttgactttaacagattccactgtcacttctcaccacgtgactggcagcgactcatcaacaacaactggggatttagacccaagaaactcaatttcaagctcttcaacatccaagtcaaggaggtcacgcagaatgatggaaccacgaccatcgccaataaccttaccagcacggtgcaggtcttcacagactctgagtaccagctgccctacgtcctcggttcggctcaccagggctgccttccgccgttcccagcagacgtcttcatgattcctcagtacggctacttgactctgaacaatggcagccaagcggtaggacgttcttcattctactgtctagagtattttccctctcagatgctgaggacgggaaacaacttcaccttcagctacacttttgaagacgtgcctttccacagcagctacgcgcacagccagagtctggatcggctgatgaatcctctcattgaccagtacctgtattacctgagcaaaactcagggtacaagtggaacaacgcagcaatcgagactgcagttcagccaagctgggcctagctccatggctcagcaggccaaaaactggctaccgggacccagctaccgacagcagcgaatgtctaagacggctaatgacaacaacaacagtgaatttgcttggactgcagccaccaaatattacctgaatggaagaaattctctggtcaatcccgggcccccaatggccagtcacaaggacgatgaggaaaagtatttccccatgcacggaaatctcatctttggaaaacaaggcacaggaactaccaatgtggacattgaatcagtgcttattacagacgaagaagaaatcagaacaactaatcctgtggctacagaacaatacggacaggttgccaccaaccatcagagtcagaacaccacagcttcctatggaagtgtggacagccagggaatcttacctggaatggtgtggcaggaccgcgatgtctatcttcaaggtcccatttgggccaaaactcctcacacggacggacactttcatccttctccgctcatgggaggctttggactgaaacaccctcctccccagatcctgatcaaaaacacacctgtgccagcgaatcccgcgaccactttcactcctggaaagtttgcttcgttcattacccagtattccaccggacaggtcagcgtggaaatagagtgggagctgcagaaagaaaacagcaaacgctggaacccagaaattcagtacacctccaactacaacaagtcggtgaatgtggagtttaccgtggacgcaaacggtgtttattctgaaccccgccctattggcactcgttaccttacccggaacttg

SEQ ID NO: 129 - DNA, 3123 bp, Adeno-associated virus
gaattcgccctttctacggctgcgtcaactggaccaatgaaaactttcccttcaacgattgcgtcgacaagatggtgatctggtgggaggagggaaagatgaccgccaaggtcgtggaatctgccaaagccattctgggtggaggcaaggttcgtgtggaccagaaatgcaagtcttcggcccagatcgacccgactccggtgattgtcacctctaacaccaacatgtgcgccgtgattgacggaaactcgaccaccttcgagcaccagcagccgttgcaagaccggatgttcaaatttgaacttacccgccgtttggatcatgactttgggaaggtcaccaagcaggaagtcaaagactttttccggtgggctcaagatcacgtgactgaggtggagcatgagttctacgtcaaaaagggtggagccaagaaaaggcccgcccccgatgatgtatatataaatgagcccaagcgggcgcgcgagtcagttgcgcagccatcgacgtcagacgcggaagcttcgataaactacgcggacaggtaccaaaacaaatgttctcgtcacgtgggcatgaatctgatgctgtttccctgtcgacaatgcgaaagaatgaatcagaattcaaatatctgcttcacacacgggcaaaaagactgtttggaatgctttcccgtgtcagaatctcaacccgtttctgtcgtcagaaaaacgtatcagaaactttgttacattcatcatatcatgggaaaagtaccagacgcctgcactgcctgcgacctggtaaatgtggacttggatgactgtatttctgagcaataaatgacttaaatcaggtatggctgctgacggttatcttccagattggctcgaggacactctctctgaaggaatcagacagtggtggaagctcaaacctggcccaccaccgccgaaacctaaccaacaacaccgggacgacagtaggggtcttgtgcttcctgggtacaagtacctcggacccttcaacggactcgacaaaggagagccggtcaacgaggcagacgccgcggccctcgagcacgacaaagcctacgaccaccagctcaagcaaggggacaacccgtacctcaaatacaaccacgcggacgctgaatttcaggagcgtcttcaagaagatacgtctttcgggggcaacctcgggcgagcagtcttccaggccaaaaagagggtactcgagcctcttggtctggttgaggaagctgttaagacggctcctggaaaaaagagacctatagagcagtctcctgcagaaccggactcttcctcgggcatcggcaaatcaggccagcagcccgctaagaaaagactcaattttggtcagactggcgacacagagtcagtcccaggccctcaaccaatcggagaaccccccgcagccccctctggtgtgggatctaatacaatggcttcaggcggtggggcaccaatggcagacaataacgaaggcgccgacggagtgggtaattcctcgggaaattggcattgcgattccacatggatgggcgacagagttatcaccaccagcacaagaacctgggccctccccacctacaataatcacctctacaagcaaatctccagcgaatcgggagccaccaacgacaaccactacttcggctacagcaccccctgggggtattttgactttaacagattccactgtcacttctcaccacgtgactggcagcgactcatcaacaacaactggggatttagacccaagaaactcaatttcaagctcttcaacatccaagtcaaggaggtcacgcagaatgatggaaccacgaccatcgccaataaccttaccagcgcggtgcaggtcttcacagactctgagtaccagctgccctacgtcctcggttcggctcaccagggctgccttccgccgttcccagcagacgtcttcatgattcctcagtacggctacttgactctgaacaatggcagccaagcggtaggacgttcttcattctactgtctagagtattttccctctcagatgctgaggacgggaaacaacttcaccttcagctacacttttgaagacgtgcctttccacagcagctacgcgcacagccagagtctggatcggctgatgaatcctctcattgaccagtacctgtattacctgagcaaaactcagggtacaagtggaacaacgcagcaatcgagactgcagttcagccaagctgggcctagctccatggctcagcaggccaaaaactggctaccgggacccagctaccgacagcagcgaatgtctaagacggctaatgacaacaacaacagtgaatttgcttggactgcagccaccaaatattacctgaatggaagaaattctctggtcaatcccgggcccccagtggccagtcacaaggacgatgaggaaaagtatttccccatgcacggaaatctcatctttggaaaacaaggcacaggaactaccaatgtggacattgaatcagtgcttattacagacgaagaagaaatcagaacaactaatcctgtggctacagaacaatacggacaggttgccaccaaccatcagagtcagaacaccacagcttcctatggaagtgtggacagccagggaatcttacctggaatggtgtggcaggaccgcgatgtctatcttcaaggtcccatttgggccaaaactcctcacacggacggacactttcatccttctccgctcatgggaggctttggactgaaacaccctcctccccagatcctgatcaaaaacacacctgtgccagcgaatcccgcgaccactttcactcctggaaagtttgcttcgttcattacccagtattccacctgacaggtcagcgtggaaatagagtgggagctgcagaaagaaaacagcaaacgctggaacccagaaattcagtacacctccaactacaacaagtcggtgaatgtggagtttaccgtggacgcaaacggtgtttattctgaaccccgccctattggcactcgttaccttacccggaacttgtaatttcctgttaatgaataagccgatttatgcgtttcagttgaactttggtctctgcgaagggcgaattcgtttaaacct

SEQ ID NO: 130 - protein, 735 aa, Artificial Sequence
  Description of Artificial Sequence: Synthetic polypeptide
MAADGYLPDWLEDTLSEGIRQWWKLKPGPPPPKPNQQHRDDSRGLVLPGYKYLGPFNGLDKGEPVNEADAAALEHDKAYDHQLKQGDNPYLKYNHADAEFQERLQEDTSFGGNLGRAVFQAKKRVLEPLGLVEEAVKTAPGKKRPIEQSPAEPDSSSGIGKSGQQPAKKRLNFGQTGDTESVPGPQPIGEPPAAPSGVGSNTMASGGGAPMADNNEGADGVGNSSGNWHCDSTWMGDRVITTSTRTWALPTYNNHLYKQISSESGATNDNHYFGYSTPWGYFDFNRFHCHFSPRDWQRLINNNWGFRPKKLNFKLFNIQVKEVTQNDGTTTIANNLTSAVQVFTDSEYQLPYVLGSAHQGCLPPFPADVFMIPQYGYLTLNNGSQAVGRSSFYCLEYFPSQMLRTGNNFTFSYTFEDVPFHSSYAHSQSLDRLMNPLIDQYLYYLSKTQGTSGTTQQSRLQFSQAGPSSMAQQAKNWLPGPSYRQQRMSKTANDNNNSEFAWTAATKYYLNGRNSLVNPGPPVASHKDDEEKYFPMHGNLIFGKQGTGTTNVDIESVLITDEEEIRTTNPVATEQYGQVATNHQSQNTTASYGSVDSQGILPGMVWQDRDVYLQGPIWAKTPHTDGHFHPSPLMGGFGLKHPPPQILIKNTPVPANPATTFTPGKFASFITQYSTGQVSVEIEWELQKENSKRWNPEIQYTSNYNKSVNVEFTVDANGVYSEPRPIGTRYLTRNL

SEQ ID NO: 131 - DNA, 3123 bp, Adeno-associated virus
gaattcgccctttctacggctgcgtcaactggaccaatgaaaactttcccttcaacgattgcgtcgacaagatggtgatctggtgggaggagggaaagatgaccgccaaggtcgtggaatctgccaaagccattctgggtggaagcaaggttcgtgtggaccagaaatgcaagtcttcggcccagatcgacccgactccggtgattgtcacctctaacaccaacatgtgcgccgtgattgacggaaactcgaccaccttcgagcaccagcagccgttgcaagaccggatgttcaaatttgaacttacccgccgtttggatcatgactttgggaaggtcaccaagcaggaagtcaaagactttttccggtgggctcaagatcacgtgactgaggtggagcatgagttctacgtcaaaaagggtggagccaagaaaaggcccgcccccgatgatgtatatataaatgagcccaagcgggcgcgcgagtcagttgcgcagccatcgacgtcagacgcggaagcttcgataaactacgcgggcaggtaccaaaacaaatgttctcgtcacgtgggcatgaatctgatgctgtttccctgtcgacaatgcgaaagaatgaatcagaattcaaatatctgcttcacacacgggcaaaaagactgtttggaatgctttcccgtgtcagaatctcaacccgtttctgtcgtcagaaaaacgtatcagaaactttgttacattcatcatatcatgggaaaagaaccagacgcctgcactgcctgcgacctggtaaatgtggacttggatgactgtatttctgagcaataaatgacttaaatcaggtatggctgctgacggttatcttccagattggctcgaggacactctctctgaaggaatcagacagtggtggaagctcaaacctggcccaccaccgccgaaacctaaccaacaacaccgggacgacagtaggggtcttgtgcttcctgggtacaagtacctcggacccttcaacggactcgacaaaggagagccggtcaacgaggcagacgccgcggccctcgagcacgacaaagcctacgaccaccagctcaagcaaggggacaacccgtacctcaaatacaaccacgcggacgctgaatttcaggagcgtcttcaagaagatacgtctttcgggggcaacctcgggcgagcagtcttccaggccaaaaagagggtactcgagcctcttggtctggttgaggaagctgttaagacggctcctggaaaaaagagacctatagagcagtctcctgcagaaccggactcttcctcgggcatcggcgaatcaggccagcagcccgctaagaaaagactcaattttggtcagactggcgacacagagtcagtcccagaccctcaaccaatcggagaaccccccgcagccccctctggtgtgggatctaatacaatggcttcaggcggtggggcaccaatggcagacgataacgaaggcgccgacggagtgggtaattcctcgggaaattggcattgcgattccacatggatgggcgacagagttatcaccaccagcacaagaacctgggccctccccacctacaataatcacctctacaagcaaatctccagcgaatcgggagccaccaacgacaaccactacttcggctacagcaccccctgggggtattttgactttaacagattccactgtcacttctcaccacgtgactggcagcgactcatcaacaacaactggggatttagacccaagaaactcaatttcaagctcttcaacatccaagtcaaggaggtcacgcagaatgatggaaccacgaccatcgccaataaccttaccagcacggtgcaggtcttcacagactctgagtaccagctgccctacgtcctcggttcggctcaccagggctgccttccgccgttcccagcagacgtcttcatgattcctcagtacggctacttgactctgaacaatggcagccaagcggtaggacgttcttcattctactgtctagagtattttccctctcagatgctgaggacgggaaacaacttcaccttcagctacacttttgaagacgtgcctttccacagcagctacgcgcacagccagagtctggatcggctgatgaatcctctcattgaccagtacctgtattacctgagcaaaactcagggtacaagtggaacaacgcagcaatcgagactgcagttcagccaagctgggcctagctccatggctcagcaggccaaaaactggctaccgggacccagctaccgacagcagcgaatgtctaagacggctaatgacaacaacaacagtgaatttgcttggactgcagccaccaaatattacctgaatggaagaaattctctggtcaatcccgggcccccaatggccagtcacaaggacgatgaggaaaagtatttccccatgcacggaaatctcatctttggaaaacaaggcacaggaactaccaatgtggacattgaatcagtgcttattacagacgaagaagaaatcagaacaactaatcctgtggctacagaacaatacggacaggttgccaccaaccatcagagtcaggacaccacagcttcctatggaagtgtggacagccagggaatcttacctggaatggtgtggcaggaccgcgatgtctatcttcaaggtcccatttgggccaaaactcctcacacggacggacactttcatccttctccgctcatgggaggctttggactgaaacaccctcctccccagatcctgatcaaaaacacacctgtgccagcgaatcccgcgaccactttcactcctggaaagtttgcttcgttcattacccagtattccaccggacaggtcagcgtggaaatagagtgggagctgcagaaagaaaacagcaaacgctggaacccagaaattcagtacacctccaactacaacaagtcggtgaatgtggagtttaccgtggacgcaaacggtgtttattctgaaccccgccctattggcactcgttaccttacccggaacttgtaatttcctgttaatgaataaaccgatttatgcgtttcagttgaactttggtctctgcgaagggcgaattcgcggccgcta

SEQ ID NO: 132 - protein, 735 aa, Artificial Sequence
  Description of Artificial Sequence: Synthetic polypeptide
MAADGYLPDWLEDTLSEGIRQWWKLKPGPPPPKPNQQHRDDSRGLVLPGYKYLGPFNGLDKGEPVNEADAAALEHDKAYDHQLKQGDNPYLKYNHADAEFQERLQEDTSFGGNLGRAVFQAKKRVLEPLGLVEEAVKTAPGKKRPIEQSPAEPDSSSGIGESGQQPAKKRLNFGQTGDTESVPDPQPIGEPPAAPSGVGSNTMASGGGAPMADDNEGADGVGNSSGNWHCDSTWMGDRVITTSTRTWALPTYNNHLYKQISSESGATNDNHYFGYSTPWGYFDFNRFHCHFSPRDWQRLINNNWGFRPKKLNFKLFNIQVKEVTQNDGTTTIANNLTSTVQVFTDSEYQLPYVLGSAHQGCLPPFPADVFMIPQYGYLTLNNGSQAVGRSSFYCLEYFPSQMLRTGNNFTFSYTFEDVPFHSSYAHSQSLDRLMNPLIDQYLYYLSKTQGTSGTTQQSRLQFSQAGPSSMAQQAKNWLPGPSYRQQRMSKTANDNNNSEFAWTAATKYYLNGRNSLVNPGPPMASHKDDEEKYFPMHGNLIFGKQGTGTTNVDIESVLITDEEEIRTTNPVATEQYGQVATNHQSQDTTASYGSVDSQGILPGMVWQDRDVYLQGPIWAKTPHTDGHFHPSPLMGGFGLKHPPPQILIKNTPVPANPATTFTPGKFASFITQYSTGQVSVEIEWELQKENSKRWNPEIQYTSNYNKSVNVEFTVDANGVYSEPRPIGTRYLTRNL

SEQ ID NO: 133 - DNA, 3113 bp, Adeno-associated virus
gaattcgccctttctacggctgcgtcaactggaccaatgaaaactttcccttcaacgattgcgtcgacaagatggtgatctggtgggaggagggaaagatgaccgccaaggtcgtggaatctgccaaagccattctgggtggaagcaaggttcgtgtggaccagaaatgcaagtcttcggcccagatcgacccgactccggtgattgtcacctctaacaccaacatgtgcgccgtgattgacggaaactcgaccaccttcgagcaccagcagccgttgcaagaccggatgttcaaatttgaacttacccgccgtttggatcatgactttgggaaggtcaccaagcaggaagtcaaagactttttccggtgggctcaagatcacgtgactgaggtggagcatgagttctacgtcaaaaagggtggagccaagaaaaggcccgcccccgatgatgtatatataaatgagcccaagcgggcgcgcgagtcagttgcgcagccatcgacgtcagacgcggaagcttcgataaactacgcggacaggtaccaaaacaaatgttctcgtcacgtgggcatgaatctgatgctgtttccctgtcgacaatgcgaaagaatgaatcagaattcaaatatctgcttcacacacgggcaaaaagactgtttggaatgctttcccgtgtcagaatctcaacccgttcctgtcgtcagaaaaacgtatcagaaactttgttacattcatcatatcatgggaaaagtaccagacgcctgcactgcctgcgacctggtaaatgtggacttggatgactgtatttctgagcaataaatgacttaaatcaggtatggctgctgacggttatcttccagattggctcgaggacactctctctgaaggaatcagacagtggtggaagctcaaacctggcccaccaccgccgaaacctaaccaacaacaccgggacgacagtaggggtcttgtgcttcctgggtacaagtacctcggacccttcaacggactcgacaaaggagagccggtcaacgaggcagacgccgcggccctcgagcacgacaaagcctacgaccaccagctcaagcaaggggacaacccgtacctcaaatacaaccacgcggacgctgaatttcaggagcgtcttcaagaagatacgtctttcgggggcaacctcgggcgagcagtcttccaggccaaaaagagggtactcgagcctcttggtctggttgaggaagctgttaagacggctcctggaaaaaagagacctatagagcagtctcctgcagaaccggactcttcctcgggcatcggcaaatcaggccagcagcccgctaagaaaagactcaattttggtcagactggcgacacagagtcagtcccagaccctcaaccaatcggagaaccccccgcagccccctctggtgtgggatctaatacaatggcttcaggcggtggggcaccaatggcagacaataacgaaggcgccgacggagtgggtaattcctcgggaaattggcattgcgattccacatggatgggcgacagagttatcaccaccagcacaagaacctgggccctccccacctacaataatcacctctacaagcaaatctccagcgaatcgggagccaccaacgacaaccactacttcggctacagcaccccctgggggtattttgactttaacagattccactgtcacttctcaccacgtgactggcagcgactcatcaataacaactggggatttagacccaagaaactcaatttcaagctcttcaacatccaagtcaaggaggtcacgcagaatgatggaaccacgaccatcgccaataaccttaccagcacggtgcaggtcttcacagactctgagtaccagctgccctacgtcctcggttcggctcaccagggctgccttccgccgttcccagcagacgtcttcatgattcctcagtacggctacttgactctgaacaatggcagccaagcggtaggacgttcttcattctactgtctagagtattttccctctcagatgctgaggacgggaaacaacttcaccttcagctacacttttgaagacgtgcctttccacagcagctacgcgcacagccagagtctggatcggctgatgaatcctctcattgaccagtacctgtattacctgagcaaaactcagggtacaagtggaacaacgcagcaatcgagactgcagttcaaccaagctgggcctagctccatggctcagcaggccaaaaactggctaccgggacccagctaccgacagcagcgaatgtctaagacggctaatgacaacaacaacagtgaatttgcttggactgcagccaccaaatattacccgaatggaagaaattctctggtcaatcccgggcccccaatggccagtcacaaggacgatgaggaaaagtatttccccatgcacggaaatctcatctttggaaaacaaggcacaggaactaccaatgtggacattgaatcagtgcttattacagacgaagaagaaatcagaacgactaatcctgtggctacagaacaatacggacaggttgccaccaaccgtcagagtcagaacaccacagcttcctatggaagtgtggacagccagggaatcttacctggaatggtgtggcaggaccgcgatgtctatcttcaaggtcccatttgggccaaaactcctcacacggacggacactttcatccttctccgctcatgggaggctttggactgaaacaccctcctccccagatcctgatcaaaaacacacctgtgccagcgaatcccgcgaccactttcactcctggaaagtttgcttcgttcattacccagtattccaccggacaggtcagcgtggaaatagagtgggagctgcagaaagaaaacagcaaacgctggaacccggaaattcagtacacctccaactacaacaagtcggtgaatgtggagtttaccgtggacgcaaacggtgtttattctgaaccccgccctattggcactcgttaccttacccggaacttgtaatttcctgttaatgaataaaccgatttatgcgtttcagttgaactttggtctctgcgaagggcgaattc

SEQ ID NO: 134 - protein, 735 aa, Artificial Sequence
  Description of Artificial Sequence: Synthetic polypeptide
MAADGYLPDWLEDTLSEGIRQWWKLKPGPPPPKPNQQHRDDSRGLVLPGYKYLGPFNGLDKGEPVNEADAAALEHDKAYDHQLKQGDNPYLKYNHADAEFQERLQEDTSFGGNLGRAVFQAKKRVLEPLGLVEEAVKTAPGKKRPIEQSPAEPDSSSGIGKSGQQPAKKRLNFGQTGDTESVPDPQPIGEPPAAPSGVGSNTMASGGGAPMADNNEGADGVGNSSGNWHCDSTWMGDRVITTSTRTWALPTYNNHLYKQISSESGATNDNHYFGYSTPWGYFDFNRFHCHFSPRDWQRLINNNWGFRPKKLNFKLFNIQVKEVTQNDGTTTIANNLTSTVQVFTDSEYQLPYVLGSAHQGCLPPFPADVFMIPQYGYLTLNNGSQAVGRSSFYCLEYFPSQMLRTGNNFTFSYTFEDVPFHSSYAHSQSLDRLMNPLIDQYLYYLSKTQGTSGTTQQSRLQFNQAGPSSMAQQAKNWLPGPSYRQQRMSKTANDNNNSEFAWTAATKYYPNGRNSLVNPGPPMASHKDDEEKYFPMHGNLIFGKQGTGTTNVDIESVLITDEEEIRTTNPVATEQYGQVATNRQSQNTTASYGSVDSQGILPGMVWQDRDVYLQGPIWAKTPHTDGHFHPSPLMGGFGLKHPPPQILIKNTPVPANPATTFTPGKFASFITQYSTGQVSVEIEWELQKENSKRWNPEIQYTSNYNKSVNVEFTVDANGVYSEPRPIGTRYLTRNL

SEQ ID NO: 135 - DNA, 3122 bp, Adeno-associated virus
agcggccgcgaattcgccctttctacggctgcgtcaactggaccaatgaaaactttcccttcaacgattgcgtcgacaagatggtgatctggtgggaggagggaaagatgaccgccaaggtcgtggaatctgccaaagccattctgggtggaagcaaggttcgtgtggaccagaaatgcaggtcttcggcccagatcgacccgactccggtgattgtcacctctaacaccaacatgtgcgccgtgattgacggaaactcgaccaccttcgagcaccagcagccgttgcaagaccggatgttcaaatttgaacttacccgccgtttggatcatgactttgggaaggtcaccaagcaggaagtcaaagactttttccggtgggctcaagatcacgtgactgaggtggagcatgagttctacgtcaaaaagggtggagccaagaaaaggcccgcccccgatgatgtatatataaatgagcccaagcgggcgcgcgagtcagttgcgcagccatcgacgtcagacgcggaagcttcgataaactacgcggacaggtaccaaaacaaatgttctcgtcacgtgggcatgaatctgatgctgtttccctgtcgacaatgcgaaagaatgaatcagaattcaaatatctgcttcacacacgggcaaaaagactgtttggaatgctttcccgtgtcagaatctcaacccgtttctgtcgtcagaaaaacgtatcagaaactttgttacattcatcatatcatgggaaaagtaccagacgcctgcactgcctgcgacctggtaaatgtggacttggatgactgtatttctgagcaataaatgacttaaatcaggtatggctgctgacggttatcttccagattggctcgaggacactctctctgaaggaatcagacagtggtggaagctcaaacctggcccaccaccgccgaaacctaaccaacaacaccgggacgacagtaggggtcttgtgcttcctgggtacaagtacctcggacccttcaacggactcgacaaaggagagccggtcaacgaggcagacgccgcggccctcgagcacgacaaagcctacgaccaccagctcaagcaaggggacaacccgtacctcaaatacaaccacgcggacgctgaatttcaggagcgtcttcaagaagatacgtctttcgggggcaacctcgggcgagcagtcttccaggccaaaaagagggtactcgagcctcttggtctggttgaggaagctgttaagacggctcctggaaaaaagagacctatagagcagtctcctgcagaaccggactcttcctcgggcatcggcaaatcaggccagcagcccgctaagaaaagactcaattttggtcagactggcgacacagagtcagtcccagaccctcaaccaatcggagaaccccccgcagccccctctggtgtgggatctaatacaatggcttcaggcggtggggcaccaatggcagacaataacgaaggcgccgacggagtgggtaattcctcgggaaattggcattgcgattccacatggatgggcgacagagttatcaccaccagcacaagaacctgggccctccccacctacaataatcgcctctacaagcaaatctccagcgaatcgggagccaccaacgacaaccactacttcggctacagcaccccctgggggtattttgactttaacagattccactgtcacttctcaccacgtgactggcagcgactcatcaacaacaactggggatttagacccaagaaactcaatttcaagctcttcaacatccaagtcaaggaggtcacgcagaatgatggaaccacgaccatcgccaataaccttaccagcacggtgcaggtcttcacagactctgagtaccagctgccctacgtcctcggttcggctcaccagggctgccttccgccgttcccagcagacgtcttcatgattcctcagtacggctacttgactctgaacaatggcagccaagcggtaggacgttcttcattctactgtctagagtattttccctctcagatgctgaggacgggaaacaacttcaccttcagctacacttttgaagacgtgcctttccacagcagctacgcgcacagccagagtctggatcggctgatgaatcctctcattgaccagtacctgtattacctgagcaaaactcagggtacaagtggaacaacgcagcaatcgagactgcagttcagccaagctgggcctagctccatggctcagcaggccaaaaactggctaccgggacccagctaccgacagcagcgaatgtctaagacggctaatgacaacaacaacagtgaatttgcttggactgcagccaccaaatattacctgaatggaagaaattctctggtcaatcccgggcccccaatggccagtcacaaggacgatgaggaaaagtatttccccatgcacggaaatctcatctttggaaaacaaggcacaggaactaccaatgtggacattgaatcagtgcttattacagacgaagaagaaatcagaacaactaatcctgtggctacagaacaatacggacaggttgccaccaaccatcagagtcagaacaccacagcttcctatggaagtgtggacagccagggaatcttacctggaatggtgtggcaggaccgcgatgtctatcttcaaggtcccatttgggccaaaactcctcacacggacggacactttcatccttctccgctcatgggaggctttggactgaaacaccctcctccccagatcctgatcaaaaacacacctgtgccagcgaatcccgcgaccactttcactcctggaaagtttgcttcgttcattacccagtattccaccggacaggtcagcgtggaaatagagtgggagctgcagaaagaaaacagcaaacgctggaacccagaaattcagtacacctccaactacaacaagtcggtgaatgtggagtttaccgtggacgcaaacggtgtttattctgaaccccgccctattggcactcgttaccttacccggaacttgtaatttcctgttaatgaataaaccgatttatgcgtttcagttgaactttggtctctgcgaagggcgaattc

SEQ ID NO: 136 - protein, 735 aa, Artificial Sequence
  Description of Artificial Sequence: Synthetic polypeptide
MAADGYLPDWLEDTLSEGIRQWWKLKPGPPPPKPNQQHRDDSRGLVLPGYKYLGPFNGLDKGEPVNEADAAALEHDKAYDHQLKQGDNPYLKYNHADAEFQERLQEDTSFGGNLGRAVFQAKKRVLEPLGLVEEAVKTAPGKKRPIEQSPAEPDSSSGIGKSGQQPAKKRLNFGQTGDTESVPDPQPIGEPPAAPSGVGSNTMASGGGAPMADNNEGADGVGNSSGNWHCDSTWMGDRVITTSTRTWALPTYNNRLYKQISSESGATNDNHYFGYSTPWGYFDFNRFHCHFSPRDWQRLINNNWGFRPKKLNFKLFNIQVKEVTQNDGTTTIANNLTSTVQVFTDSEYQLPYVLGSAHQGCLPPFPADVFMIPQYGYLTLNNGSQAVGRSSFYCLEYFPSQMLRTGNNFTFSYTFEDVPFHSSYAHSQSLDRLMNPLIDQYLYYLSKTQGTSGTTQQSRLQFSQAGPSSMAQQAKNWLPGPSYRQQRMSKTANDNNNSEFAWTAATKYYLNGRNSLVNPGPPMASHKDDEEKYFPMHGNLIFGKQGTGTTNVDIESVLITDEEEIRTTNPVATEQYGQVATNHQSQNTTASYGSVDSQGILPGMVWQDRDVYLQGPIWAKTPHTDGHFHPSPLMGGFGLKHPPPQILIKNTPVPANPATTFTPGKFASFITQYSTGQVSVEIEWELQKENSKRWNPEIQYTSNYNKSVNVEFTVDANGVYSEPRPIGTRYLTRNL

SEQ ID NO: 137 - DNA, 3121 bp, Adeno-associated virus
gaattcgcccttcgcagagaccaaagttcaactgaaacgaatcaaccggtttattgattaacaagcaattacagattacgggtgaggtaacgggtgccgatggggcgaggctcagaataagtgccatctgtgttaacagcaaagtccacatttgtagatttgtagtagttggaagtgtattgaatctctgggttccagcgtttgctgttttctttctgcagctcccattcaatttccacgctgacctgtccggtgctgtactgcgtgatgaacgacgccagcttagcttgactgaaggtagttggaggatccgcgggaacaggtgtattcttaatcaggatctgaggaggcgggtgtttcagtccaaagccccccatcagcggcgagggatgaaagtttccgtccgtgtgaggaatcttggcccagataggaccctgcaggtacacgtcccggttctgccagaccatgccaggtaaggctccttgactgttgacggcccctacaataggagcggcgttttgctgttgcaggttatcggccaccacgccgtactgttctgtggccactgggttggtggttttaatttcttcctcactggttagcataacgctgctatagtccacgttgccttttccagctccctgtttcccaaacattaagactccgctggacggaaaaaatcgctcttcgtcgtccttgtgggttgccatagcgacaccgggatttaccagagagtctctgccattcagatgatacttggtggcaccggtccaggcaaagttgctgttgttattttgcgacagtgtcgtggagacgcgttgctgccggtagcagggcccgggtagccagtttttggcctgagccgacatgttattaggcccggcctgagaaaatagcaactgctgagttcctgcggtacctcccgtggactgagtccgagacaggtagtacaggtactggtcgatgagggggttcatcagccggtccaggctttggctgtgcgcgtagctgctgtgaaaaggcacgtcctcaaactggtagctgaactcaaagttgttgcccgttctcagcatttgagaaggaaagtactccaggcagtagaaggaggaacggcccacggcctgactgccattgttcagagtcaggtacccgtactgaggaatcatgaagacgtccgccgggaacggaggcaggcagccctggcgcgcagagccgaggacgtacgggagctggtattccgagtccgtaaagacctgaatcgtgctggtaaggttattggcgatggtcttggtgccttcattctgcgtgacctccttgacctggatgttgaagagcttgaagttgagtctcttgggccggaatccccagttgttgttgatgagtcgctgccagtcacgtggtgagaagtggcagtggaatctgttaaagtcaaaatacccccagggggtgctgtagccgaagtaggtgttgtcgttggtgcttcctcccgaagtcccgttggagatttgcttgtagaggtggttgttgtaggtggggagggcccaggttcgggtgctggtggtgatgactctgtcgcccagccatgtggaatcgcaatgccaatttcctgaggaactacccactccgtcggcgccttcgttattgtctgccattggagcgccaccgcctgcagccattgtaccagatcccagaccagaggggcctgcggggggttctccgattggttgagggtcgggcactgactctgagtcgccagtctgcccaaagttgagtctctttttcgcgggctgctggcctttcttgccgatgcccgtagtggagtctggagaacgctggggtgatggctctaccggtctcttctttccaggagccgtcttagcgccttcctcaaccagaccgagaggttcgagaacccgcttcttggcctggaagactgctcgtccgaggttgcccccaaaagacgtatcttcttgcagacgctcctgaaactcggcgtcggcgtggttataccgcaggtacggattgtcacccgctttgagctgctggtcgtaggccttgtcgtgctcgagggccgctgcgtccgccgcgttgacgggctcccccttgtcgagtccgttgaagggtccgaggtacttgtagccaggaagcaccagaccccggccgtcgtcctgcttttgctggttggctttgggcttcggggctccaggtttcagcgcccaccactcgcgaatgccctcagagaggttgtcctcgagccaatctggaagataaccatcggcagccatacctgatctaaatcatttattgttcaaagatgcagtcatccaaatccacattgaccagatcgcaggcagtgcaagcgtctggcacctttcccatgatatgatgaatgtagcacagtttctgatacgcctttttgacgacagaaacgggttgagattctgacacgggaaagcactctaaacagtctttctgtccgtgagtgaagcagatatttgaattctgattcattctctcgcattgtctgcagggaaacagcatcagattcatgcccacgtgacgagaacatttgttttggtacctgtccgcgtagttgatcgaagcttccgcgtctgacgtcgatggctgcgcaactgactcgcgcacccgtttgggctcacttatatctgcgtcactgggggcgggtcttttcttggctccaccctttttgacgtagaattcatgctccacctcaaccacgtgatcctttgcccaccggaaaaagtctttgacttcctgcttggtgaccttcccaaagtcatgatccagacggcgggtgagttcaaatttgaacatccggtcttgcaacggctgctggtgttcgaaggtcgttgagttcccgtcaatcacggcgcacatgttggtgttggaggtgacgatcacgggagtcgggtctatctgggccgaggacttgcatttctggtccacgcgcaccttgcttcctccgagaatggctttggccgactccacgaccttggcggtcatcttcccctcctcccaccagatcaccatcttgtcgacacagtcgttgaagggaaagttctcattggtccagttgacgcagccgtagaagggcgaattc

SEQ ID NO: 138 - protein, 733 aa, Artificial Sequence
  Description of Artificial Sequence: Synthetic polypeptide
MAADGYLPDWLEDNLSEGIREWWDLKPGAPKLKANQQKQDDGRGLVLPGYKYLGPFHGLDKGEPVNAADAAALEHDKAYDQQLKAGDNPYLRYNHADAEFQERLQEDTSFGGNLGRAVFQAKKRVLEPLGLVEEGAKTAPGKKRPLESPQEPDSSSGIGKKGKQPAKKRLNFEEDTGAGDGPPEGSDTSAMSSDIEMRAAPGGNAVDAGQGSDGVGNASGDWHCDSTWSEGKVTTTSTRTWVLPTYNNHLYLRLGTTSNSNTYNGFSTPWGYFDFNRFHCHFSPRDWQRLINNNWGLRPKAMRVKIFNIQVKEVTTSNGETTVANNLTSTVQIFADSSYELPYVMDAGQEGSLPPFPNDVFMVPQYGYCGIVTGENQNQTDRNAFYCLEYFPSQMLRTGNNFEMAYNFEKVPFHSMYAHSQSLDRLMNPLLDQYLWHLQSTTSGETLNQGNAATTFGKIRSGDFAFYRKNWLPGPCVKQQRFSKTASQNYKIPASGGNALLKYDTHYTLNNRWSNIAPGPPMATAGPSDGDFSNAQLIFPGPSVTGNTTTSANNLLFTSEGEIAATNPRDTDMFGQIADNNQNATTAPITGNVTAMGVLPGMVWQNRDIYYQGPIWAKIPHADGHFHPSPLIGGFGLKHPPPQIFIKNTPVPANPATTFTAARVDSFITQYSTGQVAVQIEWEIEKERSKRRNPEVQFTSNYGNQSSMLWAPDTTGKYTEPRVIGSRYLTNHL

SEQ ID NO: 139 - protein, 735 aa, Adeno-associated virus
MAADGYLPDWLEDTLSEGIRQWWKLKPGPPPPKPNQQHRDDSRGLVLPGYKYLGPFNGLDKGEPVNEADAAALEHDKAYDHQLKQGDNPYLKYNHADAEFQERLQEDTSFGGNLGRAVFQAKKRVLEPLGLVEEAVKTAPGKKRPIEQSPAEPDSSSGIGKSGQQPAKKRLNFGQTGDTESVPDPQPIGEPPAAPSGVGSNTMASGGGAPMADNNEGADGVGNSSGNWHCDSTWMGDRVITTSTRTWALPTYNNHLYKQISSESGATNDNHYFGYSTPWGYFDFNRFHCHFSPRDWQRLINNNWGFRPKKLNFKLFNIQVKEVTQNDGTTTIANNLTSTVQVFTDSEYQLPYVLGSAHQGCLPPFPADVFMIPQYGYLTLNNGSQAVGRSSFYCLEYFPSQMLRTGNNFTFSYTFEDVPFHSSYAHSQSLDRLMNPLIDQYLYYLSKTQGTSGTTQQSRLQFSQAGPSSMAQQAKNWLPGPSYRQQRMSKTANDNNNSEFAWTAATKYYLNGRNSLVNPGPPMASHKDDEEKYFPMHGNLIFGKQGTGTTNVDIESVLITDEEEIRTTNPVATEQYGQVATNHQSQNTTASYGSVDSQGILPGMVWQDRDVYLQGPIWAKIPHTDGHFHPSPLMGGFGLKHPPPQILIKNTPVPANPATTFTPGKFASFITQYSTGQVSVEIEWELQKENSKRWNPEIQYTSNYNKSVNVEFTVDANGVYSEPRPIGTRYLTRNL

SEQ ID NO: 140 - DNA, 3127 bp, Adeno-associated virus
gcggccgcgaattcgcccttcgcagagaccaaagttcaactgaaacgaatcaaccggtttattgattaacatgcaattacagattacgggtgaggtaacgagtgccaatagggcgaggctcagagtaaacaccctggctgtcaacggcaaagtccacaccagtctgcttttcaaagttggaggtgtactgaatctccgggtcccagcgcttgctgttttccttctgcagctcccactcgatttccacgctgacttgtccggtgctgtactgtgtgatgaacgaagcaaacttggcaggagtaaacacctccggaggattagcgggaacgggagtgttcttgatcaggatctgaggaggcggatgtttaagtccaaagccgcccatcaaaggagacgggtgaaagttgccatccgtgtgaggaatcttggcccagatgggaccctgcaggtacacgtcccggttctgccagaccatgccaggtaaggctccctggttgttgacaacttgtgtctgggctgcagtattagccgcttgtaagttgctgctgactatcccgtattcttccgtggctacaggattagtaggacgaatttcttcttcatttgtcattaacacattttccaatgtagttttgttagttgctccagtttttccaaaaatcaggactccgctggatgggaaaaagcggtcctcgtcgtccttgtgagttgccatggcgacgccgggattaaccaacgagtttctgccgttcaggtgatatttggtggcaccagtccaagcaaagttgctgttgttgttttgatccagcgttttggagaccctttgttgccggaagcagggtccaggtaaccaattcttggcttgttcggccatagttgaaggcccgccctggtaaaactgcagttcccgattgccagctgtgcctcctgggtcactctgtgttctggccaggtagtacaagtactggtcgatgaggggattcatcagccggtccaggctctggctgtgtgcgtagctgctgtggaaaggcacgtcctcgaagctgtagctgaactcaaagttgttgcccgttctcagcatctgagaggggaagtactccaggcagtagaaggaggaacgtcccacagactgactgccattgttgagagtcaggtagccgtactgaggaatcatgaagacgtccgccgggaacggaggcaggcagccctggtgcgcagagccgaggacgtacggcagctggtattccgagtccgagaatacctgaatcgtgctggtaaggttattagcgatggtcgtaacgccgtcattcgtcgtgacctccttgacctggatgttgaagagcttgaaccgcagcttcttgggccggaatccccagttgttgttgatgagtcgctgccagtcacgtggtgagaagtggcagtggaatctgttaaagtcaaaatacccccagggggtgctgtagccgaagtaggtgttgtcgttggtactacctgcagtttcactggagatttgctcgtagaggtggttgttgtaggtgggcagggcccaggttcgggtgctggtggtaatgactctgtcgcccagccatgtggaatcgcaatgccaatttcctgaggcattacccactccgtcggcaccttcgttattgtctgccattggtgcgccaccgcctgcagccactgtaccagatcccacactagagggcgctgctggaggttctccgagaggttgagggtcggggactgactctgagtcgccagtctgaccgaaattgagtctctttctggcgggctgctggcccttcttgccgatgcccgtggaggagtcgggggaacgctgaggtgacggctctaccggtctcttctttgcaggagccgtcttagcgccttcctcaaccagaccgagaggttcgagaacccgcttcttggcctggaagactgctcgcccgaggttgcccccaaatgacgtatcttcttgcagacgctcctgaaactcggcgtcggcgtggttataccgcaggtacgggttgtcacccgcattgagctgctggtcgtaggccttgtcgtgctcgagggccgctgcgtccgccgcgttgacgggctcccccttgtcgagtccgttgaagggtccgaggtacttgtagccaggaagcaccagaccccggccgttgtcctgcttttgctggttggctttgggtttcggggctccaggtttcaggtcccaccactcgcgaatgccctcagagaggttgtcctcgagccaatctggaagataaccatcggcagccatacctgatttaaatcatttattgttcaaagatgcagtcatccaaatccacattgaccagatcgcaggcagtgcaagcgtctggcacctttcccatgatatgatgaatgtagcacagtttctgatacgcctttttgacgacagaaacgggtttagattctgacacgggaaagcactctaaacagtctttctgtccgtgagtgaagcagatatttgaattctgattcattctctcgcattgtctgcagggaaacagcatcagattcatgcccacgtgacgagaacatttgttttggtacctgtctgcgtagttgatcgaagcttccgcgtctgacgtcgatggctgcgcaactgactcgcgcacccgtttgggctcacttatatctgcgtcactgggggcgggtcttttcttggctccaccctttttgacgtagaattcatgctccacctcaaccacgtaatcctttgcccaccggaaaaagtctttgacttcctgcttggtgaccttcccaaagtcatgatccagacggcgggtgagttcaaatttgaacatccggtcttgcaacggctgctggtgttcgaaggtcgttgagttcccgtcgatcacggcgcacatgttggtgttggagatgacgatcgcgggagtcgggtctatctgggccgaggacttgcatttctggtccacgcgcaccttgcttcctccgagaatggctttggccgactccacgaccttggcggtcatcttcccctcctcccaccagatcaccatcttgtcgacacagtcgttgaagggaaagttctcattggtccagttgacgcagccgtagaaagggcgaattc

SEQ ID NO: 141 - protein, 728 aa, Artificial Sequence
  Description of Artificial Sequence: Synthetic polypeptide
MAADGYLPDWLEDNLSEGIREWWDLKPGAPKPKANQQKQDDGRGLVLPGYKYLRPFNGLDKGEPVNEADAAALEHDKAYDKQLEQGDNPYLKYNHADAEFQERLQEDTSFGGNLGRAVFQAKKRVLEPLGLVEEVAKTAPGKKRPIESPDSSTGIGKKGQQPAKKKLNFGQTGDSESVPDPQPLGEPPAAPSGLGSGTMAAGGGAPMADNNEGADGVGNASGNWHCDSTWLGDRVITTSTRTWALPTYNNHLYKQISSQSGATNDNHFFSYSTPWGYFDFNRFHCHFSPRDWQRLINNNWGFRPRKLRFKLFNIQVKEVTTNDGVTTIANNLTSTIQVFSDSEYQLPYVLGSAHQGCLPPFPADVFMIPQYGYLTLNNGSQSVGRSSFYCLEYFPSQMLRTGNNFEFSYTFEEVPFHSSYVHSQSLDRLMNPLIDQYLYYLARTQSTTGSTRELQFHQAGPNTMAEQSKNWLPGPCYRQQRLSKNIDSNNNSNFAWTGATKYHLNGRNSLTNPGVAMATNKDDEDQFFPINGVLVFGKTGAANKTTLENVLMTSEEEIKTTNPVATEEYGVVSSNLQSSTAGPQTQTVNSQGALPGMVWQNRDVCLQGPIWAKIPHTDGNFHPSPLMGGFGLKHPPPQILIKNTPVPANPPEVFTPAKFASFITQYSTGQVSVEIEWELQKENSKRWNPEIQYTSNYAKSNNVEFAVNNEGVYTEPRPIGTRYLTRNL

SEQ ID NO: 142 - DNA, 3106 bp, Adeno-associated virus
gcggccgcgaattcgcccttcgcagagaccaaagttcaactgaaacgaatcaaccggtttattgattaacaagtaattacaggttacgggtgaggtaacgggtgccaatggggcgaggctcagtataaaccccttcgttgttgacagcaaattccacattattagacttggcataatttgaggtgtactgaatctctggattccagcgtttgctgttttctttctgcagttcccactcgatctccacgctgacctggccggtgctgtactgcgtgataaatgaggcaaacttggcaggagtaaacacctctggaggattagcaggtaccggggtgtttttgatgagaatttgaggaggcgggtgtttgagtccaaatccgcccatcaggggagacgggtgaaagttgccgtccgtgtgaggaattttggcccagatgggaccctgcaggcacacgtcccggttctgccagaccatgccgggcagagccccctggctgttgacagtctgtgtctggggtccggccgtagacgattgcaggttgctggagaccacaccgtattcttctgtagccacgggattggtggttttgatctcctcctcgctggtcattagcacgttttccagcgttgtcttgttggcagcccccgttttgccaaaaaccagcactccgttgatgggaaagaactggtcctcgtcgtccttgttggtggccatggctacgcccgggttggttaatgaatttctaccattcagatggtatttagtggccccggtccaggcaaagttactgttgttgttgctgtctatgttttttgacagtctctgctgccgataacagggtccgggcagccagttctttgattgctcggccatggtgttgggcccagcctgatggaactgcagctcccttgtggaccccgtagtgctctgggtccgggccaggtagtacaggtactggtcgatgaggggattcatcagccggtctaggctctggctgtgcacatagctgctgtggaaaggcacttcctcaaaggtgtagctgaattcaaagttattgcccgttctcagcatctgagaaggaaagtactccaggcagtagaaggaggaacgtcccacagactgactgccgttgtttagagtcagatatccgtactgaggaatcatgaacacgtccgcagggaacggagggaggcagccctggtgcgcagagccgaggacgtacggcagttggtactccgagtccgagaagacctgaatcgtgctggtaaggttattagcgatggtcgtaacgccgtcgttcgtcgtgacctccttgacctggatgttgaacaacttgaaccgcagctttctgggccggaatccccagttgttgttgatgagtcgctgccagtcacgtggtgagaagtggcagtggaatctgttgaagtcaaaatagccccagggggtgctgtagctgaagaagtggttgtcgttggtagccccgctctgacttgatatctgcttgtagaggtggttgttgtaggtgggcagggcccaggtgcgggtgctggtggtgatgactctgtcgcccagccatgtggaatcgcaatgccaatttccggaggcattacccactccgtcggcgccttcgttattgtctgccattggtgcgccaccgcctgcagccattgtaccagatcccagacctgagggcgcggcgggaggttctccgagaggttgggggtcgggcactgactctgagtcgccagtctgcccaaagttgagcttctttttagcgggctgctggcctttcttgccgatgcccgtggaggagtcgggggattctatgggtctcttctttccaggagccgtcttagcgacttcctcaaccagaccgagaggttcgagaacccgcttcttggcctggaagactgctcgcccgaggttgcccccaaaagacgtatcttcttgaagacgctcctgaaactcggcgtcggcgtggttgtacttgaggtacgggttgtccccctgctcgagctgcttgtcgtaggccttgtcgtgctcgagggccgcggcgtctgcctcgttgaccggctctcccttgtcgagtccgttgaagggtctgaggtacttgtagccaggaagcaccagaccccggccgtcgtcctgcttttgctggttggctttgggtttcggggctccaggtttcaagtcccaccactcgcgaatgccctcagagaggttgtcctcgagccaatctggaagataaccatcggcagccatacctggtttaagtcatttattgctcagaaacacagtcatccaggtccacgttgaccagatcgcaggccgagcaagcaatctcgggagcccgccccagcagatgatgaatggcacagagtttccgatacgtcctctttctgacgaccggttgagattctgacacgccggggaaacattctgaacagtctctggtcccgtgcgtgaagcaaatgttgaaattctgattcactctctcgcatgtcttgcagggaaacagcatctgaagcatgcccgcgtgacgagaacatttgttttggtacctgtcggcaaagtccaccggagctccttccgcgtctgacgtcgatggattcgcgactgaggggcaggcccgcttgggctcgcttttatccgcgtcatcgggggcgggtctcttgttggccccaccctttctgacgtagaacccatgcgccacctcggtcacgtgatcctgcgcccagcggaagaaccttttgacttcctgctttgtcaccttgccaaagttatgctccagacggcgggtgggttcaaatttgaacatccggtcctgcaacggctgctggtgctcgaaggtggcgctgttcccgtcaatcacggcgcacatgttggtgttggaggtgacggtcacgggggtggggtcgatctgggcggacgacttgcacttttggtccacgcgcaccttgctgccgccgagaatggccttggcggactccacgaccttggccgtcatcttgccctcctcccaccagatcaccatcttgtcggcgcaatcgttgaagggaaagttctcattggtccagttgacgcagccgtagaaagggcgaattc

SEQ ID NO: 143 - protein, 728 aa, Artificial Sequence
  Description of Artificial Sequence: Synthetic polypeptide
MAADGYLPDWLEDNLSEGIREWWDLKPGAPKPKANQQKQDDGRGLVLPGYKYLGPFNGLDKGEPVNEADAAALEHDKAYDKQLEQGDNPYLKYNHADAEFQERLQEDTSFGGNLGRAVFQAKKRVLEPLGLVEEGAKTASGKKRPIESPDSSTGIGKKGQQPAKKKLNFGQTGDSESVPDPQPLGEPPAAPSGLGSGTMAAGGGAPMADNNEGADGVGNASGNWHCDSTWLGDRVITTSTRTWALPTYNNHLYKQISSQSGATNDNHFFGYSTPWGYFDFNRFHCHFSPRDWQRLINNNWGFRPRKLRFKLFNIQVKEVTTNDGVTTIANNLTSTIQVFSDSEYQLPYVLGSAHQGCLPPFPADVFMIPQYGYLTLNNGSQSVGRSSFCCLEYFPSQMLRTGNNFEFSYTFEEVPFHSSYAHSQSLDRLMNPLIDQYLYYLARTQSTTGSTRELQFHQAGPNTVAEQSKNWLPGPCYRQQRLSKNIDSNNNSNFAWTGATKYHLNGRNSLTNPGVAMATNKDDEDQFLPINGVLVFGKTGAANKTTLENVLMTSEEEIKTTNPVATEEYGVVSSNLQSSTAGPRTQTVNSQGALPGMVWQNRDVYLQGPIWAEIPHTDGNFHPSPLMGGFGLKHPPPQILIKNTPVPANPPEVFTPAKFASFITQYSTGQVSVEIEWELQKENSKRWNPEIQYTSNYAKSNNVEFAVNNEGVYTEPRPIGTRYLTRNL

SEQ ID NO: 144 - DNA, 3102 bp, Adeno-associated virus
gcggccgcgaattcgcccttcgcagagaccaaagttcaactgaaacgaatcaaccggtttattgattaacaagtaattacaggttacgggtgaggtaacgggtgccaatggggcgaggctcagtataaaccccttcgttgttgacagcaaattccacattattagacttggcataatttgaggtgtactgaatctctggattccagcgtttgctgttttctttctgcagttcccactcgatctccacgctgacctggccggtgctgtactgcgtgataaatgaggcaaacttggcaggagtaaacacctctggaggattagcaggtaccggggtgtttttgatgagaatttgaggaggcgggtgtttgagtccaaatccgcccatcaggggagacgggtgaaagttgccgtccgtgtgaggaatttcggcccagatgggaccctgcaggtacacgtcccggttctgccagaccatgccgggcagagccccctggctgttgacagtctgtgtccggggtccggccgtagacgattgcaggttgctggagaccacaccgtattcttctgtagccacgggattggtggttttgatctcctcctcgctggtcattagcacgttttccagcgttgtcttgttggcagcccccgttttgccaaaaaccagcactccgttgatgggaaggaactggtcctcgtcgtccttgttggtggccatggctacgcccgggttggttaatgaatttctaccattcagatggtatttagtggccccggtccaggcaaagttactgttgttgttgctgtctatgttttttgacagtctctgctgccgataacagggtccgggcagccagttctttgattgctcggccacggtgttgggcccagcctgatggaactgcagctcccttgtggaccccgtagtgctctgggtccgggccaggtagtacaggtactggtcgatgaggggattcatcagccggtccaggctctggctgtgcgcatagctgctgtggaaaggcacttcctcaaaggtgtagctgaattcaaagttattgcccgttctcagcatctgagaaggaaagtactccaggcagcagaaggaggaacgtcccacagactgactgccgttgtttagagtcagatatccgtactgaggaatcatgaacacgtccgcagggaacggagggaggcagccctggtgcgcagagccgaggacgtacggcagttggtactccgagtccgagaagacctgaatcgtgctggtaaggttattagcgatggtcgtaacgccgtcgttcgtcgtgacctccttgacctggatgttgaacaacttgaaccgcagctttctgggccggaatccccagttgttgttgatgagtcgctgccagtcacgtggtgagaagtggcagtggaatctgttgaagtcaaaatagccccagggggtgctgtagccgaagaagtggttgtcgttggtagccccgctctgacttgatatctgcttgtagaggtggttgttgtaggtgggcagggcccaggtgcgggtgctggtggtgatgactctgtcgcccagccatgtggaatcgcaatgccaatttccggaggcattacccactccgtcggcgccttcgttattgtctgccattggtgcgccaccgcctgcagccattgtaccagatcccagacctgagggcgcggcgggaggttctccgagaggttgggggtcgggcactgactctgagtcgccagtctgcccaaagttgagcttctttttagcgggctgctggcctttcttgccgatgcccgtggaggagtcgggggattctatgggtctcttctttccggaagccgtcttagcgccttcctcaaccagaccgagaggttcgagaacccgcttcttggcctggaagactgctcgcccgaggttgcccccaaaagacgtatcttcttgaagacgctcctgaaactcggcgtcggcgtggttgtacttgaggtacgggttgtccccctgctcgagctgcttgtcgtaggccttgtcgtgctcgagggccgcggcgtctgcctcgttgaccggctctcccttgtcgagtccgttgaagggtccgaggtacttgtagccaggaagcaccagaccccggccgtcgtcctgcttttgctggttggctttgggtttcggggctccaggtttcaagtcccaccactcgcgaatgccctcagagaggttgtcctcgagccaatctggaagataaccatcggcagccatacctggtttaagtcatttattgctcagaaacacagtcatccaggtccacgttgaccagatcgcaggccgagcaagcaatctcgggagcccgccccagcagatgatgaatggcacagagtttccgatacgtcctctttctgacgaccggttgagattctgacacgccggggaaacattctgaacagtctctggtcccgtgcgtgaagcaaatgttgaaattctgattcattctctcgcatgtcttgcagggaaacagcatctgaagcatgcccgcgtgacgagaacatttgttttggtacctgtcggcaaagtccaccggagctccttccgcgtctgacgtcgatggatccgcgactgaggggcaagcccgcttgggctcgcttttatccgcgtcatcgggggcgggtctcttgttggctccaccctttctgacgtagaactcatgcgccacctcggtcacgtgatcctgcgcccagcggaagaactctttgacttcctgctttgtcaccttgccaaagtcatgctccagacggcgggtgagttcaaatttgaacatccggtcttgtaacggctgctggtgctcgaaggtggtgctgttcccgtcaatcacggcgcacatgttggtgttggaagtgacgatcacgggggtgggatcgatctgggcggacgacttgcacttttggtccacgcgcaccttgctgccgccgagaatggccttggcggactccacgaccttggccgtcatcttgccctcctcccaccagatcaccatcttgtcgacgcaatcgttgaagggaaagttctcattggtccagttgacgcagccgaagggcgaattc

SEQ ID NO: 145 - protein, 728 aa, Adeno-associated virus
MAADGYLPDWLEDNLSEGIREWWDLKPGAPKPKANQQKQDDGRGLVLPGYRYLGPFNGLDKGEPVNEADAAALEHDKAYDKQLEQGDNPYLKYNHADAEFQERLQEDTSFGGNLGRAVFQAKKRVLEPLGLVEEGAKTAPGKKRPIESPDSSTGIGKNGQPPAKKKLNFGQTGDSESVPDPQPLGEPPAAPSGLGSGTMAAGGGAPMADNNEGADGVGNASGNWHCDSTWLGDRVITTSTRTWALPTYNNHLYKQISSQSGATNDNHFFGYSTPWGYFDFNRFHCHFSPRDWQRLINNNWGFRPRKLRFKLFNIQVKEVTTNDGVTTIANNLTSTIQVFSDSEYQLPYVLGSAHQGCLPPFPADVFMIPQYGYLTLNNGSQSVGRSSFYCLEYFPSQMLRTGNNFEFSYTFEEVPFHSSYAHSQSLDRLMNPLIDQYLYYLARTQSTTGSTRELQFHQAGPNTMAEQSKNWLPGPCYRQQRLSKNIDSNNNSNFAWTGATKYHLNGRNSLTNPGVAMATNKDDEDQFFPINGVLVFGKTGAANKTTLENVLMTSEEEIKTTNPVATEEYGVVSSNLQSSTAGPQTQTVNSQGALPGMVWQNRDVYLQGPIWAKIPHTDGNFHPSPLMGGFGLKHPPPQILIKNTPVPANPPEVFTPAKFASFITQYSTGQVSVEIEWELQKENSKRWNPEIQYTSNYAKSNNVEFAVNNEGVYTEPRPIGTRYLTRNL

SEQ ID NO: 146 - protein, 728 aa, Artificial Sequence
  Description of Artificial Sequence: Synthetic polypeptide
MAADGYLPDWLEGNLSEGIREWWDLKPGAPKPKANQQKQDDGRGLVLPGYRYLGPFNGLDKGEPVNEADAAALEHDKAYDKQLEQGDNPYLKYNHADAEFQERLQEDTSFGGNLGRAVFQAKKRVLEPLGLVEEGAKTAPGKKRPIESPDSSTGIGKNGQPPAKKKLNFGQTGDSESVPDPQPLGEPPAAPSGLGSGTMAAGGGAPMADNNEGADGVGNASGNWHCDSTWLGDRVITTSTRTWALPTYNNHLYKQISSQSGATNDNHFFGYSTPWGYFDFNRFHCHFSPRDWQRLINNNWGFRPRKLRFKLFNIQVKEVTTNDGVTTIANNLTSTIQVFSDSEYQLPYVLGSAHQGCLPPFPADVFMIPQYGYLTLNNGSQSVGRSSFYCLEYFPSQMLRTGDNFEFSYTFEEVPFHSSYAHSQSLDRLMNPLIDQYLYYLARTQSTTGSTRELQFHQAGPNTMAEQSKNWLPGPCYRQQRLSKNIDSNNNSNFAWTGATKYHLNGRNSLTNPGVAMATNKDDEDQFFPINGVLVFGKTGAANKTTLENVLMTSEEEIKTTNPVATEEYGVVSSNLQSSTAGPQTQTVNSQGALPGMVWQNRDVYLQGPIWAKIPHTDGNFHPSPLMGGFGLKHPPPQILIKNTPVPANPPEVFTPAKFASFITQYSTGQVSVEIEWELQKENSKRWNPEIQYTSNYAKSNNVEFAVNNEGVYTEPRPIGTRYLTRNL

SEQ ID NO: 147 - DNA, 3106 bp, Adeno-associated virus
gcggccgcgaattcgcccttcgcagagaccaaagttcaactgaaacgaatcagccggtttattgattaacaagtaattacaggttacgggtgaggtaacgggtgccaatggggcgaggctcagtataaaccccttcgttgttgacagcaaattccacattattagacttggcataatttgaggtgtactgaatctctggattccagcgtttgctgttttctttctgcagttcccactcgatctccacgctgacctggccggtgctgtactgcgtgataaatgaggcaaacttggcaggagtaaacacctctggaggattagcaggtaccggggtgtttttgatgagaatttgaggaggcgggtgtttgagtccaaatccgcccatcaggggagacgggtgaaagttgccgtccgtgtgaggaattttggcccagatgggaccctgcaggtacacgtcccggttctgccagaccatgccgggcagagccccctggctgttgacagtctgtgtctggggtccggccgtagacgattgcaggttgctggagaccacaccgtattcttctgtagccacgggattggtggttttgatctcctcctcgctggtcattagcacgttttccagcgttgtcttgttggcagcccccgttttgccaaaaaccagcactccgttgatgggaaagaactggtcctcgtcgtccttgttggtggccatggctacgcccgggttggttaatgaatttctaccattcagatggtatttagtggccccggtccaggcaaagttactgttgttgttgctgtctatgttttttgacagtctctgctgccgataacagggtccgggcagccagttctttgattgctcggccatggtgttgggcccagcctgatggaactgcagctcccttgtggaccccgtagtgctctgggtccgggccaggtagtacaggtactggtcgatgaggggattcatcagccggtccaggctctggctgtgcgcatagctgctgtggaaaggcacttcctcaaaggtgtagctgaattcaaagttatcgcccgttctcagcatctgagaaggaaagtactccaggcagtagaaggaggaacgtcccacagactgactgccgttgtttagagtcagatatccgtactgaggaatcatgaacacgtccgcagggaacggagggaggcagccctggtgcgcagagccgaggacgtacggcagttggtactccgagtccgagaagacctgaatcgtgctggtaaggttattagcgatggtcgtaacgccgtcgttcgtcgtgacctccttgacctggatgttgaacaacttgaaccgcagctttctgggccggaatccccagttgttgttgatgagtcgctgccagtcacgtggtgagaagtggcagtggaatctgttgaagtcaaaatagccccagggggtgctgtagccgaagaagtggttgtcgttggtagccccgctctgacttgatatctgcttgtagaggtggttgttgtaggtgggcagggcccaggtgcgggtgctggtggtgatgactctgtcgcccagccatgtggaatcgcaatgccaatttccggaggcattacccactccgtcggcgccttcgttattgtctgccattggtgcgccaccgcctgcagccattgtaccagatcccagacctgagggcgcggcgggaggttctccgagaggttgggggtcgggcactgactctgagtcgccagtctgcccaaagttgagcttctttttagcgggcggctggccgttcttgccgatgcccgtggaggagtcgggggattctatgggtctcttctttccaggagccgtcttagcgccttcctcaaccagaccgagaggttcgagaacccgcttcttggcctggaagactgctcgcccgaggttgcccccaaaagacgtatcttcttgaagacgctcctgaaactcggcgtcggcgtggttgtacttgaggtacgggttgtccccctgctcgagctgcttgtcgtaggccttgtcgtgctcgagggccgcggcgtctgcctcgttgaccggctctcccttgtcgagtccgttgaagggtccgaggtacctgtagccaggaagcaccagaccccggccgtcgtcctgcttttgctggttggctttgggtttcggggctccaggtttcaagtcccaccactcgcgaatgccctcagagaggttgccctcgagccaatctggaagataaccatcggcagccatacctggtttaagtcatttattgctcagaaacacagtcatccaggtccacgttggccagatcgcaggccgagcaagcaatctcgggagcccgccccagcagatgatgaatggcacagagtttccgatacgtcctctttctgacgaccggttgagattctgacacgccggggaaacattctgaacagtctctggtcccgtgcgtgaagcaaatgttgaaattctgattcattctctcgcatgtcttgcaggggaacagcatctgaagcatgcccgcgtgacgagaacatttgttttggtacctgtcggcaaagtccaccggagctccttccgcgtctgacgtcgatggatccgcgactgaggggcaggcccgcttgggctcgcttttatccgcgtcatcgggggcgggtctcttgttggctccaccctttctgacgtagaactcatacgccacctcggtcacgtgatcctgcgcccagcggaagaactctttgacttcctgctttgtcaccttgccaaagtcatgctccagacggcgggtgagttcaaatttgaacatccggtcttgtaacggctgctggtgctcgaaggtggtgctgttcccgtcaatcacggcgcacatgttggtgttggaagtgacgatcacgggggtgggatcgatctgggcggacgacttgcacttttggtccacgcgcaccttgctgccgccgagaatggccttggcggactccacgaccttggccgtcatcctgccctcctcccaccagatcaccatcttgtcgacgcaatcgttgaagggaaagttctcattggtccagttgacgcagccgtagaaagggcgaattc

SEQ ID NO: 148 - protein, 728 aa, Artificial Sequence
  Description of Artificial Sequence: Synthetic polypeptide
MAADGYLPDWLEDNLSEGIREWWDLKPGAPKPKANQQKQDDGRGLVLPGYKYLGPFNGLDKGEPVNEADAAALEHDKAYDKQLEQGDNPYLKYNHADAEFQERLQEDTSFGGNLGRAVFQAKKRVLEPLGLVEEGAKTAPGKKRPIESPDSSTGIGKKGQQPAKKKLNFGQTGDSESVPDPQPLGEPPAAPSGLGSGTMAAGGGAPMADNNEGADGVGNASGNWHCDSTWLGDRVITTSTRTWALPTYNNHLYKQISSQSGATNDNHFFGYSTPWGYFDFNRFHCHFSPRDWQRLINNNWGFRPRKLRFKLFNIQVKEVTTNDGVTTIANNLTSTIQVFSDSEYQLPYVLGSAHQGCLPPFPADVFMIPQYGYLTLNNGSQSMGRSSFYCLEYFPSQMLRTGNNFEFSYTFEEVPFHSSYAHSQSLDRLMNPLIDQYLYYLARTQSTTGSTRELQFHQAGPNTMAEQSKNWLPGPCYRQQRLSKNIDSNNNSNFAWTGATKYHLNGRNSLTNPGVAMATNKDDEGQFFPINGVLVFGKTGAANKTTLENVLMTSEEEIKTTNPVATEEYGVVSSNLQSSTAGPQTQTVNSQGALPGMVWQNRDVYLQGPIWAKIPHTDGNFHPSPLMGGFGLKHPPPQILIKNTPVPANPPGVFTPALFASFITQYSTGQVSVEIEWELQKENSKRWNPEIQYTSNYAKSNNVEFAVNNEGVYTEPRPIGTRYLTRNL

SEQ ID NO: 149 - DNA, 3098 bp, Adeno-associated virus
gaattcgcccttcgcagagaccaaagttcaactgaaacgaatcaaccggtttattgattaacaagtaattacaggttacgggtgaggtaacgggtgccaatggggcgaggctcagtataaaccccttcgttgttgacagcaaattccacattattagacttggcataatttgaggtgtactgaatctctggattccagcgtttgctgttttctttctgcagttcccactcgatctccacgctgacctggccggtgctgtactgcgtgataaatgaggcaaactaggcaggagtaaacacccctggaggattagcaggtaccggggtgtttttgatgagaatttgaggaggcgggtgtttgagtccaaatccgcccatcaggggagacgggtgaaagttgccgtccgtgtgaggaattttggcccagatgggaccctgcaggtacacgtcccggttctgccagaccatgccgggcagagccccctggctgttgacagtctgtgtctggggtccggccgtagacgattgcaggttgctggagaccacaccgtattcttctgtagccacgggattggtggttttgatctcctcctcgctggtcattagcacgttttccagcgttgtcttgttggcagcccccgttttgccaaaaaccagcactccgttgatgggaaagaactggccctcgtcgtccttgttggtggccatggctacgcccgggttggttaatgaatttctaccattcagatggtatttagtggccccggtccaggcaaagttactgttgttgttgctgtctatgttttttgacagtctctgctgccgataacagggtccgggcagccagttctttgattgctcggccatggtgttgggcccagcctgatggaactgcagctcccttgtggaccccgtagtgctctgggtccgggccaggtagtacaggtactggtcgatgaggggattcatcagccggtccaggctctggctgtgcgcatagctgctgtggaaaggcacttcctcaaaggtgtagctgaattcaaagttattgcccgttctcagcatctgagaaggaaagtactccaggcagtagaaggaggaacgtcccatagactgactgccgttgtttagagtcagatatccgtactgaggaatcatgaacacgtccgcagggaacggagggaggcagccctggtgcgcagagccgaggacgtacggcagttggtactccgagtccgagaagacctgaatcgtgctggtaaggttattagcgatggtcgtaacgccgtcgttcgtcgtgacctccttgacctggatgttgaacaacttgaaccgcagctttctgggccggaatccccagttgttgttgatgagtcgctgccagtcacgtggtgagaagtggcagtggaatctgttgaagtcaaaatagccccagggggtgctgtagccgaagaagtggttgtcgttggtagccccgctctgacttgatatctgcttgtagaggtggttgttgtaggtgggcagggcccaggtgcgggtgctggtggtgatgactctgtcgcccagccatgtggaatcgcaatgccaatttccggaggcattacccactccgtcggcgccttcgttattgtctgccattggtgcgccaccgcctgcagccattgtaccagatcccagacctgagggcgcggcgggaggttctccgagaggttgggggtcgggcactgactctgagtcgccagtctgcccaaagttgagcttctttttagcgggctgctggcctttcttgccgatgcccgtggaggagtcgggggattctatgggtctcttctttccaggagccgtcttagcgccttcctcaaccagaccgagaggttcgagaacccgcttcttggcctggaagactgctcgcccgaggttgcccccaaaagacgtatcttcttgaagacgctcctgaaactcagcgtcggcgtggttgtacttgaggtacgggttgtccccctgctcgagctgcttgtcgtaggccttgtcgtgctcgagggccgcggcgtctgcctcgttgaccggctctcccttgtcgagtccgttgaagggtccgaggtacttgtagccaggaagcaccagaccccggccgtcgtcctgcttttgctggttggctttgggtttcggggctccaggtttcaagtcccaccactcgcgaatgccctcagagaggttgtcctcgagccaatctggaagataaccatcggcagccatacctggtttaagtcatttattgctcagaaacacagtcatccaggtccacgttgaccagatcgcaggccgagcaagcaatctcgggagcccgccccagcagatgatgaatggcacagagtttccgatacgtcctctttctgacgaccggttgagattctgacacgccggggaaacattctgaacagtctctggtcccgtgcgtgaagcaaatgttgaaattctgattcattctctcgcatgtcttgcagggaaacagcatctgaagcatgcccgcgtgacgagaacatttgttttggtacctgtcggcaaagtccaccggagctccttccgcgtctgacgtcgatggatccgcgactgaggggcaggcccgcttgggctcgcttttatccgcgtcatcgggggcgggcctcttgttggctccaccctttctgacgtagaactcatgcgccacctcggtcacgtgatcctgcgcccagcggaagaactctttgacttcctgctttgtcaccttgccaaagtcctgctccagacggcgggtgagttcaaatttgaacatccggtcttgtaacggctgctggtgctcgaaggtggtgctgttcccgtcaatcacggcgcacatgttggtgttggaagtgacgatcacgggggtgggatcgatctgggcggacgacttgcacttttggtccacgcgcaccttgctgccgccgagaatggccttggcggactccacgaccttggccgtcatcttgccctcctcccaccagatcaccatcttgtcgacgcaatcgttgaagggaaagttctcattggtccagttgacgcagccgtagaaagggcgaattc

SEQ ID NO: 150 - DNA, 2187 bp, Adeno-associated virus
atggctgccgatggttatcttccagattggctcgagggcaacctctctgagggcattcgcgagtggtgggacttgaaacctggagccccgaaacccaaagccaaccagcaaaagcaggacgacggccggggtctggtgcttcctggctacaggtacctcggacccttcaacggactcgacaagggagagccggtcaacgaggcagacgccgcggccctcgagcacgacaaggcctacgacaagcagctcgagcagggggacaacccgtacctcaagtacaaccacgccgacgccgagtttcaggagcgtcttcaagaagatacgtcttttgggggcaacctcgggcgagcagtcttccaggccaagaagcgggttctcgaacctctcggtctggttgaggaaggcgctaagacggctcctggaaagaagagacccatagaatcccccgactcctccacgggcatcggcaagaacggccagccgcccgctaaaaagaagctcaactttgggcagactggcgactcagagtcagtgcccgacccccaacctctcggagaacctcccgccgcgccctcaggtctgggatctggtacaatggctgcaggcggtggcgcaccaatggcagacaataacgaaggcgccgacggagtgggtaatgcctccggaaattggcattgcgattccacatggctgggcgacagagtcatcaccaccagcacccgcacctgggccctgcccacctacaacaaccacctctacaagcagatatcaagtcagagcggggctaccaacgacaaccacttcttcggctacagcaccccctggggctattttgacttcaacagattccactgccacttctcaccacgtgactggcagcgactcatcaacaacaactggggattccggcccagaaagctgcggttcaagttgttcaacatccaggtcaaggaggtcacgacgaacgacggcgttacgaccatcgctaataaccttaccagcacgattcaggtcttctcggactcggagtaccaactgccgtacgtcctcggctctgcgcaccagggctgcctccctccgttccctgcggacgtgttcatgattcctcagtacggatatctgactctaaacaacggcagtcagtctgtgggacgttcctccttctactgcctggagtactttccttctcagatgctgagaacgggcgataactttgaattcagctacacctttgaggaagtgcctttccacagcagctatgcgcacagccagagcctggaccggctgatgaatcccctcatcgaccagtacctgtactacctggcccggacccagagcactacggggtccacaagggagctgcagttccatcaggctgggcccaacaccatggccgagcaatcaaagaactggctgcccggaccctgttatcggcagcagagactgtcaaaaaacatagacagcaacaacaacagtaactttgcctggaccggggccactaaataccatctgaatggtagaaattcattaaccaacccgggcgtagccatggccaccaacaaggacgacgaggaccagttctttcccatcaacggagtgctggtttttggcaaaacgggggctgccaacaagacaacgctggaaaacgtgctaatgaccagcgaggaggagatcaaaaccaccaatcccgtggctacagaagaatacggtgtggtctccagcaacctgcaatcgtctacggccggaccccagacacagactgtcaacagccagggggctctgcccggcatggtctggcagaaccgggacgtgtacctgcagggtcccatctgggccaaaattcctcacacggacggcaactttcacccgtctcccctgatgggcggatttggactcaaacacccgcctcctcaaattctcatcaaaaacaccccggtacctgctaatcctccagaggtgtttactcctgccaagtttgcctcatttatcacgcagtacagcaccggccaggtcagcgtggagatcgagtgggaactgcagaaagaaaacagcaaacgctggaatccagagattcagtacacctcaaattatgccaagtctaataatgtggaatttgctgtcaacaacgaaggggtttatactgagcctcgccccattggcacccgttacctcacccgtaacctgtaa

SEQ ID NO: 151 - protein, 728 aa, Adeno-associated virus; identical to SEQ ID NO: 146

SEQ ID NO: 152 - protein, 728 aa, Adeno-associated virus
MAADGYLPDWLEDNLSEGIREWWDLKPGAPKPKANQQKQDDGRGLVLPGYRYLGPFNGLDKGEPVNEADAAALEHDKAYDKQLEQGDNPYLKYNHADAEFQERLQEDTSFGGNLGRAVFQAKKRVLEPLGLVEEGAKTAPGKKRPIESPDSSTGIGKNGQPPAKKKLNFGQTGDSESVPDPQPLGEPPAAPSGLGSGTMAAGGGAPMADNNEGADGVGNASGNWHCDSTWLGDRVITTSTRTWALPTYNNHLYKQISSQSGATNDNHFFGYSTPWGYFDFNRFHCHFSPRDWQRLINNNWGFRPRKLRFKLFNIQVKEVTTNDGVTTIANNLTSTIQVFSDSEYQLPYVLGSAHQGCLPPFPADVFMIPQYGYLTLNNGSQSVGRSSFYCLEYFPSQMLRTGDNFEFSYTFEEVPFHSSYAHSQSLDRLMNPLIDQYLYYLARTQSTTGSTRELQFHQAGPNTMAEQSKNWLPGPCYRQQRLSKNIDSNNNSNFAWTGATKYHLNGRNSLTNPGVAMATNKDDEDQFFPINGVLVFGKTGAANKTTLENVLMTSEEEIKTTNPVATEEYGVVSSNLQSSTAGPQTQTVNSQGALPGMVWQNRDVYLQGPIWAKIPHTDGNFHPSPLMGGFGLKHPPPQILIKNTPVPANPPEVFTPAKFASFITQYSTGQVSVEIEWELQKENSKRWNPEIQYTSNYAKSNNVEFAVNNEGVYTEPRPIGTRYLTRNL

SEQ ID NO: 153 - protein, 728 aa, Adeno-associated virus; identical to SEQ ID NO: 145

SEQ ID NO: 154 - protein, 728 aa, Adeno-associated virus
MAADGYLPDWLEDNLSEGIREWWDLKPGAPKPKANQQKQDDGRGLVLPGYKYLGPFNGLDKGEPVNEADAAALEHDKAYDKQLEQGDNPYLKYNHADAEFQERLQEDTSFGGNLGRAVFQAKKRVLEPLGLVEEGAKTAPGKKRPIESPDSSTGIGKNGQPPAKKKLNFGQTGDSESVPDPQPLGEPPAAPSGLGSGTMAAGGGAPMADNNEGADGVGNASGNWHCDSTWLGDRVITTSTRTWALPTYNNHLYKQISSQSGATNDNHFFGYSTPWGYFDFNRFHCHFSPRDWQRLINNNWGFRPRKLRFKLFNIQVKEVTTNDGVTTIANNLTSTIQVFSDSEYQLPYVLGSAHQGCLPPFPADVFMIPQYGYLTLNNGSQSVGRSSFYCLEYFPSQMLRTGNNFEFSYTFEEVPFHSSYAHSQSLDRLMNPLIDQYLYYLARTQSTTGSTRELQFHQAGPNTMAEQSKNWLPGPCYRQQRLSKNIDSNNNSNFAWTGATKYHLNGRNSLTNPGVAMATNKDDEDQFFPINGVLVFGKTGAANKTTLENVLMTSEEEIKTTNPVATEEYGVVSSNLQSSTAGPQTQTVNSQGALPGMVWQNRDVYLQGPIWAKIPHTDGNFHPSPLMGGFGLKHPPPQILIKNTPVPANPPEVFTPAKFASFITQYSTGQVSVEIEWELQKENSKRWNPEIQYTSNYAKSNNVEFAVNNEGVYTEPRPIGTRYLTRNL

SEQ ID NO: 155 - protein, 728 aa, Adeno-associated virus
MAADGYLPDWLEDNLSEGIREWWDLKPGAPKPKANQQKQDDGRGLVLPGYKYLGPFNGLDKGEPVNEADAAALEHDKAYDKQLEQGDNPYLKYNHADAEFQERLQEDTSFGGNLGRAVFQAKKRVLEPLGLVEEGAKTAPGKKRPIESPDSSTGIGKKGQQPAKKKLNFGQTGDSESVPDPQPLGEPPAAPSGLGSGTMAAGGGAPMADNNEGADGVGNASGNWHCDSTWLGDRVITTSTRTWALPTYNNHLYKQISSQSGATNDNHFFGYSTPWGYFDFNRFHCHFSPRDWQRLINNNWGFRPRKLRFKLFNIQVKEVTTNDGVTTIANNLTSTIQVFSDSEYQLPYVLGSAHQGCLPPFPADVFMIPQYGYLTLNNGSQSVGRSSFYCLEYFPSQMLRTGNNFEFSYTFEEVPFHSSYAHSQSLDRLMNPLIDQYLYYLARTQSTTGSTRELQFHQAGPNTMAEQSKNWLPGPCYRQQRLSKNIDSNNNSNFAWTGATKYHLNGRNSLTNPGVAMATNKDDEDQFFPINGVLVFGKTGAANKTTLENVLMTSEEEIKTTNPVATEEYGVVSSNLQSSTAGPQTQTVNSQGALPGMVWQNRDVYLQGPIWAKIPHTDGNFHPSPLMGGFGLKHPPPQILIKNTPVPANPPEVFTPAKFASFITQYSTGQVSVEIEWELQKENSKRWNPEIQYTSNYAKSNNVEFAVNNEGVYTEPRPIGTRYLTRNL

SEQ ID NO: 156 - DNA, 2215 bp, Artificial Sequence
  Description of Artificial Sequence: Synthetic polynucleotide
atggctgccgatggttatcttccagattggctcgaggacactctctctgaaggaataagacagtggtggaagctcaaacctggcccaccaccaccaaagcccgcagagcggcataaggacgacagcaggggtcttgtgcttcctgggtacaagtacctcggacccttcaacggactcgacaagggagagccggtcaacgaggcagacgccgcggccctcgagcacgacaaagcctacgaccggcagctcgacagcggagacaacccgtacctcaagtacaaccacgccgacgccgagttccaggagcggctcaaagaagatacgtcttttgggggcaacctcgggcgagcagtcttccaggccaaaaagaggcttcttgaacctcttggtctggttgaggaagcggctaagacggctcctggaaagaagaggcctgtagagcactctcctgtggagccagactcctcctcgggaaccggaaaggcgggccagcagcctgcaagaaaaagattgaattttggtcagactggagacgcagactcagtcccagaccctcaaccaatcggagaacctcccgcagccccctcaggtgtgggatctcttacaatggctgcaggcggtggcgcaccaatggcagacaataacgagggcgccgacggagtgggtaattcctcgggaaattggcattgcgattccacatggatgggcgacagagtcatcaccaccagcacccgaacctgggccctgcccacctacaacaaccacctctacaagcaaatctccaacagcacatctggaggatcttcaaatgacaacgcctacttcggctacagcaccccctgggggtattttgactttaacagattccactgccacttttcaccacgtgactggcagcgactcatcaacaacaactggggattccggcccaagagactcagcttcaagctcttcaacatccaggtcaaggaggtcacgcagaatgaaggcaccaagaccatcgccaataacctcaccagcaccatccaggtgtttacggactcggagtaccagctgccgtacgttctcggctctgcccaccagggctgcctgcctccgttcccggcggacgtgttcatgattccccagtacggctacctaacactcaacaacggtagtcaggccgtgggacgctcctccttctactgcctggaatactttccttcgcagatgctgagaaccggcaacaacttccagtttacttacaccttcgaggacgtgcctttccacagcagctacgcccacagccagagcttggaccggctgatgaatcctctgattgaccagtacctgtactacttgtctcggactcaaacaacaggaggcacgacaaatacgcagactctgggcttcagccaaggtgggcctaatacaatggccaatcaggcaaagaactggctgccaggaccctgttaccgccagcagcgagtatcaaagacatctgcggataacaacaacagtgaatactcgtggactggagctaccaagtaccacctcaatggcagagactctctggtgaatccgggcccggccatggcaagccacaaggacgatgaagaaaagtttttttcctcagagcggggttctcatctttgggaagcaaggctcagagaaaacaaatgtggacattgaaaaggtcatgattacagacgaagaggaaatcaggacaaccaatcccgtggctacggagcagtatggttctgtatctaccaacctccagagaggcaacagacaagcagctaccgcagatgtcaacacacaaggcgttcttccaggcatggtctggcaggacagagatgtgtaccttcaggggcccatctgggcaaagattccacacacggacggacattttcacccctctcccctcatgggtggattcggacttaaacaccctccgcctcagatcctgatcaagaacacgcctgtacctgcggatcctccgaccaccttcaaccagtcaaagctgaactctttcatcacccagtattctactggccaagtcagcgtggagatcgagtgggagctgcagaaggaaaacagcaagcgctggaaccccgagatccagtacacctccaactactacaaatctacaagtgtggactttgctgttaatacagaaggcgtgtactctgaaccccgccccattggcacccgttacctcacccgtaatctgtaa

SEQ ID NO: 157 - protein, 737 aa, Artificial Sequence
  Description of Artificial Sequence: Synthetic polypeptide
MAADGYLPDWLEDTLSEGIRQWWKLKPGPPPPKPAERHKDDSRGLVLPGYKYLGPFNGLDKGEPVNEADAAALEHDKAYDRQLDSGDNPYLKYNHADAEFQERLKEDTSFGGNLGRAVFQAKKRLLEPLGLVEEAAKTAPGKKRPVEHSPVEPDSSSGTGKAGQQPARKRLNFGQTGDADSVPDPQPIGEPPAAPSGVGSLTMAAGGGAPMADNNEGADGVGNSSGNWHCDSTWMGDRVITTSTRTWALPTYNNHLYKQISNSTSGGSSNDNAYFGYSTPWGYFDFNRFHCHFSPRDWQRLINNNWGFRPKRLSFKLFNIQVKEVTQNEGTKTIANNLTSTIQVFTDSEYQLPYVLGSAHQGCLPPFPADVFMIPQYGYLTLNNGSQAVGRSSFYCLEYFPSQMLKTGNNFQFTYTFEDVPFHSSYAHSQSLDRLMNPLIDQYLYYLSRTQTTGGTTNTQTLGFSQGGPNTMANQAKNWLPGPCYRQQRVSKTSADNNNSEYSWTGATKYHLNGRDSLVNPGPAMASHKDDEEKFFPQSGVLIFGKQGSEKTNVDIEKVMITDEEEIRTTNPVATEQYGSVSTNLQRGNRQAATADVNTQGVLPGMVWQDRDVYLQGPIWAKIPHTDGHFHPSPLMGGFGLKHPPPQILIKNTPVPADPPTTFNQSKLNSFITQYSTGQVSVEIEWELQKENSKRWNPEIQYTSNYYKSTSVDFAVNTEGVYSEPRPIGTRYLTRNL

SEQ ID NO: 158 - protein, 737 aa, Artificial Sequence
  Description of Artificial Sequence: Synthetic polypeptide
MAADGYLPDWLEDTLSEGIRQWWKLKPGPPPPKPAERHKDDSRGLVLPGYKYLGPFNGLDKGEPVNEADAAALEHDKAYDRQLDSGDNPYLKYNHADAEFQERLKEDTSFGGNLGRAVFQAKKRLLEPLGLVEEAAKTAPGKKRPVEHSPVEPDSSSGTGKAGQQPARKRLNFGQTGDADSVPDPQPIGEPPAAPSGVGSLTMAAGGGAPMADNNEGADGVGNSSGNWHCDSTWMGDRVITTSTRTWALPTYNNHLYKQISNSTSGGSSNDNAYFGYSTPWGYFDFNRFHCHFSPRDWQRLINNNWGFRPKRLSFKLFNIQVKEVTQNEGTKTIANNLTSTIQVFTDSEYQLPYVLGSAHQGCLPPFPADVFMIPQYGYLTLNNGSQAVGRSSFYCLEYFPSQMLKTGNNFQFTYTFEDVPFHSSYAHSQSLDRLMNPLIDQYLYYLSRTQTTGGTTNTQTLGFSQGGPNTMANQAKNWLPGPCYRQQRVSKTSADNNNSEYSWTGATKYHLNGRDSLVNPGPAMASHKDDEEKFFPQSGVLIFGKQGSEKTNVDIEKVMITDEEEIRTTNPVATEQYGSVSTNLQQGNTQAATADVNTQGVLPGMVWQDRDVYLQGPIWAKIPHTDGHFHPSPLMGGFGLKHPPPQILIKNTPVPADPPTTFNQSKLNSFITQYSTGQVSVEIEWELQKENSKRWNPEIQYTSNYYKSTSVDFAVNTEGVYSEPRPIGTRYLTRNL

SEQ ID NO: 159 - protein, 737 aa, Artificial Sequence
  Description of Artificial Sequence: Synthetic polypeptide
MAADGYLPDWLEDTLSEGIRQWWKLKPGPPPPKPAERHKDDSRGLVLPGYKYLGPFNGLDKGEPVNEADAAALEHDKAYDRQLDSGDNPYLKYNHADAEFQERLKEDTSFGGNLGRAVFQAKKRLLEPLGLVEEAAKTAPGKKRPVEHSPVEPDSSSGTGKAGQQPARKRLNFGQTGDADSVPDPQPIGEPPAAPSGVGSLTMAAGGGAPMADNNEGADGVGNSSGNWHCDSTWMGDRVITTSTRTWALPTYNNHLYKQISNSTSGGSSNDNAYFGYSTPWGYFDFNRFHCHFSPRDWQRLINNNWGFRPKRLSFKLFNIQVKEVTQNEGTKTIANNLTSTIQVFTDSEYQLPYVLGSAHQGCLPPFPADVFMIPQYGYLTLNNGSQAVGRSSFYCLEYFPSQMLRTGNNFQFTYTFEDVPFHSSYAHSQSLDRLMNPLIDQYLYYLSRTQTTGGTTNTQTLGFSQGGPNTMANQAKNWLPGPCYRQQRVSKTSADNNNSEYSWTGATKYHLNGRDSLVNPGPAMASHKDDEEKFFPQSGVLIFGKQGSEKTNVDIEKVMITDEEEIRTTNPVATEQYGSVSTNLQQGNTQAATADVNTQGVLPGMVWQDRDVYLQGPIWAKIPHTDGHFHPSPLMGGFGLKHPPPQILIKNTPVPADPPTTFNQSKLNSFITQYSTGQVSVEIEWELQKENSKRWNPEIQYTSNYYKSTSVDFAVNTEGVYSEPRPIGTRYLTRNL

SEQ ID NO: 160 - protein, 729 aa, Artificial Sequence
  Description of Artificial Sequence: Synthetic polypeptide
MAADGYLPDWLEDNLSEGIREWWDLKPGAPKPKANQQKQDDGRGLVLPGYKYLGPFNGLDKGEPVNAADAAALEHDKAYDQQLKAGDNPYLRYNHADAEFQERLQEDTSFGGNLGRAVFQAKKRVLEPLGLVEEGAKTAPGKKRPIDSPDSSTGIGKKGQQPAKKKLNFGQTGDSESVPDPQPLGEPPAAPSSVGSGTMAAGGGAPTADNNEGADGVGNASGNWHCDSTWLGDRVITTSTRTWALPTYNNHLYKQISSSSSGATNDNHYFGYSTPWGYFDFNRFHCHFSPRDWQRLINNNWGFRPKKLRFKLFNIQVKEVTTNDGVTTIANNLTSTVQVFSDSEYQLPYVLGSAHQGCLPPFPADVFMIPQYGYLTLNNGSQSVGRSSFYCLEYFPSQMLRTGNNFEFSYSFEDVPFHSSYAHSQSLDRLMNPLIDQYLYYLARTQSTTGSTRELQFHQAGPNTMAEQSKNWLPGPCYRQQRLSKNLDFNNNSNFAWTAATKYHLNGRNSLTNPGIPMATNKDDEDQFFPINGVLVFGKTGAANKTTLENVLMTSEEEIKTTNPVATEEYGVVSSNLQSSTAGPQSQTINSQGALPGMVWQNRDVYLQGPIWAKIPHTDGNFHPSPLMGGFGLEHPPPQILIKNTPVPANPPEVFTPAKFASFITQYSTGQVSVEIEWELQKENSKRWNPEIQYTSNYAKSNNVEFAVNPDGVYTEPRPIGTRYLTRNL

SEQ ID NO: 161 - DNA, 3075 bp, Adeno-associated virus
tgagaactttcctttcaacgattgcgtcggacaagatggtgatctggtgggaggaggggaagatgaccgccaaggtcgtggagtcggccaaagccattcttggaggaagcaaggtgcgtgtggaccagaaatgcaagtcctcggcccagatagacccgactcccgtgatcgtcacctccaacaccaacatgtgcgccgtgattgacgggaactcaacgaccttcgagcaccagcagccgttgcaagaccggatgttcaaatttgaacttacccgccgtctggatcatgactttggaaaggtcaccaagcaggaagtgaaagactttttccggtgggcaaaggatcacgtggttgaggtggagcatgaattctacgtcaaaaagggtggagctaagaaaagacccgcccccagtgacgcagatataagtgagcccaaacgggcgcgcgagtcagttgcgcagccatcaacgtcagacgcggaagcttcgatcaactacgcggacaggtaccaaaaacaaatgttctcgtcacgtgggcatgaatctgatgctgtttccctgcagacaatgcgagagaatgaatcagaattcaaatatctgcttcactcacggacagaaagactgtttagagtgctttcccgtgtcagaatctcaacccgtttctgtcgtcaaaaaggcgtatcagaaactgtgctacattcatcatatcatgggaaaggtgccagacgcttgcactgcctgcgatctggtcaatgtggatttggatgactgcatctctgaacaataaatgatttaaatcaggtatggctgccgatggttatcctccagattggctcgaggacactctctctgaagggataagacagtggtggaagctcaaacctggcccaccaccaccaaagcccgcagagcggcataaggacgacagcaggggtcttgtgcttcctgggtacaagtacctcggacccttcaacggactcgacaagggggagccggtcaacgaggcagacgccgcggccctcgagcacgacaaggcctacgaccggcagctcgacagcggagacaacccgtacctcaagtacaaccacgccgacgcagagtttcaggagcgccttaaagaagatacgtcttttgggggcaacctcggacgagcagtcttccaggcgaaaaagagggttcttgaacctctgggcctggttgaggaacctgttaagacggctccgggaaaaaagaggccggtagagcactctcctgtggagccagactcctcctcgggaaccggaaaagcgggccagcggcctgcaagaaaaagattaaattttggtcagactggagacgcagactccgtacctgacccccagcctctcggacagccaccagcagccccctctggtctgggatctactacaatggctacaggcagtggcgcaccaatggcagacaataacgagggtgccgatggagtgggtaattcctcaggaaattggcattgcgattcccaatggctgggcgacagagtcatcaccaccagcacccgaacctgggccctgcccacatacaacaaccacctctacaagcaaatctccagccaatcaggagccagcaacgacaaccactactttggctacagcaccccctgggggtattttgacttcaacagattccactgccacttttcaccacgtgactggcaaagactcatcaacaacaactggggattccggcccaaaagactcaacttcaagctctttaatattcaagtcaaagaggtcacgcagaatgacggtacgacgacgattgccaataaccttaccagcacggttcaggtgtttactgactcggagtaccagctcccgtacgtcctgggctcggcgcatcaaggatgcctcccgccgtttccagcggacgtcttcatggtcccacagtatggatacctcaccctgaacaacgggagtcaggcggtaggacgctcttccttttactgcctggagtactttccttctcagatgctgcgtactggaaacaactttcagttcagctacacttttgaagacgtgcctttccacagcagctacgctcacagccagagtctggatcggctgatgaatcctctgatcgaccagtacctgtattatctgaacaagacacaaacaaatagtggaactcttcagcagtctcggctactgtttagccaagctggaccaaccaacatgtctcttcaagctaaaaactggctgcctggaccttgctacagacagcagcgtctgtcaaaacaggcaaacgacaacaacaacagcaactttccctggactgcagctacaaagtatcatctaaatggccgggactcgttggttaatccaggaccagctatggccagtcacaaggatgacgaagaaaagtttttccccatgcatggaaccctgatatttggtaaacaaggaacaaatgccaacgacgcggatttggaaaatgtcatgattacagatgaagaagaaatcagggccaccaatcccgtggctacggagcagtacgggactgtgtcaaataatttgcaaaactcaaacactggtccaactactggaactgtcaatcgccaaggagcgttacctggtatggtgtggcaggatcgagacgtgtacctgcagggacccatttgggccaagattcctcacaccgatggacactttcatccttctccactgatgggaggttttggactcaaacacccgcctcctcagatcatgatcaaaaacactcccgttccagccaatcctcccacaaacttcagttctgccaagtttgcttctttcatcacacagtattccacgggacaggtcagcgtggagatcgagtgggagctgcagaaggagaacagcaaacgctggaatcccgaaattcagtacacttccaactacaacaagtctgttaatgtggactttactgtggacactaatggtgtgtattcagagcctcgccccattggcaccagatacctgactcgtaatctgtaattgcttgttaatcaataaaccgtttaattcgtttcagttgaactttggtctctgcgaagggcgaa

SEQ ID NO: 162 - DNA, 3142 bp, Adeno-associated virus
aaaacgacgggccagtgattgtaatacgactcactatagggcgaaattgaaattagcggccgcgaattcgcctttcgcagagaccaaagttcaactgaaacgaattaaacggtttattgattaacaagcaattacagattacgagtcaggtatctggtgccaatggggcgaggctctgaatacacaccattagtgtccacagtaaagtccacattaacagacttgttgtagttggaagtgtactgaatttcgggattccagcgtttgctgttctccttctgcagctcccactcgatctccacgctgacctgtcccgtggaatactgtgtgatgaaagaagcaaacttggcagaactgaagtttgtgggaggattggctggaacgggagtgtttttgatcatgatctgaggaggcgggtgtttgagtccaaaacctcccatcagtggagaaggatgaaagtgtccatcggtgtgaggaatcttggcccaaatgggtccctgcaggtacacgtctcgatcctgccacaccataccaggtaacgctccttggtgattgacagttccagtagttggaccagtgtttgagttttgcaaattatttgacacagtcccgtactgctccgtagccacgggattggtggccctgatttcttcttcatctgtaatcatgacattttccaaatccgcgtcgttggcatttgttccttgtttaccaaatatcagggttccatgcatggggaaaaacttttcttcgtcatccttgtgactggccatagctggtcctggattaaccaacgagtcccggccatttagatgatactttgtagctgcagtccagggaaagttgctgttgttgttgtcgtttgcctgttttgacagacgctgctgtctgtagcaaggtccaggcagccagtttttagcttgaagagacatgttggttggtccagcttggctaaacagtagccgagactgctgaagagttccactatttgtttgtgtcttgttcagataatacaggtactggtcgatcagaggattcatcagccgatccagactctggctgtgagcgtagctgctgtggaaaggcacgtcttcaaaagtgtagctgaactgaaagttgtttccagtacgcagcatctgagaaggaaagtactccaggcagtaaaaggaagagcgtcctaccgcctgactcccgttgttcagggtgaggtatccatactgtgggaccatgaagacgtccgctggaaacggcgggaggcatccttgatgcgccgagcccaggacgtacgggagctggtactccgagtcagtaaacacctgaaccgtgctggtaaggttattggcaatcgtcgtcgtaccgtcattctgcgtgacctctttgacttgaatattaaagagcttgaagttgagtcttttgggccggaatccccggttgttgttgacgagtctttgccagtcacgtggtgaaaagtggcagtggaatctgttgaagtcaaaatacccccagggggtgctgtagccaaagtagtggttgtcgttgctggctcctgattggctggagatttgcttgtagaggtggttgttgtatgtgggcagggcccaggttcgggtgctggtggtgatgactctgtcgcccagccattgggaatcgcaatgccaatttcctgaggaattacccactccatcggcaccctcgttattgtctgccattggtgcgccactgcctgtagccattgtagtagatcccagaccagagggggctgctggtggctgtccgagaggctgggggtcaggtacggagtctgcgtctccagtctgaccaaaatttaatctttttcttgcaggctgctggcccgcttttccggttcccgaggaggagtctggctccacaggagagtgctctaccggcctcttttttcccggagccgtcttaacaggctcctcaaccaggcccagaggttcaagaaccctctttttcgcctggaagactgctcgtccgaggttgcccccaaaagacgtatcttctttaaggcgctcctgaaactctgcgtcggcgtggttgtacttgaggtacgggttgtctccgctgtcgagctgccggtcgtaggccttgtcgtgctcgagggccgcggcgtctgcctcgttgaccggctcccccttgtcgagtccgttgaagggtccgaggtacttgtacccaggaagcacaagacccctgctgtcgtccttatgccgctctgcgggctttggtggtggtgggccaggtttgagcttccaccactgtcttattccttcagagagagtgtcctcgagccaatctggaagataaccatcggcagccatacctgatttaaatcatttattgttcagagatgcagtcatccaaatccacattgaccagatcgcaggcagtgcaagcgtctggcacctttcccatgatatgatgaatgtagcacagtttctgatacgcctttttgacgacagaaacgggttgagattctgacacgggaaagcactctaaacagtctttctgtccgtgagtgaagcagatatttgaattctgattcattctctcgcattgtctgcagggaaacagcatcagattcatgcccacgtgacgagaacatttgttttggtacctgtccgcgtagttgatcgaagcttccgcgtctgacgtcgatggctgcgcaactgactcgcgcgcccgtttgggctcacttatatctgcgtcactgggggcgggtcttttcttagctccaccctttttgacgtagaattcatgctccacctcaaccacgtgatcctttgcccaccggaaaaagtctttcacttcctgcttggtgacctttccaaagtcatgatccagacggcgggtaagttcaaatttgaacatccggtcttgcaacggctgctggtgctcgaaggtcgttgagttcccgtcaatcacggcgcacatgttggtgttggaggtgacgatcacgggagtcgggtctatctgggccgaggacttgcatttctggtccacacgcaccttgcttcctccaagaatggctttggccgactccacgaccttggcggtcatcttcccctcctcccaccagatcaccatcttgtcgacgcaatggtaaaaggaaagttctcattgg

SEQ ID NO: 163 - protein, 735 aa, Adeno-associated virus 2
MAADGYLPDWLEDTLSEGIRQWWKLKPGPPPPKPAERHKDDSRGLVLPGYKYLGPFNGLDKGEPVNEADAAALEHDKAYDRQLDSGDNPYLKYNHADAEFQERLKEDTSFGGNLGRAVFQAKKRVLEPLGLVEEPVKTAPGKKRPVEHSPVEPDSSSGTGKAGQQPARKRLNFGQTGDADSVPDPQPLGEPPATPAAVGPTTMASGGGAPMADNNEGADGVGNASGNWHCDSTWLGDRVITTSTRTWALPTYNNHLYKQISSASTGASNDNHYFGYSTPWGYFDFNRFHCHFSPRDWQRLINNNWGFRPKRLNFKLFNIQVKEVTQNDGTTTIANNLTSTVQVFTDSEYQLPYVLGSAHQGCLPPFPADVFMIPQYGYLTLNNGSQAVGRSSFYCLEYFPSQMLRTGNNFTFSYTFEDVPFHSSYAHSQSLDRLMNPLIDQYLYYLNRTQNQSGSAQDKALLFSRGSPAGMSVQPKNWLPGPCYRQQRVSKTKTDNNNSNFTWTGASKYNLNGRESIINPGTAMASHKDDKDKFFPMSGVMIFGKESAGASNTALDNVMITDEEEIKATNPVATERFGTVAVNFQSSSTDPATGDVHVMGALPGMVWQDRDVYLQGPIWAKIPHTDGHFHPSPLMGGFGLKHPPPQILIKNTPVPANPPAEFSATKFASFITQYSTGQVSVEIEWELQKENSKRWNPEVQYTSNYAKSANVDFTVDNNGLYTEPRPIGTRYLTRP

SEQ ID NO: 164 - protein, 740 aa, Adeno-associated virus 2
MAADGYLPDWLEDTLSEGIRQWWKLKPGPPPPKPAERHKDDSRGLVLPGYKYLGPFNGLDKGEPVNAADAAALEHDKAYDRQLDSGDNPYLKYNHADAEFQERLKEDTSFGGNLGRAVFQAKKRVLEPLGLVEEPVKTAPGKKRPVEHSPVEPDSSSGTGKAGQQPARKRLNFGQTGDADSVPDPQPLGQPPAAPSGLGTNTMATGSGAPMADNNEGADGVGNSSGNWHCDSTWMGDRVITTSTRTWALPTYNNHLYKQISSQSGASNDNHYFGYSTPWGYFDFNRFHCHFSPRDWQRLINNNWGFRPKRLNFKLFNIQVKEVTQNDGTTTIANNLTSTVQVFTDSEYQLPYVLGSAHQGCLPPFPADVFMVPQYGYLTLNNGSQAVGRSSFYCLEYFPSQMLRTGNNFTFSYTFEDVPFHSSYAHSQSLDRLMNPLIDQYLYYLSRTNTPSGTTTQSGLQFSQAGASDIRDQSRNWLPGPCYRQQRVSKTSADNNNSEYSWTGATKYHLNGRDSLVNPGPAMASHKDDEEKFFPQSGVLIFGKQGSEKTNVDIEKVMITDEEEIRTTNPVATEQYGSVSTNLQRGNRQAATADVNTQGVLPGMVWQDRDVYLQGPIWAKIPHTDGHFHPSPLMGGFGLKHPPPQILIKNTPVPANPSTTFSAAKFASFITQYSTGQVSVEIEWELQKENSKRWNPEIQYTSNYNKSVNVDFTVDTNGVYSEPRPIGTRYLTRNLLLAAA

SEQ ID NO: 165 - protein, 734 aa, Adeno-associated virus 2
MAADGYLPDWLEDTLSEGIRQWWKLKPGPPPPKPAERHKDDSRGLVLPGYKYLGPFNGLDKGEPVNEADAAALEHDKAYDRQLDSGDNPYLKYNHADAEFQERLKEDTSFGGNLGRAVFQAKKRVLEPLGLVEEPVKTAPGKKRPVEHSPVEPDSSSGTGKAGQQPARKRLNFGQTGDADSVPDPQPLGQPPAAPSGLGTNTMATGSGAPMADNNEGADGVGNSSGNWHCDSTWMGDRVITTSTRTWALPTYNNHLYKQISSQSGASNDNHYFGYSTPWGYFDFNRFHCHFSPRDWQRLINNNWGFRPKRLNFKLFNIQVKEVTQNDGTTTIANNLTSTVQVFTDSEYQLPYVLGSAHQGCLPPFPADVFMVPQYGYLTLNNGSQAVGRSSFYCLEYFPSQMLRTGNNFTFSYTFEDVPFHSSYAHSQSLDRLMNPLIDQYLYYLSRTNTPSGTTTQSGLQFSQAGASDIRDQSRNWLPGPCYRQQRVSKTSADNNNSEYSWTGATMYHLNGRDSLVNPGPAMASHKDDEEKFFPQSGVLIFGKQGSEKTNVDIEKVMITDEEEIRTTNPVATEQYGSVSTNLQRGNRQAATADVNTQGVLPGMVWQDRDVYLQGPIWAKIPHTDGHFHPSPLMGGFGLKHPPPQILIKNTPVPANPSTTFSAAKFASFITQYSTGQVSVEIEWELQKENSKRWNPEIQYTSNYNKSINVDFTVDTNGVYSEPRPIGTRYLTRN

SEQ ID NO: 166 - protein, 734 aa, Adeno-associated virus 2
MAADGYLPDWLEDTLSEGIRQWWKLKPGPPPPKPAERHKDDSRGLVLPGYKYLGPFNGLDKGEPVNEADAAALEHDKAYDRQLDSGDNPYLKYNHADAEFQERLKEDTSFGGNLGRAVFQAKKRVLEPLGLVEEPVKTAPGKKRPVEHSPVEPDSSSGTGKAGQQPARKRLNFGQTGDADSVPDPQPLGQPPAAPSGLGTNTMATGSGAPMADNNEGADGVGNSSGNWHCDSTWMGDRVITTSTRTWALPTYNNHLYKQISSQSGASNDNHYFGYSTPWGYFDFNRFHCHFSPRDWQRLINNNWGFRPKRLNFKLFNIQVKEVTQNDGTTTIANNLTSTVQVFTDSEYQLPYVLGSAHQGCLPPFPADVFMVPQYGYLTLNNGSQAVGRSSFYCLEYFPSQMLRTGNNFTFSYTFEDVPFHSSYAHSQSLDRLMNPLIDQYLYYLSRTNTPSGTTTQSGLQFSQAGASDIRDQSRNWLPGPCYRQQRVSKTSADNNNSEYSWTGATKYHLNGRDSLVNPGPAMASHKDDEEKFFPQSGVLIFGKQGSEKTNVDIEKVMITDEEEIRTTNPVATEQYGSVSTNLQRGNRQAATADVNTQGVLPGMVWQDRDVYLQGPIWAKIPHTDGHFHPSPLMGGFGLKHPPPQILIKNTPVPANPSTTFSEAKFASFITQYSTGQVSVEIEWELQKENSKRWNPEIQYTSNYNKSVNVDFTVDTNGVYSEPRPIGTRYLTRN

SEQ ID NO: 167 - protein, 739 aa, Adeno-associated virus 2
MAADGYLPDWLEDTLSEGIRQWWKLKPGPPPPKPAERHKDDSRGLVLPGYKYLGPFNGLDKGEPVNEADAAALEHDKAYDRQLDSGDNPYLKYNHADAEFQERLKEDTSFGGNLGRAVFQAKKRVLEPLGLVEEPVKTAPGKKRPVEHSPVEPDSSSGTGKAGQQPARKRLNFGQTGDADSVPDPQPLGQPPAAPSGLGTNTMATGSGAPMADNNEGADGVGNSSGNWHCDSTWMGDRVITTSTRTWALPTYNNHLYKQISSQSGASNDNHYFGYSTPWGYFDFNRFHCHFSPRDWQRLINNNWGFRPKRLNFKLFNIQVKEVTQNDGTTTIANNLTSTVQVFTDSEYQLPYVLGSAHQGCLPPFPADVFMVPQYGYLTLNNGSQAVGRSSFYCLEYFPSQMLRTGNNFTFSYTFEDVPFHSSYAHSQSLDRLMNPLIDQYLYYLSRTNTPSGTTTQSGLQFSQAGASDIRDQSRNWLPGPCYRQQRVSKTSADNNNSEYSWTGATKYHLNGRDSLVNPGPAMASHKDDEEKFFPQSGVLIFGKQGSEKTNVDIEKVMITDEEEIRTTNPVATEQYGSVSTNLQRGNRQAATADVNTQGVLPGMVWQDRDVYLQGPIWAKIPHTDGHFHPSPLMGGFGLKHPPPQILIKNTPVPANPSTTFSAAKFASFITQYSTGQVSVEIEWELQKENSKRWNPEIQYTSNYNKSVNVDFTVDTNGVYSEPRPIGTRYLTRNLLLAA

SEQ ID NO: 168 - protein, 725 aa, Adeno-associated virus 2
MAADGYLPDWLEDTLSEGIRQWWKLKPGPPPPKPAERHKDDSRGLVLPGYKYLGPFNGLDKGEPVNEADAAALEHDKAYDRQLDSGDNPYLKYNHADAEFQERLKEDTSFGGNLGRAVFQAKKRVLEPLGLVEEPVKTAPGKKRPVEHSPVEPDSSSGTGKAGQQPARKRLNFGQTGDADSVPDPQPLGQPPAAPSGLGTNTMATGSGAPMADNNEGADGVGNSSGNWHCDSTWMGDRVITTSTRTWALPTYNNHLYKQISSQSGASNDNHYFGYSTPWGYFDFNRFHCHFSPRDWQRLINNNWGFRPKRLNFKLFNIQVKEVTQNDGTTTIANNLTSTVQVFTDSEYQLPYVLGSAHQGCLPPFPADVFMVPQYGYLTLNNGSQAVGRSSFYCLEYFPSQMLRTGNNFTFSYTFEDVPFHSSYAHSQSLDRLMNPLIDQYLYYLSRTNTPSGTTTQSGLQFSQAGASDIRDQSRNWLPGPCYRQQRVSKTSADNNNSEYSWTGATKYHLNGRDSLVNPGPAMASHKDDEEKFFPQSGVLIFGKQGSEKTNVDIEKVMITDEEEIRTTNPVATEQYGSVSTNLQRGNRQAATADVNTQGVLPGMVWQDRDVYLQGPIWAKIPHTDGHFHPSPLMGGFGLKHPPPQILIKNTPVPANPSTTFSAAKFASFITQYSTGQVSVEIEWELQKENSKRWNPEIQYTSNYNKSVNVDFTVDTNGVYSEPRP

SEQ ID NO: 169 - protein, 707 aa, Adeno-associated virus 2
MAADGYLPDWLEDTLSEGIRQWWKLKPGPPPPKPAERHKDDSRGLVLPGYKYLGPFNGLDKGEPVNEADAAALEHDKAYDRQLDSGDNPYLKYNHADAEFQERLKEDTSFGGNLGRAVFQAKKRVLEPLGLVEEPVKTAPGKKRPVEHSPVEPDSSSGTGKAGQQPARKRLNFGQTGDADSVPDPQPLGQPPAAPSGLGTNTMATGSGAPMADNNEGADGVGNSSGNWHCDSTWMGDRVITTSTRTWALPTYNNHLYKQISSQSGASNDNHYFGYSTPWGYFDFNRFHCHFSPRDWQRLINNNWGFRPKRLNFKLFNIQVKEVTQNDGTTTIANNLTSTVQVFTDSEYQLPYVLGSAHQGCLPPFPADVFMVPQYGYLTLNNGSQAVGRSSFYCLEYFPSQMLRTGNNFTFSYTFEDVPFHSSYAHSQSLDRLMNPLIDQYLYYLSRTNTPSGTTTQSGLQFSQAGASDIRDQSRNWLPGPCYRQQRVSKTSADNNNSEYSWTGATKYHLNGRDSLVNPGPAMASHKDDEEKFFPQSGVLIFGKQGSEKTNVDIEKVMITDEEEIRTTNPVATEQYGSCIYQPPERQQTSSYRRCQHTRRSSRHGLAGQRCVPSGAHLGKDSTHGRTFSPLSPHGWIRTTPSSTDSHQEHPGTCESFDHLQCGKVCFLHHTVLHGTGQRGDRVRAAEGKQQTLESRNSVHFQLQQVC

SEQ ID NO: 170 - protein, 739 aa, Adeno-associated virus 2; identical to SEQ ID NO: 167

SEQ ID NO: 171 - protein, 737 aa, Adeno-associated virus 2
MASDGYLPDWLEDNLSEGIREWWDLKPGAPKPKANQQKQDDGRGLVLPGYKYLGPFNGLDKGEPVNAADAAALEHDKAYDQQLKAGDNPYLRYNHADAEFQERLQEDTSFGGNLGRAVFQAKKRVLEPFGLVEEGAKTAPGKKRPVEQSPQEPDSSSGIGKTGQQPAKKRLNFGQTGDSESVPDPQPLGEPPATPAAVGPTTMASGGGAPMADNNEGADGVGNASGNWHCDSTWLGDRVITTSTRTWALPTYNNHLYKQISSASTGASNDNHYFGYSTPWGYFDFNRFHCHFSPRDWQRLINNNWGFRPKRLNFKLFNIQVKEVTTNDGTTTIANNLTSTVQVFTDSEYQLPYVLGSAHQGCLPPFPADVFMVPQYGYLTLNNGSQAVGRSSFYCLEYFPSQMLRTGNNFTFSYTFEDVPFHSSYAHSQSLDRLMNPLIDQYLYYLSRTNTPSGTTTQSGLQFSQAGASDIRDQSRNWLPGPCYRQQRVSKTSADNNNSEYSWTGATKYHLNGRDSLVNPGPAMASHKDDEEKFFPQSGVLIFGKQGSEKTNVDIEKVMITDEEEIRTTNPVATEQYGSVSTNLQRGNRQAATADVNTQGVLPGMVWQDRDVYLQGPIWAKIPHTDGHFHPSPLMGGFGLKHHPPQILIKNTPVPANPSTTFSAAKFASFITQYSTGQVSVEIEWELQKENSKRWNPEIQYTSNYNKSVNVDFTVDTNGVYSEPRPIGTRYLTRNLL

SEQ ID NO: 172 - protein, 741 aa, Adeno-associated virus 2
MAADGYLPDWLEDTLSEGIREWWALKPGAPKPKANQQKQDDGRGLVLPGYKYLGPFNGLDKGEPVNEADAAALEHDKAYDQQLQAGDNPYLRYNHADAEFQERLQEDTSFGGNLGRAVFQAKKRVLEPLGLVEEPVKTAPGKKRPVEHSPVEPDSSSGTGKSGQQPARKRLNFGQTGDADSVPDPQPLGQPPAAPSGLGTNTMATGSGAPMADNNEGADGVGNSSGNWHCDSTWMGDRVITTSTRTWALPTYNNHLYKQISSQSGASNDNHYFGYSTPWGYFDFNRFHCHFSPRDWQRLINNNWGFRPKRLNFKLFNIQVKEVTQNDGTTTIANNLTSTVQVFTDSEYQLPYVLGSAHQGCLPPFPADVFMVPQYGYLTLNNGSQAVGRSSFYCLEYFPSQMLRTGNNFTFSYTFEDVPFHSSYAHSQSLDRLMNPLIDQYLYYLSRTNTPSGTTTQSGLQFSQAGASDIRDQSRNWLPGPCYRQQRVSKTSADNNNSEYSWTGATKYHLNGRDSLVNPGPAMASHKDDEEKFFPQSGVLIFGKQGSEKTNVDIEKVMITDEEEIRTTNPVATEQYGSVSTNLQRGNLANHNNTTNARQAATADVNTQGVLPGMVWQDRDVYLQGPIWAKIPHTDGHFHPSPLMGGFGLKHPPPQILIKNTPVPANPSTTFSAAKFASFITQYSTGQVSVEIEWELQKENSKRWNPEIQYTSNYNKSINVDFTVDTNGVYSEPRPIGTRYL

SEQ ID NO: 173 - protein, 730 aa, Adeno-associated virus 2
MASDGYLPDWLEDNLSEGIREWWDLKPGAPKPKANQQKQDDGRGLVLPGYKYLGPFNGLDKGEPVNAADAAALEHDKAYDQQLKAGDNPYLRYNHADAEFQERLQEDTSFGGNLGRAVFQAKKRVLEPFGLVEEGAKTAPGKKRPVEQSPQEPDSSSGIGKTGQQPAKKRLNFGQTGDSESVPDPQPLGEPPATPAAVGPTTMASGGGAPMADNNEGADGVGNASGNWHCDSTWLGDRVITTSTRTWALPTYNNHLYKQISSASTGASNDNHYFGYSTPWGYFDFNRFHCHFSPRDWQRLINNNWGFRPKRLNFKLFNIQVKEVTTNDGVTTIANNLTSTVQVFSDSEYQLPYVLGSAHQGCLPPFPADVFMIPQYGYLTLNNGSQAVGRSSFYCLEYFPSQMLRTGNNFTFSYTFEDVPFHSSYAHSQSLDRLMNPLIDQYLYYLNRTQNQSGSAQNNDLLFSRGSPAGMSVQPKNWLPGPCYRQQRVSKTKTDNNNSNFTWTGASKYNLNGRESIINPGTAMASHKDDKDKFFPMSGVMIFGKESAGASNTALDNVMITDEEEIKATNPVATERFGTVAVNLQSSSTDPATGDVHVMGALPGMVWQDRDVYLQGPIWAKIPHTDGHFHPSPLMGGFGLKNPPPQILIKNTPVPANPPAEFSATKFASFITQYSTGQVSVEIEWELQKENSKRWNPEVQYTSNYAKSANVDFTVDNNGLYTEPRPIGTR

SEQ ID NO: 174 - protein, 735 aa, Adeno-associated virus 2
  MOD_RES (239)..(239): Xaa = any amino acid
MASDGYLPDWLEDNLSEGIREWWDLKPGAPKPKANQQKQDDGRGLVLPGYKYLGPFNGLDKGEPVNAADAAALEHDKAYDQQLKAGDNPYLRYNHADAEFQERLQEDTSFGGNLGRAVFQAKKRVLEPFGLVEEGAKTAPGKKRPVEQSPQEPDSSSGIGKTGQQPAKKRLNFGQTGDSESVPDPQPLGEPPATPAAVGPTTMASGGGAPMADNNEGADGVGNASGNWHCDSTWLGDRXITTSTRTWALPTYNNHLYKQISSASTGASNDNHYFGYSTPWGYFDFNRFHCHFSPRDWQRLINNNWGFRPKRLNFKLFNIQVKEVTTNDGVTTIANNLTSTVQVFSDSEYQLPYVLGSAHQGCLPPFPADVFMIPQYGYLTLNNGSQAVGRSSFYCLEYFPSQMLRTGNNFTFSYTFEDVPFHSSYAHSQSLDRLMNPLIDQYLYYLNRTQNQSGSAQNNDLLFSRGSPAGMSVQPKNWLPGPCYRQQRVSKTKTDNNNSNFTWTGASKYNLNGRESIINPGTAMASHKDDKDKFFPMSGVMIFGKESAGASNTALDNVMITDEEEIKATNPVATERFGTVAVNLQSSSTDPATGDVHVMGALPGMVWQDRDVYLQGPIWAKIPHTDGHFHPSPLMGGFGLKNPPPQILIKNTPVPANPPAEFSATKFASFITQYSTGQVSVEIEWELQKENSKRWNPEVQYTSNYAKSANVDFTVDNNGLYTEPRPIGTRYLTRP

SEQ ID NO: 175 - protein, 733 aa, Adeno-associated virus 2
MASDGYLPDWLEDNLSEGIREWWDLKPGAPKPKANQQKQDDGRGLVLPGYKYLGPFNGLDKGEPVNAADAAALEHDKAYDQQLKAGDNPYLRYNHADAEFQERLQEDTSFGGNLGRAVFLAKKRVLEPFGLVEEGAKTAPGKKRPVEQSPQEPDSSSGIGKTGQQPAKKRLNFGQTGDSESVPDPQPLGEPPATPAAVGPTTMASGGGAPMADNNEGADGVGNASGNWHCDSTWLGDRVITTSTRTWALPTYNNHLYKQISSASTGASNDNHYFGYSTPWGYFDFNRFHCHFSPRDWQRLINNNWGFRPKRLNFKLFNIQVKEVTTNDGVTTIANNLTSTVQVFSDSEYQLPYVLGSAHQGCLPPFPADVFMIPQYGYLTLNNGSQAVGRSSFYCLEYFPSQMLRTGNNFTFSYTFEDVPFHSSYAHSQSLDRLMNPLIDQYLYYLNRTQNQSGSAQNNDLLFSRGSPAGMSVQPKNWLPGPCYRQQRVSKTKTDNNNSNFTWTGASKYNLNGRESIINPGTAMASHKDDKDKFFPMSGVMIFGKESAGASNTALDNVMITDEEEIKATNPVATERFGTVAVNLQSSSTDPATGDVHVMGALPGMVWQDRDVYLQGPIWAKIPHTDGHFHPSPLMGGFGLKNPPPQILIKNTPVPANPPAEFSATKFASFITQYSTGQVSVEIEWELQKENSKRWNPEVQYTSNYAKSANVDFTVDNNGLYTEPRPIGTRYLT

SEQ ID NO: 176 - protein, 734 aa, Adeno-associated virus 2
MAADGYLPDWLEDTLSEGIRQWWKLKPGPPPPKPAERHKDDSRGLVLPGCKYLGPFNGLDKGEPVNEADAAALEHDKAYDRQLDSGDNPYLKYNHADAEFQERLKEDTSFGGNLGRAVFQAKKRVLEPLGLVEEPVKTAPGKKRPVEHSPVEPDSSSGTGKAGQQPARKRLNFGQTGDADSVPDPQPLGQPPAAPSGLGTNTMATGSGAPMADNNEGADGVGNSSGNWHCDSTWMGDRVITTSTRTWALPTYNNHLYKQISSQSGASNDNHYFGYSTPWGYFDFNRFHCHFSPRDWQRLINNNWGFRPKRLNFKLFNIQVKEVTQNDGTTTIANNLTSTVQVFSDSEYQLPYVLGSAHQGCLPPFPADVFMIPQYGYLTLNNGSQAVGRSSFYCLEYFPSQMLRTGNNFTFNYTFEDVPFHSSYAHSQSLDRLMNPLIDQYLYYLNRTQNQSGSAQNNDLLFSRGSPAGMSVQPKNWLPGPCYRQQRVSKTKTDNNNSNFTWTGASKYNLNGRESIINPGTAMASHKDDKDKFFPMSGVMIFGKESAGASNTALDNVMITDEEEIKATNPVATERFGTVAVNLQSSSTDPATGDVHVMGALPGMVWQDRDVYLQGPIWAKIPHTDGHFHPSPLMGGFGLKNPPPQILIKNTPVPANPPAEFSATKFASFITQYSTGQVSVEIEWELQKENSKRWNPEVQYTSNYAKSANVDFTVDNNGLYTEPRPIGTRYLTRP

SEQ ID NO: 177 - protein, 734 aa, Adeno-associated virus 2
MAADGYLPDWLEDTLSEGIRQWWKLKPGPPPPKPAERHKDDSRGLVLPGYKYLGPFNGLDKGEPVNEADAAALEHDKAYDRQLDSGDNPYLKYNHADAEFQERLKEDTSFGGNLGRAVFQAKKRVLEPLGLVEEPVKTAPGKKRPVEHSPVEPDSSSGTGKAGQQPARKRLNFGQTGDADSVPDPQPLGQPPAAPSGLGTNTMATGSGAPMADNNEGADGVGNSSGNWHCDSTWMGDRVITTSTRTWALSTYNNHLYKQISSQSGASNDNHYFGYSTPWGYFDFNRFHCHFSPRDWQRLINNNWGFRPKRLNFKLFNIQVKEVTQNDGTTTIANNLTSTVQVFTDSEYQLPYVLGSAHQGCLPPFPADVFMVPQYGYLTLNNGSQAVGRSSFYCLEYFPSQMLRTGNNFTFSYTFEDVPFHSSYAHSQSLDRLMNPLIDQYLYYLSRTNTPSGTTTQSRLQFSQAGASDIRDQSRNWLPGPCYRQQRVSKTSADNNNSEYSWTGATKYHLNGRDSLVNPGPAMASHKDDEEKFFPQSGVLIFGKQGSEKTNVDIEKVMITDEEEIRTTNPVATEQYGSVSTNLQRGNRQAATADVNTQGVLPGMVWQDRDVYLQGPIWAKIPHTDGHFHPSPLMGGFGLKHPPPQILIKNTPVPANPSTTFSAAKFASFITQYSTGQVSVEIEWELQKENSKRWNPEIQYTSNYNKSINVDFTVDTNGVYSEPRPIGTRYLTRN

SEQ ID NO: 178 - protein, 738 aa, Adeno-associated virus 2
MAADGYLPDWLEDTLSEGIRQWWKLKPGPPPPKPAERHKDDSRGLVLPGYKYLGPFNGLDKGEPVNEADAAALEHDKAYDRQLDGGDNPYLKYNHADAEFQERLKEDTSFGGNLGRAVFQAKKRVLEPLGLVEEPVKTAPGKKRPVEHSPVEPDSSSGTGKAGQQPARKRLNFGQTGDADSVPDPQPLGQPPAAPSGLGTNTMATGSGAPMADNNEGADGVGNSSGNWHCDSTWMGDRVITTSTRTWALPTYNNHLYKQISSQSGASNDNHYFGYSTPWGYFDFNRFHCHFSPRDWQRLINNNWGFRPKRLNFKLFNIQVKEVTQNDGTTTIANNLTSTVQVFTDSEYQLPYVLGSAHQGCLPPFPADVFMVPQYGYLTLNNGSQAVGRSSFYCLEYFPSQMLRTGNNFTFSYTFEDVPFHSSYAHSQSLDRLMNPLIDQYLYYLSRTNTPSGTTTQSGLQFSQAGASDIRDQSRNWLPGPCYRQQRVSKTSADNNNSEYSWTGATKYHLNGRDSLVNPGPAMASHKDDEEKFFPQSGVLIFGKQGSEKTNVDIEKVMITDEEEIRTTNPVATEQYGSVSTNLQRGNRQAATADVNTQGVLPGMVWQDRDVYLQGPIWAKIPHTDGHFHPSPLMGGFGLKHPPPQILIKNTPVPANPSTTFSAAKFASFITQYSTGQVSVEIEWELQKENSKRWNPEIQYTSNYNKSVNVDFTVDTNGVYSEPRPIGTRYLTRNLLRP

SEQ ID NO: 179 - DNA, 2208 bp, Adeno-associated virus
atggctgccgatggttatcttccagattggctcgaggacactctctctgaaggaataagacagtggtggaagctcaaacctggcccaccaccaccaaagcccgcagagcggcataaggacgacagcaggggtcttgtgcttcctgggtacaagtacctcggacccttcaacggactcgacaagggggagccggtcaacgaggcagacgccgcggccctcgagcacgacaaggcctacgaccggcagctcgacagcggagacaacccgtacctcaagtacaaccacgccgacgcagagtttcaggagcgccttaaagaagatacgtcttttgggggcaacctcggacgagcagtcttccaggcgaaaaagagggttcttgaacctctgggcctggttgaggaacctgttaagacggctccgggaaaaaagaggccggtagagcactctcctgtggagccagactcctcctcgggaaccggaaaagcgggccagcagcctgcaagaaaaagattaaattttggtcagactggagacgcagactccgtacctgacccccagcctctcggacagccaccagcagccccctctggtctgggatctactacaatggctacaggcagtggcgcaccaatggcagacaataacgagggtgccgatggagtgggtaattcctcaggaaattggcattgcgattcccaatggctgggcgacagagtcatcaccaccagcacccgaacctgggccctgcccacatacaacaaccacctctacaagcaaatctccagccaatcaggagccagcaacgacaaccactactttggctacagcaccccctgggggtattttgacttcaacagattccactgccacttttcaccacgtgactggcaaagactcatcaacaacaactggggattccggcccaaaagactcaacttcaagctctttaatattcaagtcaaagaggtcacgcagaatggcggtacgacgacgattgccaataaccttaccagcacggttcaggtgtttactgactcggagtaccagctcccgtacgtcctgggctcggcgcatcaaggatgcctcccgccgtttccagcggacgtcttcatggtcccacagtatggatacctcaccctgaacaacgggagtcaggcggtaggacgctcttccttttactgcctggagtactttccttctcagatgctgcgtactggaaacaactttcagttcagctacacttttgaagacgtgcctttccacagcagctacgctcacagccagagtctggatcggctgatgaatcctctgatcgaccagtacctgtattatctgaacaagacacaaacaaatagtggaactcttcagcagtctcggctactgtttagccaagctggaccaaccaacatgtctcttcaagctaaaaactggctgcctggaccttgctacagacagcagcgtctgtcaaaacaggcaaacggcaacaacaacagcaactttccctggactgcagctacaaagtatcatctaaatggccgggactcgttggttaatccaggaccagctatggccagtcacaaggatgacgaagaaaagtttttccccatgcatggaaccctgatatttggtaaacaaggaacaaatgccaacgacgcggatttggaaaatgtcatgattacagatgaagaagaaatcagggccaccaatcccgtggctacggagcagtacgggactgtgtcaaataatttgcaaaactcaaacactggtccaactactggaactgtcaatcaccaaggagcgttacctggtatggtgtggcaggatcgagacgtgtacctgcagggacccatttgggccaagattcctcacaccgatggacactttcatccttctccactgacgggaggttttggactcaaacacccgcctcctcagatcatgatcaaaaacactcccgttccagccaatcctcccacaaacttcagttctgccaagtttgcttctttcatcacacagtattccacgggacaggtcagcgtggagatcgagtgggagctgcagaaggagaacagcaaacgctggaatcccgaaattcagtacacttccaactacaacaagtctgttaatgtggactttactgtggacactaatggtgtgtattcagagcctcgccccattggcaccagatacctgactcgtaatctgtaa

SEQ ID NO: 180 - protein, 735 aa, Adeno-associated virus
MAADGYLPDWLEDTLSEGIRQWWKLKPGPPPPKPAERHKDDSRGLVLPGYKYLGPFNGLDKGEPVNEADAAALEHDKAYDRQLDSGDNPYLKYNHADAEFQERLKEDTSFGGNLGRAVFQAKKRVLEPLGLVEEPVKTAPGKKRPVEHSPVEPDSSSGTGKAGQQPARKRLNFGQTGDADSVPDPQPLGQPPAAPSGLGSTTMATGSGAPMADNNEGADGVGNSSGNWHCDSQWLGDRVITTSTRTWALPTYNNHLYKQISSQSGASNDNHYFGYSTPWGYFDFNRFHCHFSPRDWQRLINNNWGFRPKRLNFKLFNIQVKEVTQNGGTTTIANNLTSTVQVFTDSEYQLPYVLGSAHQGCLPPFPADVFMVPQYGYLTLNNGSQAVGRSSFYCLEYFPSQMLRTGNNFQFSYTFEDVPFHSSYAHSQSLDRLMNPLIDQYLYYLNKTQTNSGTLQQSRLLFSQAGPTNMSLQAKNWLPGPCYRQQRLSKQANGNNNSNFPWTAATKYHLNGRDSLVNPGPAMASHKDDEEKFFPMHGTLIFGKQGTNANDADLENVMITDEEEIRATNPVATEQYGTVSNNLQNSNTGPTTGTVNHQGALPGMVWQDRDVYLQGPIWAKIPHTDGHFHPSPLTGGFGLKHPPPQIMIKNTPVPANPPTNFSSAKFASFITQYSTGQVSVEIEWELQKENSKRWNPEIQYTSNYNKSVNVDFTVDTNGVYSEPRPIGTRYLTRNL

SEQ ID NO: 181 - DNA, 2208 bp, Adeno-associated virus
atggctgccgatggttatcttccagattggctcgaggacactctctctgaaggaataagacagtggtggaagctcaaacctggcccaccaccaccaaagctcgcagagcggcatcaggacgacagcaggggtcttgtgcttcctgggtacaagtacctcggacccttcaacggactcgacaaaggagagccggtcaacgaggcagacgccgcggccctcgagcacgacaaggcctacgaccggcagctcgacagcggagacaacccgtacctcaagtacaaccacgccgacgcggagtttcaggagcgtcttaaagaagatacgtcttttgggggcaacctcggacgagcagtcttccaggcgaaaaagagggttcttgaacctctgggcctggttgaggaacctgttaagacggctccgggaaaaaagaggccggtagagcactctcctgtggagccagactcctcctcgggaaccggaaaggcgggccatcagcctgcgagaaagagattgaattttggtcagactggagacgcagactccgtacctgacccccagcctctcggacagccaccagcagcccccacaagtctgggatctactacaatggctacaggcagtggcgcaccaatggcagacaataacgagggtgccgatggagtgggtaattcctcaggaaattggcattgcgattcccaatggctgggcgacagagtcatcaccaccagcacccgaacctgggccctgcccacctacaacaaccacctctacaagcaaatctccagccaatcaggagcctcgaacgacaaccactactttggctacagcaccccctgggggtattttgacttcaacagattccactgtcacttctccccacgtgattggcaaagactcatcaacaacaactggggattccgacccaagagactcaacttcaagctctttaacattcaagtcaaagaggtcacgcagaatgacggtacgacgacgattgccaataaccttaccagcacggttcaggtgtttactgactcggagtaccagctcccgtacgtcctcggctcggcgcatcaaggatgcctcccgccgtttccagcggacgtcttcacggtcccacagtatggatacctcaccctgaacaacgggagtcaggcggtaggacgctcttccttttactgcctggagtactttccttctcagatgctgcgtactggaaacaaccttaccttcagctacacctttgaggacgttcctttccacagcagctacgctcacagccagagtttggaccggctgatgaatcctctgatcgaccagtatctatattatctgaacaggacacaatcaaatagtggaactcttcagcagtctaggctactgtttagccaagctggacccaccagcatgtctcttcaagctaaaaactggctgcctggaccttgctacagacagcagcgtctttcaaagcaggcaaacgacaacaacaacagcaactttccctggactgcggctacaaagtatcatctaaatggccgggactcgttggttaatccaggaccagctatggccagccacaaagacgatgaagaaaagtttttccccatgcatggaaccctgatatttggtaaacaaggaacaaatgctaacgacgcggatttggagcatgttatgattacagatgaagaagaaatcaggaccaccaatcctgtggctacagagcagtacggaaacgtgtcaaataatttgcaaaactcaaatactggtccaactacagaaaatgtcaatcaccagggagcgttacctggtatggtgtggcaggatcgagacgtgtacctgcagggacccatttgggccaagattcctcacaccgacggacactttcacccttctccactgatgggaggttttggactcaaacacccgcctcctcaaatcatgatcaaaaacactcccgttccagccaatcctcccacaaactacagttctgccaagtttgcttctttcatcacacagtattccacgggccaggtcagcgtggagattgagtgggagctgcggaaggagaacagcaaacgctggaaccccgagatccagtatacttccaactacaacaaatctgttaatgtggactttactgtggacactaatggtgtgtattcagagcctcgccccattggcaccagatacctgactcgtaatctgtaa

SEQ ID NO: 182 - protein, 735 aa, Adeno-associated virus
MAADGYLPDWLEDTLSEGIRQWWKLKPGPPPPKLAERHQDDSRGLVLPGYKYLGPFNGLDKGEPVNEADAAALEHDKAYDRQLDSGDNPYLKYNHADAEFQERLKEDTSFGGNLGRAVFQAKKRVLEPLGLVEEPVKTAPGKKRPVEHSPVEPDSSSGTGKAGHQPARKRLNFGQTGDADSVPDPQPLGQPPAAPTSLGSTTMATGSGAPMADNNEGADGVGNSSGNWHCDSQWLGDRVITTSTRTWALPTYNNHLYKQISSQSGASNDNHYFGYSTPWGYFDFNRFHCHFSPRDWQRLINNNWGFRPKRLNFKLFNIQVKEVTQNDGTTTIANNLTSTVQVFTDSEYQLPYVLGSAHQGCLPPFPADVFTVPQYGYLTLNNGSQAVGRSSFYCLEYFPSQMLRTGNNLTFSYTFEDVPFHSSYAHSQSLDRLMNPLIDQYLYYLNRTQSNSGTLQQSRLLFSQAGPTSMSLQAKNWLPGPCYRQQRLSKQANDNNNSNFPWTAATKYHLNGRDSLVNPGPAMASHKDDEEKFFPMHGTLIFGKQGTNANDADLEHVMITDEEEIRTTNPVATEQYGNVSNNLQNSNTGPTTENVNHQGALPGMVWQDRDVYLQGPIWAKIPHTDGHFHPSPLMGGFGLKHPPPQIMIKNTPVPANPPTNYSSAKFASFITQYSTGQVSVEIEWELRKENSKRWNPEIQYTSNYNKSVNVDFTVDTNGVYSEPRPIGTRYLTRNL

SEQ ID NO: 183 - DNA, 2208 bp, Adeno-associated virus
atggctgccgatggttatcttccagattggctcgaggacactctctctgaaggaataagacagtggtggaagctcaaacctggcccaccaccaccaaagcccgcagagcggcatcaggacgacagcaggggtcttgtgcttcctgggtacaagtacctcggacccttcaacggactcgacaaaggagagccggtcaacgaggcagacgccgcggccctcgagcacgacaaggcctacgaccggcagctcgacagcggagacaacccgtacctcaagtacaaccacgccgacgcggagtttcaggagcgtcttaaagaagatacgtcttttgggggcaacctcggacgagcagtcttccaggcgaaaaagagggttcttgaacctctgggcctggttgaggaacctgttaagacggctccgggaaaaaagaggccggtagagcactctcctgtggagccagactcctcctcgggaaccggaaaagcgggccatcagcctgcgagaaagagattgaattttggtcagactggagacgcagactccgtacctgacccccagcctctcggacagccaccagcagcccccacaagtttgggatctactacaatggctacaggcagtggcgcaccaatggcagacaataacgagggtgccgatggagtgggtaattcctcaggaaattggcattgcgattcccaatggctgggcgacagagtcatcaccaccagcacccgaacctgggccctgcccacctacaacaaccacctctacaagcaaatctccagccaatcaggagcctcgaacgacaaccactactttggctacagcaccccctgggggtattttgacttcaacagattccactgtcacttctccccacgtgattggcaaagactcatcaacaacaactggggattccgacccaagagactcaacttcaagctctttaacattcaagtcaaggaggtcacgcagaatgacggtacgacgacgattgccaataaccttaccagcacggttcaggtgtttactgactcggagtaccagctcccgtacgtcctcggctcggcgcatcaaggatgcctcccgccgtttccagcggacgtcttcatggtcccacagtatggatacctcaccctgaacaacgggagtcaggcggtaggacgctcttccttttactgcctggagtactttccttctcagatgctgcgtactggaaacaactttaccttcagctacacctttgaggacgttcctttccacagcagctacgctcacagccagagtttggaccggctgatgaatcctctgatcgaccagtatctatattatctgaacaggacacaatcaaatagtggaactcttcagcagtctaggctactgtttagccaagctggacccaccagcatgtctcttcaagctaaaaactggctgcctggaccttgctacagacagcagcgtctttcaaagcaggcaaacgacaacaacaacagcaactttccctggactgcggctacaaagtatcgtctaaatggccgggactcgttggttaatccaggaccagctatggccagccacaaagacgatgaagaaaagtttttccccatgcatggaaccctgatatttggtaaacaaggaacaaatgctaacgacgcggatttggagcatgttatgattacagatgaagaagaaatcaggaccaccaatcctgtggctacagagcagtacggaaacgtgtcaaataatttgcaaaactcaaatactggtccaactacagaaaatgtcaatcaccagggagcgttacctggtatggtgtggcaggatcgagacgtgtacctgcagggacccatttgggccaagattcctcacaccgacggacactttcacccttctccactgatgggaggttttggactcaaacacccgcctcctcaaatcatgatcaaaaacactcccgttccagccaatcctcccacaaacttcagttctgccaagtttgcttctttcatcacacagtattccacgggccaggtcagcgtggagattgagtgggagctgcagaaggagaacagcaaacgctggaaccccgagatccagtatacttccaactacaacaaatctgttaatgtggactttactgtggacactaatggtgtgtattcagagcctcgccccattggcaccagatacctgactcgtaatctgtaa

SEQ ID NO: 184 - protein, 735 aa, Adeno-associated virus
MAADGYLPDWLEDTLSEGIRQWWKLKPGPPPPKPAERHQDDSRGLVLPGYKYLGPFNGLDKGEPVNEADAAALEHDKAYDRQLDSGDNPYLKYNHADAEFQERLKEDTSFGGNLGRAVFQAKKRVLEPLGLVEEPVKTAPGKKRPVEHSPVEPDSSSGTGKAGHQPARKRLNFGQTGDADSVPDPQPLGQPPAAPTSLGSTTMATGSGAPMADNNEGADGVGNSSGNWHCDSQWLGDRVITTSTRTWALPTYNNHLYKQISSQSGASNDNHYFGYSTPWGYFDFNRFHCHFSPRDWQRLINNNWGFRPKRLNFKLFNIQVKEVTQNDGTTTIANNLTSTVQVFTDSEYQLPYVLGSAHQGCLPPFPADVFMVPQYGYLTLNNGSQAVGRSSFYCLEYFPSQMLRTGNNFTFSYTFEDVPFHSSYAHSQSLDRLMNPLIDQYLYYLNRTQSNSGTLQQSRLLFSQAGPTSMSLQAKNWLPGPCYRQQRLSKQANDNNNSNFPWTAATKYRLNGRDSLVNPGPAMASHKDDEEKFFPMHGTLIFGKQGTNANDADLEHVMITDEEEIRTTNPVATEQYGNVSNNLQNSNTGPTTENVNHQGALPGMVWQDRDVYLQGPIWAKIPHTDGHFHPSPLMGGFGLKHPPPQIMIKNTPVPANPPTNFSSAKFASFITQYSTGQVSVEIEWELQKENSKRWNPEIQYTSNYNKSVNVDFTVDTNGVYSEPRPIGTRYLTRNL

SEQ ID NO: 185 - DNA, 2208 bp, Adeno-associated virus
atggctgccgatggttatcttccagattggctcgaggacactctctctgaaggaataagacagtggtggaagctcaaacctggcccaccaccaccaaagcccgcagagcggcatcaggacgacagcaggggtcttgtgcttcctgggtacaagtacctcggacccttcaacggactcgacaaaggagagccggtcaacgaggcagacgccgcggccctcgagcacgacaaggcctacgaccggcagctcgacagcggagacaacccgtacctcaagtacaaccacgccgacgcggagtttcaggagcgtcttaaagaagatacgtcttttgggggcaacctcggacgagcagtcttccaggcgaaaaagagggttcttgaacctctgggcctggttgaggaacctgttaagacggctccgggaaaaaagaggccggtagagcactctcctgtggagccagactcctcctcgggaaccggaaaagcgggccatcagcctgcgagaaagagattgaattttggtcagactggagacgcagactccgtacctgacccccagcctctcggacagccaccagcagcccccacaagtttgggatctactacaatggctacaggcagtggcgcaccaatggcagacaataacgagggtgccgatggagtgggtaattcctcaggaaattggcattgcgattcccaatggctgggcgacagagtcatcaccaccagcacccgaacctgggccctgcccacctacaacaaccacctctacaagcaaatctccagccaatcaggagcctcgaacgacaaccactactttggctacagcaccccctgggggtattttgacttcaacagattccactgtcacttctccccacgtgattggcaaagactcatcaacaacaactggggattccgacccaagagactcaacttcaagctctttaacattcaagtcaaagaggtcacgcagaatgacggtacgacgacgattgccaataaccttaccagcacggttcaggtgtttactgactcggagtaccagctcccgtacgtcctcggctcggcgcatcaaggatgcctcccgccgtttccagcggacgtcttcatggtcccacagtatggatacctcaccctgaacaacgggagtcaggcggtaggacgcccttccttttactgcctggagtactttccttctcagatgctgcgtactggaaacaactttaccttcagctacacctttgaggacgttcctttccacagcagctacgctcacagccagagtttggaccggctgatgaatcctctgatcgaccagtatctatattatctgaacaggacacaatcaaatagtggaactcttcagcagtctaggctactgtttagccaagctggacccaccagcatgtctcttcaagctaaaaactggctgcctggaccttgctacagacagcagcgtctttcaaagcaggcaaacgacaacaacaacagcaactttccctggactgcggctacaaagtatcatctaaatggccgggactcgttggttaatccaggaccagctatggccagccacaaagacgatgaagaaaagtttttccccatgcatgggaccctgatatttggtaaacaaggaacaaatgctaacgacgcggatttggagcatgttatgattacagatgaagaagaaatcaggaccaccaatcctgtggctacagagcagtacggaaacgtgtcaaataatttgcaaaactcaaatactggtccaactacagaaaatgtcaatcaccagggagcgttacctggtatggtgtggcaggatcgagacgtgtacctgcagggacccatttgggccaagattcctcacaccgacggacactttcacccttctccactgatgggaggttttggactcaaacacccgcctcctcaaatcatgatcaaaaacactcccgttccagccaatcctcccacaaacttcagttctgccaagtttgcttctttcatcacacagtattccacgggccaggtcagcgtggagattgagtgggagctgcagaaggagaacagcaaacgctggaaccccgagatccagtatacttccaactacaacaaatctgttaatgtggactttactgtggacactaatggtgtgtattcagagcctcgccccattggcaccagatacctgactcgtaatctgtaa

SEQ ID NO: 186 - protein, 735 aa, Adeno-associated virus
MAADGYLPDWLEDTLSEGIRQWWKLKPGPPPPKPAERHQDDSRGLVLPGYKYLGPFNGLDKGEPVNEADAAALEHDKAYDRQLDSGDNPYLKYNHADAEFQERLKEDTSFGGNLGRAVFQAKKRVLEPLGLVEEPVKTAPGKKRPVEHSPVEPDSSSGTGKAGHQPARKRLNFGQTGDADSVPDPQPLGQPPAAPTSLGSTTMATGSGAPMADNNEGADGVGNSSGNWHCDSQWLGDRVITTSTRTWALPTYNNHLYKQISSQSGASNDNHYFGYSTPWGYFDFNRFHCHFSPRDWQRLINNNWGFRPKRLNFKLFNIQVKEVTQNDGTTTIANNLTSTVQVFTDSEYQLPYVLGSAHQGCLPPFPADVFMVPQYGYLTLNNGSQAVGRPSFYCLEYFPSQMLRTGNNFTFSYTFEDVPFHSSYAHSQSLDRLMNPLIDQYLYYLNRTQSNSGTLQQSRLLFSQAGPTSMSLQAKNWLPGPCYRQQRLSKQANDNNNSNFPWTAATKYHLNGRDSLVNPGPAMASHKDDEEKFFPMHGTLIFGKQGTNANDADLEHVMITDEEEIRTTNPVATEQYGNVSNNLQNSNTGPTTENVNHQGALPGMVWQDRDVYLQGPIWAKIPHTDGHFHPSPLMGGFGLKHPPPQIMIKNTPVPANPPTNFSSAKFASFITQYSTGQVSVEIEWELQKENSKRWNPEIQYTSNYNKSVNVDFTVDTNGVYSEPRPIGTRYLTRNL

SEQ ID NO: 187 - DNA, 2208 bp, Adeno-associated virus
atggctgccgatggttatcttccagattggctcgaggacactctctctgaaggaataagacagtggtggaagctcaaacctggcccaccaccaccaaagcccgcagagcggcataaggacgacagcaggggtcttgtgcttcctgggtacaagtacctcggacccttcaacggactcgacaagggagagccggtcaacgaggcagacgccgcggccctcgagcacgacaaggcctacgaccggcagctcgacagcggagacaacccgtacctcaagtacaaccacgccgacgcggagtttcaggagcgccttaaagaagatacgtcttttgggggcaacctcggacgagcagtcttccaggcaaaaaagagggttcttgaacctctgggcctggttgaggagcctgttaaaacggctccgggaaaaaagaggccggtagagcactctcctgcggagccagactcctcctcgggaaccggaaaagcgggccagcagcctgcaagaaaaagattgaatttcggtcagactggagacgcagactccgtacctgacccccagcctctcggacagccaccagcagccccctctggtctgggaactaatacgatggcttcaggcagtggcgcaccaatggcagacaataacgagggcgccgacggagtgggtaattcctcgggaaattggcattgcgattccacatggatgggcgacagagtcatcaccaccagcacccgaacttgggccctgcccacctacaacaaccatctctacaagcaaatctccagccaatcaggagccagcaacgacaaccactactttggctacagcaccccttgggggtattttgacttcaacagattccactgccacttttcaccacgtgactggcaaagactcatcaacaacaactggggattccggcccaagagactcaacttcaagctctttaacattcaagtcaaagaggtcacgcagaatgacggtacgacgacgattgccaataaccttaccagcacggttcaggtgtttactgactcggagtaccagctcccgtacgtcctcggctcggcgcatcaaggatgcctcccgccgttcccagcagacgtcttcatggtgccacagtatggatacctcaccctgaacaacgggagtcaggcagtaggacgctcttcattttactgcctggagtactttccttctcagatgctgcgtaccggaaacaactttaccttcagctacacctttgaggacgttcctttccacagcagctacgctcacagccagagtttggaccgtctcatgaatcctctcatcgaccagtacctgtattacttgagcagaacaaacactccaagcggaaccaccacgcagtccaggcttcagttttctcaggccggagcaagtgacattcgggaccagtctaggaactggcttcctggaccctgttaccgccagcagcgagtatcaaagacatctgcggataacaacaacagtgaatactcgtggactggagctaccaagtaccacctcaatggcagagactctctggtgaatccgggcccggccatggccagccacaaggacgatgaagaaaagttttttcctcagagcggggttctcatctttgggaagcaaggctcagagaaaacaaatgtggacattgaaaaggtcatgattacagacgaagaggaaatcaggaccaccaatcccgtggctacggagcagtatggttctgtatctaccaacctgcagggcggcaacacacaagcagctaccgcagatgtcaacacacaaggcgttcttccaggcatggtctggcaggacagagacgtgtacctgcaggggcccatctgggcaaagattccacacacggacggacattttcacccctctcccctcatgggcggattcggacttaaacaccctcctccacagattctcatcaagaacaccccggtacctgcgaatccttcgaccaccttcagtgcggcaaagtttgcttctttcatcacacagtattccacggggcaggtcagcgtggagatcgagtgggagctgcagaaggagaacagcaaacgctggaatcccgagatccagtacacttccaactacaacaaatctgttaatgtggactttactgttgacactaatggcgtgtattcagagcctcgccccattggcaccagatacctgactcgtaatctgtaa

SEQ ID NO: 188 - protein, 735 aa, Adeno-associated virus
MAADGYLPDWLEDTLSEGIRQWWKLKPGPPPPKPAERHKDDSRGLVLPGYKYLGPFNGLDKGEPVNEADAAALEHDKAYDRQLDSGDNPYLKYNHADAEFQERLKEDTSFGGNLGRAVFQAKKRVLEPLGLVEEPVKTAPGKKRPVEHSPAEPDSSSGTGKAGQQPARKRLNFGQTGDADSVPDPQPLGQPPAAPSGLGTNTMASGSGAPMADNNEGADGVGNSSGNWHCDSTWMGDRVITTSTRTWALPTYNNHLYKQISSQSGASNDNHYFGYSTPWGYFDFNRFHCHFSPRDWQRLINNNWGFRPKRLNFKLFNIQVKEVTQNDGTTTIANNLTSTVQVFTDSEYQLPYVLGSAHQGCLPPFPADVFMVPQYGYLTLNNGSQAVGRSSFYCLEYFPSQMLRTGNNFTFSYTFEDVPFHSSYAHSQSLDRLMNPLIDQYLYYLSRTNTPSGTTTQSRLQFSQAGASDIRDQSRNWLPGPCYRQQRVSKTSADNNNSEYSWTGATKYHLNGRDSLVNPGPAMASHKDDEEKFFPQSGVLIFGKQGSEKTNVDIEKVMITDEEEIRTTNPVATEQYGSVSTNLQGGNTQAATADVNTQGVLPGMVWQDRDVYLQGPIWAKIPHTDGHFHPSPLMGGFGLKHPPPQILIKNTPVPANPSTTFSAAKFASFITQYSTGQVSVEIEWELQKENSKRWNPEIQYTSNYNKSVNVDFTVDTNGVYSEPRPIGTRYLTRNL

SEQ ID NO: 189 - DNA, 3161 bp, Adeno-associated virus
gattgaatttagcggccgcgaattcgcccttgctgcgtcaactggaccaatgagaactttccattcaatgattgcgtcgacaagatggtgatctggtgggaggagggaaagatgaccgccaaggtcatggagtcggccaaagccattctcggaggaagcaaggtgcgcgtggaccagaaatgtaagtcctcggcccagatagacccgactcccgtgattgtcacctccaacaccaacatgtgcgccgtgattgacgggaactcaacgaccttcgagcaccagcagccgttgcaagaccggatgttcaaatttgaactcacccgccgtctggatcatgactttgggaaggtcaccaagcaggaagtcaaagactttttccggtgggcaaaggatcacgtggttgaggtggagcatgaattctacgtcaaaaagggtggagccaagaaaagacccgcccccagtgacgcagatataagtgagcccaaacgggcgcgcgggtcagttgcgcagccatcgacgtcagacgcggaagcttcgatcaactacgcggacaggtaccaaaacaaatgttctcgtcacgtgggcatgaatctgatgctgtttccctgcagacaatgcgagagaatgaatcaaaattcaaatatctgcttcactcacggacagaaggactgtttagagtgctttcccgtgtcagaatctcaacccgtttctgtcgtcaaaaaggcgtatcagaaactttgctacattcatcatatcatgggaaaggtgccagacgcttgcactgcctgcgatctggtcaatgtggatttggatgactgcatctctgaacaataaatgatttaaatcaggtatggctgccgatggttatcttccagattggctcaaggacactctctctgaaggaataagacagtggtggaagctcaaacctggcccaccaccaccaaagcccgcagagcggcataaggacgacagcgggggtcttgtgcttcctgggtacaagtacctcggacccttcaacggactcgacaagggagagccggtcaacgaggcagacgccgcggccctcgagtacgacaaggcctacgaccggcagctcgacagcggagacaacccgtacctcaagtacaaccacgccgacgcggagtttcaggagcgccttaaagaagatacgtcttttgggggcaacctcggacgagcagtcttccaggcgaaaaagagggttcttgaacctctgggcctggttgaggaacctgttaagacggctccgggaaaaaagaggccggtagagcactctcctgtggagccagactcctcctcgggaacaggaaaagcgggccagcagcctgcgagaaagagattgaattttggtcagactggagacgcagactccgtacctgacccccagcctctcggacagccaccagcagccccctctggtctgggaactaatacgatggctacaggcagtggcgcaccaatggcagacaataacgagggcgccgacggagtgggtaattcctcgggaagttggcattgcgattccacatggatgggcgacagagtcatcaccaccagcacccgaacctgggctctgcccacctacaacaaccatctgtacaagcagatctccagccaatcaggagccagcaacgacaaccactactttggctacagcaccccttgggggtattttgacttcaacagattccactgccacttttcaccacgtgactggcaaagactcatcaacaacaactggggattccggcccaagagactcaacttcaagctctttaacattcaagtcaaggaggtcacgcagaatgacggtacgacgacgattgccaataaccttaccagcacggttcaggtgtttactgactcggagtaccagctcccgtacgtccccggctcggcgcatcaaggatgcctcccgccgttcccagcagacgtcttcatggtgccacagtatggatacctcaccctgaacaacgggagtcaggcagtaggacgctcttcattttactgcctggagtactttccttctcagatgcttcgtaccggaaacaactttaccttcagctacacctttgaggatgttcctttccacagcagctacgctcacagccagagtttggaccgtctcatgaatcctctcatcgaccagtacctgtattacttgagcagaacaaacactccaagcggaaccaccacgcagtccaggcttcagttttctcaggccggagcaagtgacattcgggaccagtctaggaactggcttcctggaccctgttaccgccagcagcgagtatcaaagacagctgcggacaacaacaacagtgaatactcgtggactggagctaccaagtaccacctcaatggcagagactctctggtgaatccgggcccggccatggccagccacaaggacgatgaagaaaagttttttcctcaaagcggggttctcatctttgggaagcaaggctcagagaaaacaaatgtggacattgaaaaggtcatgattacagacgaagaggaaatcagaaccaccaatcccgtggccacggagcagtatggttctgtatctaccaacctccagagcggcaacacacaagcagctactgcagatgtcaacacacaaggcgttcttccaggcatggtctggcaggacagagacgtgcacctgcaggggcctatctgggcaaagattccacacacggacggacattttcacccctctcccctcatgggcggatttggacttaaacaccctcctccacagattctcatcaagaacaccccggtacctgcaaatccttcgaccaccttcagtgcggcaaagtttgcttccttcatcacacagtattccacagggcaggtcagcgtggagatcgagtgggagctgcagaaggagaacagcaaacgctggaaccccgagatccagtacacttccaactacaacaaatctgttaatgtggactttactgtggacactaatggtgtgtattcagagcctcgccccattggcaccagatacctgactcgtaatctgtaattgcttgttaatcaataaaccgtttaattcgtttcagttgaactttggtctctgcgaagggcgaattcgtttaaaccctgcaggactagtccctttagtgagg

SEQ ID NO: 190 - DNA, 3162 bp, Adeno-associated virus
gaattgaatttagcggccgcgaattcgcccttcgcagagaccaaagttcaactgaaacgaattaaacggtttattgattaacaagcaattacagattacgagtcaggtatctggtgccaatggggcgaggctctgaatacacgccattagtgtccacagtaaagtccacattaacagacttgttgtagttggaagtgtactgaatttcgggattccagcgtttgctgttttccttctgcagctcccactcgatctccacgctgacctgtcccgtggagtactgtgtgatgaaggaagcaaactttgccgcactgaaggtggtcgaaggattcgcaggtaccggggtgttcttgatgagaatctgtggaggagggtgtttaagtccgaatccacccatgaggggagaggggtgaaaatgtccgtccgtgtgtggaatctttgcccagatgggcccctgaaggtacacatctctgtcctgccagaccatgcctggaagaacgccttgtgtgttgacatctgcggtagctgcttgtctgttgcctctctggaggttggtagatacagaaccgtactgctccgtagccacgggattggttgtcctgatttcctcttcgtctgtaatcatgaccttttcaatgtccacatttgttttctctgagccttgcttcccaaagatgagaaccccgctctgaggaaaaaacttttcttcattgtccttgtggcttgccatggccgggcccggattcaccagagagtctctgccattgaggtggtacttggtagctccagtccacgagtattcactgttgttgttatccgcagatgtctttgatactcgctgctggcggtaacagggtccaggaagccagttcctagactggtcccgaatgtcactcgctccggcctgagaaaactgaagccttgactgcgtggtggttccacttggagtgtttgttgtgctcaagtaatacaggtactggtcgatgagaggattcatgagacggtccagactctggctgtgagcgtagccgctgtggaaaggaacgtcctcaaaagtgtagctgaaggtaaagttgtttccggtacgcagcatctgagaaggaaagtactccaggcagtaaaatgaagagcgtcctactgcctgactcccgttgttcagggtgaggtatccatactgtggcaccatgaagacgtctgctgggaacggcgggaggcatccttgatgcgccgagccgaggacgtacgggagctggtactccgagtcagtaaacacctgaaccgtgctggtaaggttattggcaatcgtcgtcgtaccgtcattctgcgtgacctctttgacttgaatgttaaagagcttgaagttgagtctcttgggtcggaatccccagttgttgttgatgagtctttgccagtcacgtggtgaaaagtggcagtggaatctgttgaagtcaaaatacccccaaggggtgctgtagccaaagtagtgattgtcgttcgaggctcctgattggctggaaatttgtttgtagaggtggttgttgtaggtgggcagggcccaggttcgggtgctggtggtgatgactctgtcgcccatccatgtggaatcgcaatgccaatttcccgaggaattacccactccgtcggcgccctcgttattgtctgccattggtgcgccactgcctgtagccatcgtattagttcccagaccagagggggctgctggtggctgtccgagaggctgggggtcaggtactgagtctgcgtctccagtctgaccaaaattcaatctttttcttgcaggctgctggcccgcctttccggttcccgaggaggagtctggctccacaggagagtgctctaccggcctcttttttcctggagccgtcttgacaggttccccaaccaggcccagaggttcaagaaccctctttttcgcctggaagactgctcgtccgaggttgcccccaaaagacgtatcttctttaaggcgctcctgaaactccgcgtcggcgtggttgtacttgaggtacgggttgtctccgctgtcgagctgccggtcgtaggctttgtcgtgctcgagggccgcggcgtctgcctcgttgaccggctctcccttgtcgagtccgttgaagggtccgaggtacttgtacccaggaagcacaagacccctgctgtcgtccttatgccgctctgcgggctttggtggtggtgggccaggtttgagcttccaccactgtcttattccttcagagagagtgtcctcgagccaatctggaagataaccatcggcagccatacctgatttaaatcatttattgttcaaagatgcagtcatccaaatccacattgaccagatcgcaggcagtgcaagcgtctggcacctttcccatgatatgatgaatgtagcacagtttctgatacgcctttttgacgacagaaacgggttgagattctgacacgggaaagcactctaaacagtctttctgtccgtgagtgaagcagatatttgaattctgattcattctctcgcattgtctgcagggaaacagcatcagattcatgcccacgtgacgagaacatttgttttggtacctgtctgcgtagttgatcgaagcttccgcgtctgacgtcgatggctgcgcaactgactcgcgcacccgtttgggctcacttatatctgcgtcactgggggcgggtcttttcttggctccaccctttttgacgtagaattcatgctccacctcaaccacgtgatcctttgcccaccggaaaaagtctttgacttcctgcttggtgaccttcccaaagtcatgatccagacggcgggtgagttcaaatttgaacatccggtcttgcaacggctgctggtgttcgaaggtcgttgagttcccgtcaatcacggcgcacatgttggtgttggaggtgacgatcacgggagtcgggtctatctgggccgaggacttgcatttctggtccacgcgcaccttgcttcctccgagaatggctttggccgactccacgaccttggcggtcatcttcccctcctcccaccagatcaccatcttgtcgacacagtcgttgaagggaaagttctcattggtccagttgacgcagcaagggcgaattcgtttaaacctgcaggactagtccctttagtgaggg

SEQ ID NO: 191 - DNA, 3164 bp, Adeno-associated virus
gcgaattgaatttagcggccgcgaattcgcccttcgcagagaccaaagttcaactgaaacgaattaaacggtttattgattaacaagcaattacaaattacgagtcaggtatctggtgccaatggggcgaggctctgaatacacgccattagtgtccacagtaaagtccacattaacagacttgttgtagttggaagtgtactgaatttcgggattccagcgtttgctgttttccttctgcagctcccactcgatctccacgctgacctgtcccgtggagtactgtgtgatgaaggaagcaaactttgccgcactgaaggtggtcgaaggattcgcaggtaccggggtgttcttgatgagaatctgtggaggagggtgtttaggtccgaatccacccatgaggggagaggggtgaaaatgtccgtccgtgtgtggaatctttgcccagatgggcccctgaaggtacacatctctgtcctgccagaccatgcctggaagaacgccttgtgtgttgacatctgcggtagctgcttgtctgttgcctctctggaggttggtagatacagaaccatactgctccgtagccacgggattggttgtcctgatttcctcttcgtctgtaatcatgaccttttcaatgtccacatttgttttctctgagccttgcttcccaaagatgagaaccccgctctgaggaaaaaacttttcttcattgtccttgtggcttgccatggccgggcccggattcaccagagagtctctgccattgaggtggtacttggtagctccagtccacgagtattcactgttgttgttatccgcagatgtctttgatactcgctgctggcggtaacagggtccaggaagccagttcctagactggtcccgaatgtcactcgctccggcctgagaaaactgaagccttgactgcgtggtggttccacttggagtgtttgttgtgctcaagtaatacaggtactggtcgatgagaggattcatgagacggtccagactctggctgtgagcgtagctgctgtggaaaggaacgtcctcaaaagtgtagctgaaggtaaagttgtttccggtacgcagcatctgagaaggaaagtactccgggcagtaaaatgaagagcgtcctactgcctgactcccgttgctcagggtgaggtatccatactgtggcaccatgaagacgtctgctgggaacggcgggaggcatccttgatgcgccgagccgaggacgtacgggagctggtactccgagtcagtaaacacctgaaccgtgctggtaaggttattggcaatcgtcgtcgtaccgtcattctgcgtgacctctttgacttgaatgttaaagagcttgaagttgagtctcttgggtcggaatccccagttgttgttgatgagtctttgccagtcacgtggtgaaaagtggcagtggaatctgttgaagtcaaaatacccccaaggggtgctgtagccaaagtagtgattgtcgttcgaggctcctgattggctggaaatttgtctgtagaggtggttgttgtaggtgggcagggcccaggttcgggtgctggtggtgatgactctgtcgcccatccatgtggaatcgcaatgccgatttcccgaggaattacccactccgtcggcgccctcgttattgtctgccattggtgcgccactgcctgtagccatcgtattagttcccagaccagagggggctgctggtggctgtccgagaggctgggggtcaggtactgagtctgcgtctccagtctgaccaaaattcaatctttttcttgcaggctgctggcccgcctttccggttcccgaggaggagtctggctccacaggagagtgctctaccggcctcttttttcccggagccgtcttaacaggttccccaaccaggcccagaggttcaagaaccctctttttcgcctggaagactgctcgtccgaggttgcccccaaaagacgtatcttctttaaggcgctcctgaaactccgcgtcggcgtggttgtacttgaggtacgggttgtctccgctgtcgagctgccggtcgtaggctttgtcgtgctcgagggccgcggcgtctgcctcgttgaccggctctcccttgtcgagtccgttgaagggtccgaggtacttgtacccaggaagcacaagacccctgctgtcgtccttatgccgctctgcgggctttggtggtggtgggccaggtttgagcttccaccactgtcttattccttcagagagagtgtcctcgagccaatctggaagataaccatcggcagccatacctgatttaaatcatttattgttcaaagatgcagtcatccaaatccacattgaccagatcgcaggcagtgcaagcgtctggcacctttcccatgatatgatgaatgtagcacagtttctgatacgcctttttgacgacagaaacgggttgagattctgacacgggaaagcactctaaacagtctttctgtccgtgagtgaagcagatatttgaattctgattcattctctcgcattgtctgcagggaaacagcatcagattcatgcccacgtgacgagaacatttgttttggtacctgtctgcgtagttgatcgaagcttccgcgtctgacgtcgatggctgcgcaactgactcgcgcacccgtttgggcccacttatatctgcgtcactgggggcgggtcttttcttggctccaccctttttgacgtagaattcatgctccacctcaaccacgtgatcctttgcccaccggaaaaagtctttgacttcctgcttggtgaccttcccaaagtcatgatccagacggcgggtgagttcaaatttgaacatccggtcttgcaacggctgctggtgttcgaaggtcgttgagttcccgtcaatcacggcgcacatgttggtgttggaggtgacgatcacgggagtcgggtctatctgggccgaggacttgcatttctggtccacgcgcaccttgcttcctccgagaatggctttggccgactccacgaccttggcggtcatcttcccctcctcccaccagatcaccatcttgtcgacacagtcgttgaagggaaagttctcattggtccagttgacgcagcaagggcgaattcgtttaaacctgcaggactagtccctttagtgaggg

SEQ ID NO: 192 - DNA, 3163 bp, Adeno-associated virus
accctcactaaagggactagtcctgcaggtttaaacgaattcgcccttgctgcgtcaactggagcaatgagaactttcccttcaacgactgtgtcgacaagatggtgatttggtgggaggaggggaagatgaccgccaaggtcgtggagtcggccaaagccattctcggaggaagcaaggtgcgcgtggaccagaaatgcaagtcctcggcccagatagatccgactcccgtgatcgtcacctccaacaccaacatgtgcgccgtgattgacgggaactcaacgaccttcgaacaccagcagccgttgcaagaccggatgttcaaatttgaactcacccgccgtctggatcatgactttgggaaggtcaccaagcaggaagtcaaagactttttccggtgggcaaaggatcacgtggttgaggtggagcatggattctacgtcaaaaagggtggagccaagaaaagacccgcccctagtgacgcagatataagtgagcccaaacgggtgcgcgagtcagttgcgcagccatcgacgtcggacgcggaagcttcgatcaactacgcggacaggtaccaaaacaaatgttctcgtcacgtgggcatgaatctgatgctgtttccctgcagacaatgcgagagaatgaatcaaaattcaaatatctgcttcactcacggacagaaagactgtttagagtgctttcccgtgtcagaatctcaacctgtttctgtcgtcaaaaaggcgtatcagaaactgcgctacattcatcatatcatgggaaaggtgccagacgcttgcactgcctgcgatctggtcaatgtggatttggatgactgcatctctgaacaataaatgatttaaatcaggtatggctgccgatggttatcttccagattggctcgaggacactctctctgaaggaataagacagtggtggaagctcaaacctggcccaccaccaccaaagcccgcagagcggcataaggacgacagcaggggtcttgtgcttcctgggtacaagtacctcggacccttcaacggactcgacaagggagagccggtcaacgaggcagacgccgcggccctcgagcacgacaaggcctacgaccggcagctcgacagcggagacaacccgtacctcaagtacaaccacgccgacgcggagtttcaggagcgtcttaaagaagatacgtcttttgggggcaacctcggacgagcagtcttccaggcgaaaaagagggttcttgaacctctgggcctggttgaggaacctgttaagacggctccgggaaaaaagaggccggtagagcactctcctgcggagccagactcctcctcgggaaccggaaaagcgggccagcagcctgcaagaaaaagactgaatttcggtcagactggagacgcagactccgtacctgacccccagcctctcggacagccaccagcagcccccacaagtttgggatctactacaatggctacaggcagtggcgcaccaatggcagacaataacgagggtgccgatggagtgggtaattcctcaggaaattggcattgcgattcccaatggctgggcgacagagtcatcaccaccagcacccgaacctgggccctgcccacctacaacaaccacctttacaagcaaatctccagccaatcaggagcctcaaacgacaaccactactttggctacagcaccccctgggggtattttgacttcaacagattccactgccacttttcaccacgtgactggcaaagactcatcaacaacaactggggattccgacccaagagactcaacttcaagctctttaacattcaagtcaaagaggtcacgcagaatgacggtacgacgacgattgccaataaccttaccagcacggttcaggtgtttactgactcggagtaccagctcccgtacgtcctcggctcggcgcatcaaggatgcctcccgccgtttccagcggacgtcttcatggtcccacagtatggatacctcaccctgaacaacgggagtcaggcggtaggacgctcttccttttactgcctggagtgctttccttctcagatgctgcgtactggaaacaactttcagttcagctacacttttgaagacgtgcctttccacagcagctacgctcacagccagagtttggatcggctgatgaatcctctgatcgaccagtacctgtattatctaaacagaacacaaacagctagtggaactcagcagtctcggctactgtttagccaagctggacccacaagcatgtctcttcaagctaaaaactggctgcctggaccgtgttatcgccagcagcgtttgtcaaagcaggcaaacgacaacaacaacagcaactttccctggactggagctaccaagtaccacctcaatggcagagactctttggtgaacccgggcccggccatggccagccacaaggacgatgaagaaaagtttttccccatgcatggaaccctaatatttggtaaagaaggaacaaatgctaccaacgcggaattggaaaatgtcatgattacagatgaagaggaaatcaggaccaccaatcccgtggctacagagcagtacggatatgtgtcaaataatttgcaaaactcaaatactgctgcaagtactgaaactgtgaatcaccaaggagcattacctggtatggtgtggcaggatcgagacgtgtacctgcagggacccatttgggccaagattcctcacaccgatggacactttcatccttctccactgatgggaggttttggactcaaacacccgcctcctcagattatgatcaaaaacactcccgttccagccaatcctcccacaaacttcagttctgccaagtttgcttccttcatcacacagtattccacgggacaggtcagcgtggagatcgagtgggagctgcagaaggagaacagcaaacgctggaatcccgaaattcagtacacttccaactacaacaaatctgttaatgtggactttactgtggacactaatggtgtgtattcagagcctcgccccattggcaccagatacctgactcgtaatctgtaattgcttgttaatcaataaaccgtttaattcgtttcagttgaactttggtctctgcgaagggcgaattcgcggccgctaaattcaattcgcc

SEQ ID NO: 193 - protein, 735 aa, Adeno-associated virus
MAADGYLPDWLEDTLSEGIRQWWKLKPGPPPPKPAERHKDDSRGLVLPGYKYLGPFNGLYKGEPVDEADAAALEHDKAYDRQLDSGDNPYLKYNHADAEFQERLKEDTSFGGNLGRAVFQAKKRVLEPLGLVGEPVKTAPGKKRPVEHSPVEPDSSSGTGKAGNQPARKRLNFGQTGDADSVPDPQPLGQPPAAPSGLGSTTMATGSGAPVADNNEGADGVGNSSGNWHCDSQWLGDRVITTSTRTWALPTYNNHLYKQISSQSGASNDNHYFGYSTPWGYFDFNRFHCHFSPRDRQRLINNNWGFRPKRLNFKLFNIQVKEVTQNDGTTTIANNLTSTVQVFTDSGYQLPYVLGLAHQGCLPPFPADVFMVPQYGYLTLNNGSQAVGRSSFYCLEYFPSQMLRTGNNFQFSYTFEDVPFHSSYAHSQSLDRLMNPLIDQYLYYLNKTQSNSGTLQQSRLLFSQAGPTSMSLQAKNWLPGPCYRQQRLSKQANDNNNSNFPWTAATKYHLNGRDSLVNPGPAMASHKDDEEKFFPMHGTLIFGKQGTNANDADLDNVMITDEEEIRTTNPVATEQYGYVSNNLQNSNTGPTTGTVNHQGALPGMVWQDRDVYLQGPIWAKIPHTDGHFHPSPLMGGFGLKHPPPQIMIKNTPVPANPPTNFSSAKFASFITQYSTGQVSVEIEWELQKEDSKRWNPEIQYTSNYNKPVNVDFTVDTNGVYSEPRPIGTRYLTRNL

SEQ ID NO: 194 - DNA, 2208 bp, Adeno-associated virus
atggctgccgatggttatcttccagattggctcgaggacactctctctgaaggaataagacagtggtggaagctcaaacctggcccaccaccaccaaagcccgcagagcggcataaggacgacagcaggggtcttgtgcttcctgggtacaagtacctcggacccttcaacggactctacaagggagagccggtcgacgaggcagacgccgcggccctcgagcacgacaaggcctacgaccggcagctcgacagcggagacaacccgtacctcaagtacaaccacgccgacgcggagtttcaggagcgccttaaagaagatacgtcttttgggggcaacctcggacgagcagtcttccaggccaaaaagagggttcttgaacctctgggcttggttggggagcctgttaaaacggctccgggaaaaaagaggccggtagagcactctcctgtggagccagactcctcctcgggaaccggaaaagcgggcaaccagcctgcaagaaaaagattgaattttggtcagactggagacgcagactccgtacctgacccccagcctctcggacagccaccagcagccccctctggtctgggatctactacaatggctacaggcagtggcgcaccagtggcagacaataacgagggtgccgatggagtgggtaattcctcaggaaattggcattgcgattcccaatggctgggcgacagagtcatcaccaccagcacccgaacctgggctctgcccacctacaataaccacctctacaagcaaatctccagccaatcaggagcctcaaacgacaaccactactttggctacagcaccccctgggggtattttgacttcaacagattccactgccacttttcaccacgtgaccggcaaagactcatcaacaacaactggggattccgaccaaaaagactcaacttcaagctctttaacattcaagtcaaagaggtcacgcagaatgacggtacgacgacgattgccaataaccttaccagcacggttcaggtgtttactgactcggggtaccagctcccgtacgtcctcggcttggcgcatcaaggatgcctcccgccgttcccagcagacgtcttcatggtgccacagtatggatacctcaccctgaacaacgggagtcaggcggtaggacgctcttccttttactgcctggagtactttccttctcagatgctgcgtactggaaacaactttcagttcagctacacctttgaagacgttcctttccacagcagctacgctcacagccagagtctggatcggctgatgaatcctctgatcgaccagtacctgtattatctgaacaagacacaatcaaatagtggaactcttcagcagtctcggctactgtttagccaagctggacccaccagcatgtctcttcaagctaaaaactggctgcctggaccttgctacagacagcagcgtctgtcaaagcaggcaaacgacaacaacaacagcaactttccctggactgcggctacaaagtatcatctaaatggccgggactcgttggttaatccaggaccagctatggccagccacaaagacgatgaagaaaagtttttccccatgcatggaaccctgatatttggtaaacaaggaacaaatgctaacgacgcggatttggacaatgtcatgattacagatgaagaagaaatccgcaccaccaatcccgtggctacggagcagtacggatatgtgtcaaataatttgcaaaactcaaatactggtccaactactggaactgtcaatcaccaaggagcgttacctggtatggtgtggcaggatcgagacgtgtacctgcagggacccatttgggccaagattcctcacaccgatggacactttcatccttctccacttatgggaggttttggactcaaacacccacctcctcagatcatgattaaaaacactcccgttccagccaatcctcccacaaacttcagttctgccaagtttgcttctttcatcacacagtattccacgggacaagtcagcgtggagatcgagtgggagctgcagaaggaggacagcaaacgctggaaccccgagatccagtacacttccaactataacaaacctgttaatgtggactttactgtggacactaatggtgtgtattcagagcctcgccccattggcaccagatacctgactcgtaatctgtaa

SEQ ID NO: 195 - DNA, 3161 bp, Adeno-associated virus
cgaattgatttagcggccgcgaattcgcccttcgcagagaccaaagttcaactgaaacgaattaaacggtttattgattaacaagcaattacagattacgagtcaggtatctggtgccaatggggcgaggctctgaatacacaccattagtgtccacagtaaagtccacattaacagatttgttgtagttggaagtgtactggatctcgggattccagcgtttgctgttctccttctgtagctcccactcgatctccacgctgacccgccccgtggaatactgtgtgatgaaggaagcaaactttgccgcactgaaggtggtcgaaggattcgcaggtaccggggtgtttttgatgagaatctgtggaggagggtgtttaagtccgaatccgcccatgaggggagaggggtgaaaatgtccgtccgtgtgcggaatctttgcccagataggcccctgcaggtacacgtctctgtcctgccagaccatgcctggaagaacgccttgtgtgttgacatctgcagtagatgcttgtgtgttgccgctctggaggttggtagatacagaaccatactgctccgtggccacgggattggtggttctgatttcctcttcgtctgtaatcatgaccttttcaatgtccacatttgttttctctgatccttgttttccaaagatgagaaccccgctctgaggaaaaaacttttcttcatcgtccttgtggctggccattgccgggcccggattcaccagagagtctctgccattgaggtggtacttggtagctccaatccacgagtattcactgttgttgttgtccgcagatgtctttgatactcgctgctggcggtaacagggtccaggaagccagttcctagactgatcccgaatgtcactcgctccggcctgagaaaactgaagcctggactgcgtggtggttccgcttggagtgtttgttctgctcaagtaatacaggtactggtcgatgagaggattcatgagacggtccaaactctggctgtgagcgtagctgctgtggaaaggaacatcctcaaaggtgtagctgaaggtaaagttgtttccggtacgcagcatctgagaagggaagtactccaggcagtaaaatgaagagcgtcctactgcctgactcccgttgttcagggtgaggtatccatactgtggcaccatgaagacgtctgctgggaacggcgggaggcatccttgatgcgccgagccgaggacgtacgggagctggtactccgagtcagtaaacacctgaaccgtgctggtaaggttattggcaatcgtcgtcgtaccatcattctgcgtgacctctctgacttgaatgttaaagagcttgaagttgagtctcttgggccggaatccccagttgttgttgatgagtctttgccagtcacgtggtgaaaagtggcagtggaatctgttgaagtcaaaatacccccaaggggtgctgtagccaaagtagtggttgtcgttgctggctcctgattggctggaaatctgcttgtacagatggttgttgtaggtgggcagagcccaggttcgggtgctggtggtgatgactctgtcgcccatccatgtggaatcgcaatgccaatttcccgaggaattacccactccgtcggcgccatcgttattgtctgccattggtgcgccactgcctgtagccatcgtattagttcccagaccagagggggctgctggtggctgtccgagaggctgggggtcaggtacggagtctgcgtctccagtctgaccgaaattcaatctctttcttgcaggctggttgcccgcttttccggttcccgaggaggagtctggctccacaggagagtgctctaccggcctcttttttcccggagccgtcttaacaggctcctcaaccaggcccagaggttcaagaaccctcttttttgcctggaagactgctcgtccgaggttgcccccaaaagacgtatcttctttaaggcgctcctgaaactccgcgtcggcgtggtcgtacttgaggtacgggttgtctccgctgtcgagctgccggtcgtaggccttgtcgtgctcgagggccgcggcgtctgcctcgttgaccggctctcccttgtcgagtccgttgaagggtccgaggtacttgtacccaggaagcacaagacccctgctgtcgtccttatgccgctctgcgggctttggtggtggtgggccaggtttgagcttccaccactgtcttattccttcagagagagtgtcctcgagccaatctggaagataaccatcggcagccatacctgatttaaatcatttattgttcagagatgcagtcatccaaatccacattgaccagatcgcaggcagtgcaagcgtctggcacctttcccatgatatgatgaatgtagcaaagtttctgatacgcctttttgacgacagaaacgggttgagattctgacacgggaaagcactctaaacagtctttctgtccgtgagtgaagcagatatttgaattctgattcattctctcgcattgtctgcagggaaacagcatcagattcatgcccacgtgacgagaacatttgttttggtacctgtccgcgtagttgatcgaagcttccgcgtctgacgtcgatggctgcgcaactgactcgcgcgcccgtttgggctcacttatatctgcgtcactgggggcgggtcttttcttggctccaccctttttgacgtagaattcatgctccacctcaaccacgtgatcctttgcccaccggaaaaagtctttcacttcctgcttggtgaccttcccaaagtcatgatccagacggcgggttagttcaaatttgaacatccggtcttgcaacggctgctggtgttcgaaggtcgttgagttcccgtcaatcacggcgcacatgttggtgttggaggtggcgatcacgggagtcgggtctatctgggccgaggacttgcacttttggtccacgcgcaccttgcttcctccgagaatggcttcggccgattccacgaccttggcggtcatctttccctcctcccaccagatcaccatcttgtcgacacagtcgttgaagggaaagttctcattggtccagttgacgcagcaagggcgaattcgtttaaacctgcaggaactagtcccttagtgagg

SEQ ID NO: 196 - protein, 735 aa, Adeno-associated virus
MAADGYLPDWLEDTLSEGIRQWWKLKPGPPPPKPAERHKDDSRGLVLPGYKYLGPFNGLYKGEPVNEADAAALEHDKAYDRQLDSGDNPYLKYNHAGAEFQERLKEDTSFGGNLGRAVFQAKKRVLEPLGLVEEPVKTAPGKKRPVEHSPVEPDSSSGTGKAGNQPARKRLNFGQTGDADSVPDPQPLGQPPAAPSGLGSTTMATGSGAPVADNNEGADGVGNSSGNWHCDSQWLGDRVITTSTRTWALPTYNNHLYKQISSQSGASNDNHYFGYSTPWGYFDFNRFHCHFSPRDWQRLINNNWGFRPKRLNFKLFNIQVKEVTQNDGTTTIANNLTSTVQVFTDSEYQLPYVLGSAHQGCLPPFPADVFMVPQYGYLTLNNGSQAVGRSSFYCLEYFPSQMLRTGNNFQFSYTFEDVPFHSSYAHSQSLDRLMNPLIDQYLYYLNKTQSNSGTLQQSRLLFSQAGPTSMSLQAKNWLPGPCYRQQRLSKQANDNNNSNFPWTAATKYHLNGRDSLVNPGPAMASHKDDEEKFFPMHGTLIFGKQGTNANDADLDNVMITDEEEIRTTNPVATEQYGYVSNNLQDSNTGPTTGTVNHQGALPGMVWQDRDVYLQGPIWAKIPHTDGHFHPSPLMGGFGLKHPPPQIMIKNTPVPANPPTNFSSAKFASFITQYSTGQVSVEIEWELQKENSKRWNPEIQYTSNYNKSVNVDFTVDTNGVYSEPRPIGTRYLTRNL

SEQ ID NO: 197 - DNA, 2208 bp, Adeno-associated virus
atggctgccgatggttatcttccagattggctcgaggacactctctctgaaggaataagacagtggtggaagctcaaacctggcccaccaccgccaaagcccgcagagcggcataaggacgacagcaggggtcttgtgcttcctgggtacaagtacctcggacccttcaacggactctacaagggagagccggtcaacgaggcagacgccgcggccctcgagcacgacaaggcctacgaccggcagctcgacagcggagacaacccgtacctcaagtacaaccacgccggcgcggagtttcaggagcgccttaaagaagatacgtcttttgggggcaacctcggacgagcagtcttccaggccaaaaagagggttcttgaacctctgggcttggttgaggagcctgttaaaacggctccgggaaaaaagaggccggtagagcactctcctgtggagccagactcctcctcgggaaccggaaaagcgggcaaccagcctgcaagaaaaagattgaattttggtcagactggagacgcagactccgtacctgacccccagcctctcggacagccaccagcagccccctctggtctgggatctactacaatggctacaggcagtggcgcaccagtggcagacaataacgagggtgccgatggagtgggtaattcctcaggaaattggcattgcgattcccaatggctgggcgacagagtcatcaccaccagcacccgaacctgggctctgcccacctacaacaaccacctctacaagcaaatctccagccaatcaggagcctcaaacgacaaccactactttggctacagcaccccctgggggtattttgacttcaacagattccactgccacttttcaccacgtgactggcaaagactcatcaacaacaactggggattccgaccaaagagactcaacttcaagctctttaacattcaagtcaaagaggtcacgcagaatgacggtacgacgacgattgccaataaccttaccagcacggttcaggtgtttactgactcggagtaccagctcccgtacgtcctcggctcggcgcatcaaggatgcctcccgccgttcccagcagacgtcttcatggtgccacagtatggatacctcaccctgaacaacgggagtcaggcggtaggacgctcttccttttactgcctggagtactttccttctcagatgctgcgtactggaaacaactttcagttcagctacacctttgaagacgttcctttccacagcagctacgctcacagccagagtctggatcggctgatgaatcctctgatcgaccagtacctgtattatctgaacaagacacaatcaaatagtggaacccttcagcagtctcggctactgtttagccaagctggacccaccagcatgtctcttcaagctaaaaactggctgcctggaccttgctacagacagcagcgtctgtcaaagcaggcaaacgacaacaacaacagcaactttccctggactgcggctacaaagtatcatctaaatggccgggactcgttggttaatccaggaccagctatggccagccacaaagacgatgaagaaaagtttttccccatgcatggaaccctgatatttggtaaacaaggaacaaatgctaacgacgcggatttggacaatgtcatgattacagatgaagaagaaatccgcaccaccaatcccgtggctacggagcagtacggatatgtgtcaaataatttgcaagactcaaatactggtccaactactggaactgtcaatcaccaaggagcgttacctggtatggtgtggcaggatcgagacgtgtacctgcagggacccatttgggccaagattcctcacaccgatggacactttcatccttctccacttatgggaggttttggactcaaacacccacctcctcagatcatgattaaaaacactcccgttccagccaatcctcccacaaacttcagttctgccaagtttgcttctttcatcacacagtattccacgggacaagtcagcgtagagatcgagtgggagctgcagaaggagaacagcaaacgctggaaccccgagatccagtacacttccaactataacaaatctgttaatgtggactttactgtggacactaatggtgtgtattcagagcctcgccccattggcaccagatacctgactcgtaatctgtaa

SEQ ID NO: 198 - protein, 738 aa, Adeno-associated virus
MAADGYLPDWLEDNLSEGIREWWDLKPGAPKPKANQQKQDDGRGLVLPGCKYLGPFNGLDKGEPVNAADAAALEHDKAYDQQLKAGDNPYLRYNHADAEFQERLQEDTSFGGNLGRAVFQAKKRVLEPLGLVEEGAKTAPGKKRPVEPSPQRSPDSSTGIGKTGQQPAKKRLNFGQTGDSESVPDPQPIGEPPAGPSGLGSGTMAAGGGAPMADNNEGADGVGSSSGNWHCDSTWLGDRVITTSTRTWALPTYNNHLYKQISNGTSGGSTNDNTYFGYSTPWGYFDFNRFHCHFSPRDWQRLINNNWGFRPKRLNFKLFNIQVKEVTQNEGTKTIANNLTSTIQVFTDSEYQLPYVLGSAHQGCPPPFPADVFMIPQYGYLTLNNGSQAVGRSSFYCLEYFPSQMRRTGNNFEFSYQFEDVPFHSSYAHSQSLDRLMNPLIDQYLYYLSRTQSTGGTAGTQQLLFSQAGPNNMSAQAKNWLPGPCYRQQRVSTTLSQNNNSNFAWTGATKYHLNGRDSLVNPGVAMATHKDDEERFFPSSGVLMFGKQGAGKDNVDYSSVMLTSEEEIKTTNPVATEQYGVVADNLQQQNAAPIVGAVNSQGALPGMVWQNRDVYLQGPIWAKIPHTDGNFHPSPLMGGFGLKHPPPQILIKNTPVPADPPTTFSQAKLASFITQYSTGQVSVEIEWELQKENSKRWNPEIQYTSNYNKSVNVDFTVDTNGVYSEPRPIGTRYLTRNL

SEQ ID NO: 199 - DNA, 2217 bp, Adeno-associated virus
atggctgccgatggttatcttccagattggctcgaggacaacctctctgagggcattcgcgagtggtgggacttgaaacctggagccccgaaacccaaagccaaccagcaaaagcaggacgacggccggggtctggtgcttcctggctgcaagtacctcggacccttcaacggactcgacaagggggagcccgtcaacgcggcggacgcagcggccctcgagcacgacaaggcctacgaccagcagctcaaagcgggtgacaatccgtacctgcggtataaccacgccgacgccgagtttcaggagcgtctgcaagaagatacgtcttttgggggcaacctcgggcgagcagtcttccaggccaagaagcgggttctcgaacctctcggtctggttgaggaaggcgctaagacggctcctggaaagaagagaccggtagagccatcaccccagcgttctccagactcctctacgggcatcggcaagacaggccagcagcccgcgaaaaagagactcaactttgggcagactggcgactcagagtcagtgcccgaccctcaaccaatcggagaaccccccgcaggcccctctggtctgggatctggtacaatggctgcaggcggtggcgctccaatggcagacaataacgaaggcgccgacggagtgggtagttcctcaggaaattggcattgcgattccacatggctgggcgacagagtcatcaccaccagcacccgaacctgggccctccccacctacaacaaccacctctacaagcaaatctccaacgggacatcgggaggaagcaccaacgacaacacctacttcggctacagcaccccctgggggtattttgactttaacagattccactgccacttctcaccacgtgactggcagcgactcatcaacaacaactggggattccggcccaagagactcaacttcaagctcttcaacatccaggtcaaggaggtcacgcagaatgaaggcaccaagaccatcgccaataaccttaccagcacgattcaggtctttacggactcggaataccagctcccgtacgtcctcggctctgcgcaccagggctgcccgcctccgttcccggcggacgtcttcatgattcctcagtacgggtacctgactctgaacaacggcagtcaggccgtgggccgttcctccttctactgcctggagtactttccttctcaaatgcggagaacgggcaacaactttgagttcagctaccagtttgaggacgtgccttttcacagcagctacgcgcatagccaaagcctggaccggctgatgaaccccctcatcgaccagtacctgtactacctgtctcggactcagtccacgggaggtaccgcaggaactcagcagttgctattttctcaggccgggcctaataacatgtcggctcaggccaaaaactggctacccgggccctgctaccggcagcaacgcgtctccacgacactgtcgcaaaataacaacagcaactttgcttggaccggtgccaccaagtatcatctgaatggcagagactctctggtaaatcccggtgtcgctatggcaacgcacaaggacgacgaagagcgattttttccatccagcggagtcttgatgtttgggaaacagggagctggaaaagacaacgtggactatagcagcgttatgctaaccagtgaggaagaaatcaaaaccaccaacccagtggccacagaacagtacggcgtggtggccgataacctgcaacagcaaaacgccgctcctattgtaggggccgtcaacagtcaaggagccttacctggcatggtctggcagaaccgggacgtgtacctgcagggtcctatctgggccaagattcctcacacggacggcaactttcatccttcgccgctgatgggaggctttggactgaaacacccgcctcctcagatcctgattaagaatacacctgttcccgcggatcctccaactaccttcagtcaagccaagctggcgtcgttcatcacgcagtacagcaccggacaggtcagcgtggaaattgaatgggagctgcagaaagagaacagcaagcgctggaacccagagattcagtatacttccaactataacaaatctgttaatgtggactttactgtggacactaatggtgtgtattcagagcctcgccccattggcaccagatacctgactcgtaatctgtaa

SEQ ID NO: 200 - DNA, 3167 bp, Adeno-associated virus
attgaatttagcggccgcgaattcgcccttcgcagagaccaaagttcaactgaaacgaattaaacggtttattgattaacaagcaattacagattacgagtcaggtacctggtgccaatggggcgaggctctgaatacacaccattagtgtccacagtaaagtccacattaacagatttgttgtagttggaagtgtactgaatctcgggattccagcgtttgctgttctccttctgcagctcccactcgatctccacgctgacctgccccgtggagtactgtgtaatgaaggaagcaaactttgccgcactgaaggtagtcgaaggattcgcaggtaccggggtgttcttgatgagaatctgcgggggagggtgtttaagtccgaatccgcccatgaggggagaggggtgaaaatgtccgtccgtgtgtggaatctttgcccagatgggcccctgcaggtacacgtctctgtcctgccacaccatgcctggaagaacgccttgtgtgttgacatctgaggtagctgcttgtgtgttgccgctctggaggttggtagatacagaaccatactgctccgtagccacgggattggtggtcctgatttcctcttcgtctgtaatcatgaccttttcaatgtccacattagtttttcccgagtcttgttttccaaagatgagaaccccgctctgaggaaaaaacttttcttcatcgtccttgtggctggccatggccgggcccggattcaccagagagtctcttccattaaggtggtacttggtagctccagtccacgagtattcactgttgttgttatccgcagatgtctttgatactcgctgctggcggtaacagggtccaggaagccagttcctagactggtcccgaatgtcacttgctccggcctgagaaaactgaagccttgactgcgtggtggttccgcttggagtgtttgttctgctcaagtaatacaggtactggtcgatgagaggattcatgagacggtccaaactctggctgtgggcgtagctgctgtggaaaggaacgtcctcaaaggtgtagctgaaggtaaagttgtttccggtacgcagcatctgagaaggaaagtactccaggcagtaaaatgaagagcgtcctactgcctgactcccgttgttcagggtgaggtatccatactgtggcaccatgaagacgtctgctgggaacggcgggaggcatccttgatgcgccgagccgaggacgtacgggagctggtactccgagtcagtaaacacctgaaccgtgctggtaaggttattggcaatcgtcgtcgtaccgtcattctgcgtgacctccttgacttgaatgttaaagagcttgaagttgagtcttttgggccggaatccccaattgttgttgatgagtctttgccagtcacgtggcgaaaagtggcagtggaatctgttgaagtcaaaatacccccaaggggtgctgtagccaaagtagtggttgtcgtttgaggctcctgattggctggaaatctgcttgtagaggtggttgttgtaggtgggcagagcccaggtgcgggtgctggtggtgatgactctgtcgcccatccatgtggaatcgcaatgccaatttcccgaggaattacccactccgtcggcgccctcgttattgtctgccattggtgcgccactgcctgtagccatcgtattagttcccagaccagagggggctgctggtggctgtccgagaggctgggggtcaggtacggagtctgcgtctccagtctgaccgaaattcaatctctttcttgcaggctgctggcccgcttttccggttcccgaggaggagtctggctccgcaggagagtgctctaccggcctcttttttcccggagccgtcttaacaggttcctcaaccaggcccagaggttcaagaaccctctttttcgcctggaagactgctcgtccgaggttgcccccaaaagacgtatcttctttaagacgctcctggaactccgcgtcggcgtggttgtacttggggtacgggttgtctccgctgtcgagctgccggtcgtaggccttgtcgtgctcgagggccgcggcgtctgcctcgttgaccggctctcccttgtcgagtccgttgaagggtccaaggtacttgtacccaggaagcacaagacccctgctgtcgtccttatgccgctctgcgggctttggtggtggtgggccaggtttgagcttccaccactgtcttattccttcagagagagtgtcctcgagccaatctggaagataaccatcggcagccatacctgatttaaatcatttattgttcagagatgcagtcatccaaatccacattgaccagatcgcaagcagtgcaagcgtctggcacctttcccatgatatgatgaatgtagcacagtttctgatacgcctttttgacgacagaaacgggttgagattctgacacgggaaagcactctaaacagtctttctgtccgtgagtgaagcagatatttgaattctgattcattctctcgcattgtctgcagggaaacagcatcagattcatgcccacgtgacgagaacatttgttttggtacctgtccgcgtagttgattgaagcttccgcgtctgacgtcgatggctgcgcaactgactcgcgcgcccgtttgggctcacttatatctgcgtcactgggggcgggtctttttttggctccaccctttttgacgtagaattcatgctctacctcaaccacgtgatcctttgcccaccggaaaaagtctttgacttcctgcttggtgaccttcccaaagtcatgatccagacggcgggtgagttcaaatttgaacatccggtcttgcaacggctgctggtgttcgaaggtcgttgagttcccgtcaatcactgcgcacatgttggtgttggaggtgacaatcacgggagtcgggtctatctgggccgaggacttgcatttctggtccacgcgcaccttgcttcctccgagaatggctttggccgactccacgaccttggcggtcatcttcccctcctcccaccagatcaccatcttgtcgacgcaatcattgaaaggaaagttctcattggtccagttgacgcagccgtagaaagggcgaattcgtttaaacctgcaggactagtccctttagtgagggt

SEQ ID NO: 201 - DNA, 3161 bp, Adeno-associated virus
aattgaatttagcggccgcgaattcgcccttcgcagagaccaaagttcaactgaaacgaattaaacggtttattgattaacaagcaattacagattacgagtcaggtatctggtgccaatggggcgaggctctgaatacacaccattagtgtccacagtaaagtccacattaacagatttgttgtagttggaagtgtactgaatctcgggattccagcgtttgctgttctccttctgcagctcccactcgatctccacgctgacctgccccgtggagtactgtgtaatgaaggaagcaaactttgccgcactgaaggtagtcgaaggattcgcaggtaccggggtgttcttgatgagaatctgcgggggagggtgtttaagtccgaatccgcccatgaggggagaggggtgaaaatgtccgtccgtgtgtggaatctttgcccagatgggcccctgcaggtacacgtctctgtcctgccacaccatgcctggaagaacgccttgtgtgttgacatctgaggtagctgcttgtgtgttgccgctctggaggttggtagatacagaaccatactgctccgtagccacgggattggtggtcctgatttcctcttcgtctgtaatcatgaccttttcaatgtccacattagtttttcccgagtcttgttttccaaagatgagaaccccgctctgaggaaaaaacttttcttcatcgtccttgtggctggccatggccgggcccggattcaccagagagtctcttccattaaggtggtacttggtagctccagtccacgagtattcactgttgttgttatccgcagatgtctttgatactcgctgctggcggtaacagggtccaggaagccagttcctagactggtcccgaatgtcacttgctccggcctgagaaaactgaagccttgactgcgtggtggttccgcttggagtgtttgttctgctcaagtaatacaggtactggtcgacgagaggattcatgagacggtccaaactctggctgtgggcgtagctgctgtggaaaggaacgtcctcaaaggtgtagctgaaggtaaagttgtttccggtacgcagcatctgagaaggaaagtactccaggcagtaaaatgaagagcgtcctactgcctgactcccgttgttcagggtgaggtatccatactgtggcaccatgaagacgtctgctgggaacggcgggaggcatccttgatgcgccgagccgaggacgtacgggagctggtactccgagtcagtaaacacctgaaccgtgctggtaaggttattggcaatcgtcgtcgtaccgtcattctgcgtgacctccttgacttgaatgttaaagagcttgaagttgagtcttttgggccgggatccccaattgttgttgatgagtctttgccagtcacgtggcgaaaagtggcagtggaatctgttgaagtcaaaatacccccaaggggtgctgtagccaaagtagtggttgtcgtttgaggctcctgattggctggaaatctgcctgtagaggtggttgttgtaggtgggcagagcccaggtgcgggtgctggtggtgatgactctgtcgcccatccatgtggaatcgcaatgccaatttcccgaggaattacccactccgtcggcgccctcgttattgtctgccattggtgcgccactgcctgtagccatcgtattagttcccagaccagagggggctgctggtggctgtccgagaggctgggggtcaggtacggagtctgcgtctccagtctgaccgaaattcaatctccttcttgcaggctgctggcccgcttttccggttcccgaggaggagtctggctccgcaagagagtgctctaccggcctcttttttcccggagccgtcttaacaggttcctcaaccaggcccagaggttcaagaaccctctttttcgcctggaagactgctcgtccgaggttgcccccaaaagacgtatcttctttaagacgctcctggaactccgcgtcggcgtggttgtacttgaggtacgggttgtctccgccgtcgagctgccggtcgtaggccttgtcgtgctcgagggccgcggcgtctgcctcgttgaccggctctcccttgtcgagtccgttgaagggtccaaggtacttgtacccaggaagcacaagacccctgctgtcgtccttatgccgctctgcgggctttggtggtggtgggccaggtttgagcttccaccactgtcttattccttcagagagagtgtcctcgagccaatctggaagataaccatcggcagccatacctgatttaaatcatttattgttcagagatgcagtcatccaaatccacattgaccagatcgcaagcagtgcaagcgtctggcacctttcccatgatatgatgaatgtagcacagtttctgatacgcctttttgacgacagaaacgggttgagattctgacacgggaaagcactctaaacagtctttctgtccgtgagtgaagcagatatttgaattctgattcattctctcgcattgtctgcagggaaacagcatcagattcatgcccacgtgacgagaacatttgttttggtacctgtccgcgtagttgattgaagcttccgcgtctgacgtcgatggctgcgcaactgactcgcgcgcccgtttgggctcacttatatctgcgtcactgggggcgggtctttttttggctccaccctttttgacgtagaattcatgctctacctcaaccacgtgatcctttgcccaccggaaaaagtctttgacttcctgcttggtgaccttcccaaagtcatgatccagacggcgggtgagttcaaatttgaacatccggtcttgcaacggctgctggtgttcgaaggtcgttgagttcccgtcaatcactgcgcacatgttggtgttggaggtgacaatcacgggagtcgggtctatctgggccgaggacttgcatttctggtccacgcgcaccttgcttcctccgagaatggctttggccgactccacgaccttggcggtcatcttcccctcctcccaccagatcaccatcttgtcgacgcaatcattgaaaggaaagttctcattggtccagttgacgcagcaagggcgaattcgtttaaacctgcaggactagtccctttagtgaggg

SEQ ID NO: 202 - DNA, 3172 bp, Adeno-associated virus
gattgaatttagcggccgcgaattcgcccttgctgcgtcaactggaccaatgagaactttcccttcaacgattgcgtcgacaagatggtgatctggtgggaggagggcaagatgaccgccaaggtcgtggagtccgccaaggccattctgggtggaagcaaggtgcgcgtggaccaaaagtgcaagtcatcggcccagatcgaccccacgcccgtgatcgtcacctccaacaccaacatgtgcgccgtgatcgacgggaacagcaccaccttcgagcaccagcagcccctgcaggaccgcatgttcaagttcgagctcacccgccgtctggagcacgactttggcaaggtgaccaagcaggaagtcaaagagttcttccgctgggctcaggatcacgtgactgaggtggcgcatgagttctacgtcagaaagggcggagccaccaaaagacccgcccccagtgacgcggatataagcgagcccaagcgggcctgcccctcagttgcggagccatcgacgtcagacgcggaagcaccggtggactttgcggacaggtaccaaaacaaatgttctcgtcacgcgggcatgcttcagatgctgtttccctgcaagacatgcgagagaatgaatcagaatttcaacgtctgcttcacgcacggggtcagagactgctcagagtgcttccccggcgcgtcggaatctcaacccgtcgtcagaaaaaagacgtatcagaaactgtgcgcgattcatcatctgctggggcgggcacccgagattgcgtgttcggcctgcgatctcgtcaacgtggacttggatgactgtgtttctgagcaataaatgacttaaaccaggtatggctgctgacggttatcttccagattggctcgaggacaacctctctgagggcattcgcgagtggtgggacctgaaacctggagcccccaagcccaaggccaaccagcagaagcaggacgacggccggggtctggtgcttcctggctacaagtacctcggacccttcaacggactcgacaagggggagcccgtcaacgcggcggacgcagcggccctcgagcacgacaaggcctacgaccagcagctcaaagcgggtgacaatccgtacctgcggtataaccacgccgacgccgagtttcaggagcgtctgcaagaagatacgtcttttgggggcaacctcgggcgagcagtcttccaggccaagaagcgggttctcgaacctctcggtctggttgaggaagctgctaagacggctcctggaaagaagagaccggtagaaccgtcacctcagcgttcccccgactcctccgcgggcatcggcaagaaaggccagcagcccgctaaaaagagactgaactttggtcagactggcgactcagagtcagtccccgaccctcaaccaatcggagaaccaccagcaggcccctctggtctgggatctggtacaatggctgcaggcggtggcgctccaatggcagacaataacgaaggcgccgacggagtgggtagttcctcaggaaattggcattgcgattccacatggctgggcgacagagtcatcaccaccagcacccgaacctgggccctgcccacctacaacaaccacctctacaagcaaatatccaatgggacatcgggaggaagcaccaacgacaacacctacttcggctacagcaccccctgggggtattttgacttcaacagattccactgccacttctcaccacgtgactggcagcgactcatcaacaacaactggggattccggccaaaaagactcagcttcaagctcttcaacatccaggtcaaggaggtcacgcagaatgaaggcaccgagaccatcgccaataaccttaccagcacgattcaggtatttacggactcggaataccagctgccgtacgtcctcggctccgcgcaccagggctgcctgcctccgttcccggcggacgtcttcatgattccccagtacggctaccttacactgaacaatggaagtcaagccgtaggccgttcctccttctactgcctggaatattttccatctcaaatgctgcgaactggaaacaattttgaattcagctacaccttcgaggacgtgcctttccacagcagctgcgcacacagccagagctcggaccgactgatgaatcctctcatcgaccagtacctgtactacttatccagaactcggtccacaggaggaactcaaggtacccagcaattgttattttctcaagctgggcctgcaaacatgtcggctcaggctaagaactggctacctggaccttgctaccggcagcagcgagtctctacgacactgtcgcaaaacaacaacagcaactttgcttggactggtgccaccaaatatcacctgaacggaagagactctttggtaaatcccggtgtcgccatggcaacccacaaggacgacgaggaacgcttcttcccgtcgagtggagtcctgatgtttggaaaacagggtgctggaagagacaatgtggactacagcagcgttatgctaaccagcgaagaagaaattaaaaccactaaccctgtagccacagaacaatacggtgtggtggctgacaacttgcagcaaaccaatacagggcctattgtgggaaatgtcaacagccaaggagccttacctggcatggtctggcagaaccgagacgtgtacctgcagggtcccatctgggccaagattcctcacacggacggcaacttccacccttcaccgctaatgggaggatttggactgaagcacccacctcctcagatcctgatcaagaacacgccggtacctgcggatcctccaacaacgttcagccaggcgaaattggcttccttcattacgcagtacagcaccggacaggtcagcgtggaaatcgagtgggagctgcagaaggagaacagcaaacgctggaacccagagattcagtacacttcaaactactacaaatctacaaatgtggactttgctgtcaatacagagggaacttattctgagcctcgccccattggtactcgttacctcacccgtaatctgtaattgctggttaatcaataaaccgtttgattcgtttcagttgaactttggtctctgcgaagggcgaattcgtttaaacctgcaggactagtccctttagtgagg

SEQ ID NO: 203 - DNA, 3172 bp, Adeno-associated virus
gattgaatttagcggccgcgaattcgcccttgctgcgtcaactggaccaatgagaactttcccttcaacgattgcgtcgacaagatggtgatctggtgggaggagggcaagatgaccgccaaggtcgtggagtccgccaaggccattctgggtggaagcaaggtgcgcgtggaccaaaagtgcaagtcatcggcccagatcgaccccacgcccgtgatcgtcacctccaacaccaacatgtgcgccgtgatcggcgggaacagcaccaccttcgagcaccagcagcccctgcaggaccgcatgttcaagttcgagctcacccgccgtctggagcacgactttggcaaggtgaccaagcaggaagtcaaagagttcttccgctgggctcaggatcacgtgactgaggtggcgcatgagttctacgtcagaaagggcggagccaccaaaagacccgcccccagtgacgcggatataagcgagcccaagcgggcctgcccctcagttgcggagccatcgacgtcagacgcggaagcaccggtggactttgcggacaggtaccaaaacaaatgttctcgtcacgcgggcatgcttcagatgctgtttccctgcaagacatgcgagagaatgaatcagaatttcaacgtctgcttcacgcacggggtcagagactgctcagagtgcctccccggcgcgtcagaatctcaacccgtcgtcagaaaaaagacgtatcagaaactgtgcgcgattcatcatctgctggggcgggcacccgagattgcgtgttcggcctgcgatctcgtcaacgtggacttggatgactgtgtttctgagcaataaatgacttaaaccaggtatggctgctgacggttatcttccagattggctcgaggacaacctctctgagggcattcgcgagtggtgggacctgaaacctggagcccccaagcccaaggccaaccagcagaagcaggacgacggccggggtctggtgcttcttggctacaagtacctcggacccttcaacggactcgacaagggggagcccgtcaatgcggcggacgcagcggccctcgagcacgacaaggcctacgaccagcagctcaaagcgggtgacaatccgtacctgcggtataaccacgccgacgccgagtttcaggagcgtctgcaagaagatacgtcttttgggggcaacctcgggcgagcagtcttccaggccaagaagcgggttctcgaacctctcggtctggttgaggaagctgctaagacggctcctggaaagaagagaccggtagaaccgtcacctcagcgttcccccgactcctccacgggcatcggcaagaaaggccagcagcccgctaaaaagagactgaactttggtcagactggcgactcagagtcagtccccgaccctcaaccaatcggagaaccaccagcaggcccctctggtctgggatctggtacaatggctgcaggcggtggcgctccaatggcagacaataacgaaggcgccgacggagtgggtagttcctcaggaaattggcattgcgattccacatggctgggcgacagagtcatcaccaccagcacccgaacctgggccctgcccacctacaacaaccacctctacaagcaaatatccaatgggacatcgggaggaagcaccaacgacaacacctacttcggctacagcaccccctgggggtattttgacttcaacagattccactgccacttctcaccacgtgactggcagcgactcatcaacaacaactggggattccggccaaaaagactcagcttcaagctcttcaacatccaggtcaaggaggtcacgcagaatgaaggcaccaagaccatcgccaataaccttaccagcacgattcaggtatttacggactcggaataccagctgccgtacgtcctcggctccgcgcaccagggctgcctgcctccgttcccggcggacgtcttcatgattccccagtacggctaccttacactgaacaatggaagtcaagccgtaggccgttcctccttctactgcctggaatattttccatctcaaatgctgcgaactggaaacaattttgaattcagctacaccttcgaggacgtgcctttccacagcggctacgcacacagccagagcttggaccgactgatgaatcctctcatcgaccagtacctgtactacttatccagaactcagtccacaggaggaactcaaggtacccagcaattgttattttctcaagctgggcctgcaaacatgtcggctcaggctaagaactggctacctggaccttgctaccggcagcagcgagtctctacgacactgtcgcaaaacaacaacagcaactttgcttggactggtgccaccaaatatcacctgaacggaagagactctttggtaaatcccggtgtcgccatggcaacccacaaggacgacgaggaacgcttcttcccgtcgagtggagtcctgatgtttggaaaacagggtgctggaagagacaatgtggactacagcagcgttatgctaaccagcgaagaagaaattaaaaccactaaccctgtagccacagaacaatacggtgtggtggctgacaacttgcagcaaaccaatacagggcctattgtgggaaatgtcaacagccaaggagccttacctggcatggtctggcagaaccgagacgtgtacctgcagggtcccatctgggccaagattcctcacacggacggcaacttccacccttcaccgctaatgggaggatttggactgaagcacccacctcctcagatcctgatcaagaacacgccggtacctgcggatcctccaacgacgttcagccaggcgaaattggcttccttcattacgcagtacagcaccggacaggtcagcgtggaaatcgagtgggagctgcagaaggagaacagcaaacgctggaacccagagattcagtacacttcaaactactacaaatctacaaatgtggactttgctgtcaatacagagggaacttattctgagcctcgccccattggtactcgttacctcacccgtaatctgtaattgctggttaatcaataaaccgtttgattcgtttcagttgaactttggtctctgcgaagggcgaattcgtttaaacctgcaggactagtccctttagtgagg

SEQ ID NO: 204 - DNA, 2208 bp, Adeno-associated virus
atggctgccgatggttatcttccagattggctcgaggacactctctctgaaggaataagacagtggtggaagctcaaacctggcccaccaccaccaaagcccgcagagcggcataaggacgacagcaggggtcttgtgcttcctgggtacaagtacctcggacccttcaacggactcgacaagggagagccggtcaacgaggcagacgccgcggccctcgagcacgacaaggcctacgaccggcagctcgaaagcggagacaacccgtacctcaagtacaaccacgccgacgcggagtttcaggagcgtcttaaagaagatacgtcttttgggggcaacctcggacgagcagtcttccaggcgaaaaagagggttcttgaacctctgggcctggttgaggagcctgttaaaacggctccgggaaaaaagaggccggtagagcactctcctgtggagccagactcctcctcgggaaccggaaaagcgggccagcagcctgcgagaaaaagattgaattttggtcagactggagacgcagactccgtacctgacccccagcctctcggacagccaccagcagccccctctggtctgggatctactacaatggcttcaggcagtggcgcaccagtggcagacaataacgagggtgccgatggagtgggtaattcctcaggaaattggcattgcgattcccaatggctgggcgacagagtcatcaccaccagcacccgaacctgggccctgcccacctacaacaaccacctctacaagcaaatctccagccaatcaggagcctcaaacgacaaccactactttggctacagcaccccctgggggtattttgacttcaacagattccactgccacttttcaccacgtgactggcaaagactcatcaacaacagctggggattccgacccaaaagactcaacttcaagctctttaacattcaagtcaaagaggtcacgcagaatgacggtacgacgacgattgccaataaccttaccagcacggttcaagtgtttaccgactcggagtaccagctcccgtacgtcctcggctcggcgcatcaaggatgcctcccgccgttcccagcagacgtctttatggtcccacagtatggatacctcaccctgaacaacgggagtcaggcggtaggacgctcttccttttactgcctggagtactttccttctcagatgctgcgtactggaaacaactttcagttcagctacacctttgaagacgttcccttccacagcagctacgctcacagccagagtctggatcggctgctgaatcctctgatcgaccagtacctatattatctgaacaagacacaatcaaatagtggaactcttcagcagtctcggctactgtttagccaagctggacccaccagcatgtctcttcaagctaaaaactggctgcctggaccttgctacagacagcagcgtctgtcaaagcaggcaaacgacaacaacaacagcaactttccctggactgcggctacaaagtatcatctaaatggccgggactcgttggttaatccaggaccagctatggccagccacaaagacgatgaagaaaagtttttccccatgcatggaaccctgatatttggtaaacaaggaacaaatgctaacgacgcggatttggacaatgtcatgattacagatgaagaagaaatccgcaccaccaatcccgtggctacggagcagtacggatatgtgtcaaataatttgcaaaactcaaatactggtccaactactggaactgtcaatcaccaaggagcgttacctggtatggtgtggcaggatcgagacgtgtacctgcagggacccatttgggccaagattcctcacacggacgggcactttcatccttctccactaatgggaggttttgggctcaaacacccgcctcctcagatcatgatcaaaaacactcccgttccagccaatcctcctacaaacttcagttcttccaagtttgcttctttcatcacacagtattccacggggcaggtcagcgtggagatcgagtgggagctgcagaaggagaacagcaaacgctggaatcccgaaattcagtatacttccaactacaacaaatctgttaatgtggactttactgtggacactaatggtgtgtattcagagcctcgccccattggcaccagatacccgactcgtaatctgtaa

SEQ ID NO: 205 - protein, 735 aa, Adeno-associated virus
MAADGYLPDWLEDTLSEGIRQWWKLKPGPPPPKPAERHKDDSRGLVLPGYKYLGPFNGLDKGEPVNEADAAALEHDKAYDRQLESGDNPYLKYNHADAEFQERLKEDTSFGGNLGRAVFQAKKRVLEPLGLVEEPVKTAPGKKRPVEHSPVEPDSSSGTGKAGQQPARKRLNFGQTGDADSVPDPQPLGQPPAAPSGLGSTTMASGSGAPVADNNEGADGVGNSSGNWHCDSQWLGDRVITTSTRTWALPTYNNHLYKQISSQSGASNDNHYFGYSTPWGYFDFNRFHCHFSPRDWQRLINNSWGFRPKRLNFKLFNIQVKEVTQNDGTTTIANNLTSTVQVFTDSEYQLPYVLGSAHQGCLPPFPADVFMVPQYGYLTLNNGSQAVGRSSFYCLEYFPSQMLRTGNNFQFSYTFEDVPFHSSYAHSQSLDRLLNPLIDQYLYYLNKTQSNSGTLQQSRLLFSQAGPTSMSLQAKNWLPGPCYRQQRLSKQANDNNNSNFPWTAATKYHLNGRDSLVNPGPAMASHKDDEEKFFPMHGTLIFGKQGTNANDADLDNVMITDEEEIRTTNPVATEQYGYVSNNLQNSNTGPTTGTVNHQGALPGMVWQDRDVYLQGPIWAKIPHTDGHFHPSPLMGGFGLKHPPPQIMIKNTPVPANPPTNFSSSKFASFITQYSTGQVSVEIEWELQKENSKRWNPEIQYTSNYNKSVNVDFTVDTNGVYSEPRPIGTRYPTRNL

SEQ ID NO: 206 - DNA, 2208 bp, Adeno-associated virus
atggctgccgatggttatcttccagattggctcgaggacactctctctgaaggaataagacagtggtggaagctcaaacctggcccaccaccaccaaagcccgcagagcggcataaggacgacagcaggggtcttgtgcttcctgggtacaagtacctcggacccttcaacggactcgacaagggagagccggtcaacgaggcagacgccgcggccctcgagcacgacaaggcctacgaccggcagctcgacagcggagacaacccgtacctcaagtacaaccacgccgacgcggagtttcaggagcgtcttaaagaagatacgtcttttgggggcaacctcggacgagcagtcttccaggccaaaaagaggattcttgaacctctgggcctggttgaggaacctgttaagacggctccgggagaaaagaggccggtagagcactctcctgcggagccagactcctcctcgggaaccggaaaagcgggccagcagcctgcaagaaagagattgaattttggccagactggagacgcagactcagtacctgacccccagcctctcggacagccaccagcagccccctctggtctgggaactaatacgatggcttcaggcagtggcgcaccaatggcagacaataacgagggcgccgacggagtgggtaattcctcgggaaattggtattgcgattccacatggatgggcgacagagtcatcaccaccagcacccgcacctgggccctgcccacctacaacaaccatctgtacaagcaaatctccagccagtctggagccagcaacgacaaccactactttggctacagcaccccctgggggtattttgacttcaacagattccactgccacttctccccacgtgactggcaaagactcatcaacaacaactggggattccggcccaagagactcagcttcaagctctttaacattcaagtcaaagaggtcacgcagaatgacggtacgacgacgattgccaataaccttaccagcacggttcaggtgtttactgactcggagtaccagctcccgtacgtcctcggctcggcgcatcaaggatgcctcccgccgttcccagcagacgtcttcatggtgccacagtatggatacctcaccctgaacaacggcagtcaggcggtaggacgctcttccttttactgcctggagtactttccttctcagatgcttcgtaccggaaacaactttaccttcagctacacctttgaagacgttcctttccatagcagctacgctcacagccaaagtctggaccgtctcatgaatcctctcatcgaccagtacctgtattacttgagcagaacaaacactccaagcggaaccaccacgatgtccaggcttcagttttctcaggccggagcaagtgacattcgggaccagtctagaaactggcttcctggaccctgttaccgccagcagcgagtatcaaagacagctgcggacaacaacaacagtgattactcgtggactggagctaccaagtaccacctcaatggaagagactctctggtgaatccgggcccagctatggccagccacaaggacgatgaagaaaaatattttcctcagagcggggttctcatctttggaaaacaagactcgggaaaaactaatgtggacattgaaaaggttatgattacagacgaagaggaaatcaggaccaccaatcccgtggctacggagcagtatggttctgtatctaccaacctccagagcggcaacacacaagcagctacctcagatgtcaacacacaaggcgttcttccaggcatggtctggcaggacagagacgtgtacctgcaggggcccatctgggcaaagattccacacacggacggacattttcacccctctcccctcgtgggcggattcggacttaaacaccctcctccacaaattctcatcaagaacaccccggtacctgcgaatccttcgaccactttcagtgcggcaaagtttgcttccttcatcacacagtactccacggggcaggtcagcgtggagatcgagtgggagctgcagaaggagaacagcaaacgctggaatcccgaaattcagtacacttccaactacaacaaatctgttaatgtggactttactgtggacactaatggtgtgtattcagagcctcgccccattggcaccagatacctgactcgtaatctgtaa

SEQ ID NO: 207 - protein, 735 aa, Adeno-associated virus
MAADGYLPDWLEDTLSEGIRQWWKLKPGPPPPKPAERHKDDSRGLVLPGYKYLGPFNGLDKGEPVNEADAAALEHDKAYDRQLDSGDNPYLKYNHADAEFQERLKEDTSFGGNLGRAVFQAKKRILEPLGLVEEPVKTAPGEKRPVEHSPAEPDSSSGTGKAGQQPARKRLNFGQTGDADSVPDPQPLGQPPAAPSGLGTNTMASGSGAPMADNNEGADGVGNSSGNWYCDSTWMGDRVITTSTRTWALPTYNNHLYKQISSQSGASNDNHYFGYSTPWGYFDFNRFHCHFSPRDWQRLINNNWGFRPKRLSFKLFNIQVKEVTQNDGTTTIANNLTSTVQVFTDSEYQLPYVLGSAHQGCLPPFPADVFMVPQYGYLTLNNGSQAVGRSSFYCLEYFPSQMLRTGNNFTFSYTFEDVPFHSSYAHSQSLDRLMNPLIDQYLYYLSRTNTPSGTTTMSRLQFSQAGASDIRDQSRNWLPGPCYRQQRVSKTAADNNNSDYSWTGATKYHLNGRDSLVNPGPAMASHKDDEEKYFPQSGVLIFGKQDSGKTNVDIEKVMITDEEEIRTTNPVATEQYGSVSTNLQSGNTQAATSDVNTQGVLPGMVWQDRDVYLQGPIWAKIPHTDGHFHPSPLVGGFGLKHPPPQILIKNTPVPANPSTTFSAAKFASFITQYSTGQVSVEIEWELQKENSKRWNPEIQYTSNYNKSVNVDFTVDTNGVYSEPRPIGTRYLTRNL

SEQ ID NO: 208 - DNA, 2209 bp, Adeno-associated virus
atggctgccgatggttatcctccagattggctcgaggacactctctctgaagggataagacagtggtggaagctcaaacctggcccaccaccaccaaagcccgcagagcggcataaggacgacagcaggggtcttgtgcttcctgggtacaagtacctcggacccttcaacggactcgacaagggggagccggtcaacgaggcagacgccgcggccctcgagcacgacaaggcctacgaccggcagctcgacagcggagacaacccgtacctcaagtacaaccacgccgacgcagagtttcaggagcgccttaaagaagatacgtcttttgggggcaacctcggacgagcagtcttccaggcgaaaaagagggttcttgaacctctgggcctggttgaggaacctgttaagacggctccgggaaaaaagaggccggtagagcactctcctgtggagccagactcctcctcgggaaccggaaaagcgggccagcggcctgcaagaaaaagattaaattttggtcagactggagacgcagactccgtacctgacccccagcctctcggacagccaccagcagccccctctggtctgggatctactacaatggctacaggcagtggcgcaccaatggcagacaataacgagggtgccgatggagtgggtaattcctcaggaaattggcattgcgattcccaatggctgggcgacagagtcatcaccaccagcacccgaacctgggccctgcccacatacaacaaccacctctacaagcaaatctccagccaatcaggagccagcaacgacaaccactactttggctacagcaccccctgggggtattttgacttcaacagattccactgccacttttcaccacgtgactggcaaagactcatcaacaacaactggggattccggcccaaaagactcaacttcaagctctttaatattcaagtcaaagaggtcacgcagaatgacggtacgacgacgattgccaataaccttaccagcacggttcaggtgtttactgactcggagtaccagctcccgtacgtcctgggctcggcgcatcaaggatgcctcccgccgtttccagcggacgtcttcatggtcccacagtatggatacctcaccctgaacaacgggagtcaggcggtaggacgctcttccttttactgcctggagtactttccttctcagatgctgcgtactggaaacaactttcagttcagctacacttttgaagacgtgcctttccacagcagctacgctcacagccagagtctggatcggctgatgaatcctctgatcgaccagtacctgtattatctgaacaagacacaaacaaatagtggaactcttcagcagtctcggctactgtttagccaagctggaccaaccaacatgtctcttcaagctaaaaactggctgcctggaccttgctacagacagcagcgtctgtcaaaacaggcaaacgacaacaacaacagcaactttccctggactgcagctacaaagtatcatctaaatggccgggactcgttggttaatccaggaccagctatggccagtcacaaggatgacgaagaaaagtttttccccatgcatggaaccctgatatttggtaaacaaggaacaaatgccaacgacgcggatttggaaaatgtcatgattacagatgaagaagaaatcagggccaccaatcccgtggctacggagcagtacgggactgtgtcaaataatttgcaaaactcaaacactggtccaactactggaactgtcaatcgccaaggagcgttacctggtatggtgtggcaggatcgagacgtgtacctgcagggacccatttgggccaagattcctcacaccgatggacactttcatccttctccactgatgggaggttttggactcaaacacccgcctcctcagatcatgatcaaaaacactcccgttccagccaatcctcccacaaacttcagttctgccaagtttgcttctttcatcacacagtattccacgggacaggtcagcgtggagatcgagtgggagctgcagaaggagaacagcaaacgctggaatcccgaaattcagtacacttccaactacaacaagtctgttaatgtggactttactgtggacactaatggtgtgtattcagagcctcgccccattggcaccagatacctgactcgtaatctgtaat

SEQ ID NO: 209 - protein, 735 aa, Adeno-associated virus
MAADGYPPDWLEDTLSEGIRQWWKLKPGPPPPKPAERHKDDSRGLVLPGYKYLGPFNGLDKGEPVNEADAAALEHDKAYDRQLDSGDNPYLKYNHADAEFQERLKEDTSFGGNLGRAVFQAKKRVLEPLGLVEEPVKTAPGKKRPVEHSPVEPDSSSGTGKAGQRPARKRLNFGQTGDADSVPDPQPLGQPPAAPSGLGSTTMATGSGAPMADNNEGADGVGNSSGNWHCDSQWLGDRVITTSTRTWALPTYNNHLYKQISSQSGASNDNHYFGYSTPWGYFDFNRFHCHFSPRDWQRLINNNWGFRPKRLNFKLFNIQVKEVTQNDGTTTIANNLTSTVQVFTDSEYQLPYVLGSAHQGCLPPFPADVFMVPQYGYLTLNNGSQAVGRSSFYCLEYFPSQMLRTGNNFQFSYTFEDVPFHSSYAHSQSLDRLMNPLIDQYLYYLNKTQTNSGTLQQSRLLFSQAGPTNMSLQAKNWLPGPCYRQQRLSKQANDNNNSNFPWTAATKYHLNGRDSLVNPGPAMASHKDDEEKFFPMHGTLIFGKQGTNANDADLENVMITDEEEIRATNPVATEQYGTVSNNLQNSNTGPTTGTVNRQGALPGMVWQDRDVYLQGPIWAKIPHTDGHFHPSPLMGGFGLKHPPPQIMIKNTPVPANPPTNFSSAKFASFITQYSTGQVSVEIEWELQKENSKRWNPEIQYTSNYNKSVNVDFTVDTNGVYSEPRPIGTRYLTRNL

SEQ ID NO: 210 - DNA, 2208 bp, Adeno-associated virus
atggctgccgatggttatcttccagattggctcgaggacactctctctgaaggaataagacagtggtggaagctcaaacctggcccaccaccaccaaagcccgcagagcggcataaggacgacagcaggggtcttgtgcttcctgggtacaggtacctcggacccttcaacggactcgacaagggagagccggtcaacgaggcagacgccgcggccctcgagcacgacaaggcctacgaccggcagctcgacagcggagacaacccgtacctcaagtacaaccacgtcgacgcggagtttcaggagcgtcttaaagaagatacgtcttttgggggcaacctcggacgagcagtcttccaggccaaaaagaggattcttgaacctctgggcctggttgaggaacctgttaaggcggctccgggagaaaagaggccggtagagcactctcctgcggagccagactcctcctcgggaaccggaaaagcgggccagcagcctgcaagaaagagattgaattttggtcagactggagacgcagactcagtacctgacccccagcctctcggacagccaccagcagccccctctggtctgggaactaatacgatggcttcaggcagtggcgcaccaatggcagacaataacgagggcgccgacggagtgggtaattcctcgggaaattggcattgcgattccacatggatgggcgacagagtcatcaccaccagcacccgcacctgggccctgcccacctacaacaaccatctgtacaagcaaatctccagccagtctggagccagcaacgacaaccactactttggctacagcaccccctgggggcattttgacttcaacagattccactgccacttctccccacgtgactggcaaagactcatcaacaacaactggggattccggcccaagagactcagcttcaagctctttaacattcaagtcaaagaggtcacgcagaatgacggtacgacgacgattgccaataaccttaccagcacggttcaggtgtttactgactcggagtaccagctcccgtacgtcctcggctcggcgcatcaaggatgcctcccgccgttcccagcagacgtcttcatggtgccacagtatggatacctcaccctgaacaacggcagtcaggcggtaggacgctcttccttttactgcctggagtactttccttctcagatgcttcgtaccggaaacaactttaccttcagctacacctttgaagacgttcctttccatagcagctacgctcacagccaaagtctggaccgtctcatgaatcctctcatcgaccagtacctgtattacttgagcagaacaaacactccaagcggaaccaccacgatgtccaggcttcagttttctcaggccggagcaagtgacattcgggaccagtctagaaactggcttcctggaccctgttaccgccagcagcgagtatcaaagacagctgcggacaacaacaacagtgattactcgtggactggagctaccaagtaccacctcaatggaagagactctctggtgaatccgggcccagctatggccagccacaaggacgatgaagaaaaatattttcctcagagcggggttctcatctttggaaaacaagactcgggaaaaactaatgtggacattgaaaaggttatgattacagacgaagaggaaatcaggaccaccaatcccgtggctacggagcagtatggttctgtatctaccaacctccagagcggcaacacacaagcagctacctcagatgtcaacacacaaggcgttcttccaggcatggtctggcaggacagagacgtgtacctgcaggggcccatctgggcaaagattccacacacggacggacattttcacccctctccccccatgggcggattcggacttaaacaccctcctccacaaattctcatcaagaacaccccggtacctgcgaatccttcgaccactttcagtgcggcaaagtttgcttccttcatcacacagtactccacggggcaggtcagcgtggagatcgagtgggagctgcagaaggagaacagcaaacgctggaatcccgaaattcagtacacttccaactacaacaaatctgttaatgtggactttactgtggacactaatggtgtgtattcagagcctcgccccattggcgccagatacctgactcgtaatctgtaa

SEQ ID NO: 211 - protein, 735 aa, Adeno-associated virus
MAADGYLPDWLEDTLSEGIRQWWKLKPGPPPPKPAERHKDDSRGLVLPGYRYLGPFNGLDKGEPVNEADAAALEHDKAYDRQLDSGDNPYLKYNHVDAEFQERLKEDTSFGGNLGRAVFQAKKRILEPLGLVEEPVKAAPGEKRPVEHSPAEPDSSSGTGKAGQQPARKRLNFGQTGDADSVPDPQPLGQPPAAPSGLGTNTMASGSGAPMADNNEGADGVGNSSGNWHCDSTWMGDRVITTSTRTWALPTYNNHLYKQISSQSGASNDNHYFGYSTPWGHFDFNRFHCHFSPRDWQRLINNNWGFRPKRLSFKLFNIQVKEVTQNDGTTTIANNLTSTVQVFTDSEYQLPYVLGSAHQGCLPPFPADVFMVPQYGYLTLNNGSQAVGRSSFYCLEYFPSQMLRTGNNFTFSYTFEDVPFHSSYAHSQSLDRLMNPLIDQYLYYLSRTNTPSGTTTMSRLQFSQAGASDIRDQSRNWLPGPCYRQQRVSKTAADNNNSDYSWTGATKYHLNGRDSLVNPGPAMASHKDDEEKYFPQSGVLIFGKQDSGKTNVDIEKVMITDEEEIRTTNPVATEQYGSVSTNLQSGNTQAATSDVNTQGVLPGMVWQDRDVYLQGPIWAKIPHTDGHFHPSPPMGGFGLKHPPPQILIKNTPVPANPSTTFSAAKFASFITQYSTGQVSVEIEWELQKENSKRWNPEIQYTSNYNKSVNVDFTVDTNGVYSEPRPIGARYLTRNL

SEQ ID NO: 212 - DNA, 2208 bp, Adeno-associated virus
atggctgccgatggttatcttccagattggctcgaggacaccctctctgaaggaataagacagtggtggaagctcaaacctggcccaccaccaccaaagcccgcagagcggcataaggacgacagcaggggtcttgtgcttcctgggtacaagtacctcggacccttcaacggactcgacaagggagagccggtcaacgaggcagacgccgcggccctcgagcacgacaaggcctacgaccggcagctcgacagcggagataacccgtacctcaagtacaaccacgccgacgcggagtttcaggagcgccttaaagaggatacgtcttttgggggcaacctcggacgagcagtcttccaggccaaaaagaggattcttgaacctctgggcctggttgaggaacctgttaagacggctccgggaaaaaagaggccggtagagcactctcctgcggagccagactcctcctcgggaaccggaaaagcgggccagcagcctgcaagaaagagattgaattttggtcagactggagacgcagactcagtacctgacccccggcctctcggacagccaccagcagccccctctggtctgggaactaatacgatggcttcaggcagtggcgcaccaatggcagacaataacgagggcgccgacggagtgggtaattcctcgggaaattggcattgcgattccacatggatgggcgacagagtcatcaccaccagcacccgcacctgggccctgcccacctacaacaaccatctgtacaagcaaatctccagccagtctggagccagcaacgacaaccactactttggctacagcaccccctgggggtattttgacttcaacagattccactgccacttctccccacgtgactggcaaagactcatcaacaacaactggggattccggcccaagagactcagcttcaagctctttaacattcaagtcaaagaggtcacgcagaatgacggtacgacgacgattgccaataaccttaccagcacggttcaggtgtttactgactcggagtaccagctcccgtacgtcctcggctcggcgcatcaaggatgcctcccgccgttcccagcagacgtcttcatggtgccacagtatggatacctcaccctgaacaacggcagtcaggcggtaggacgctcttccttttactgcctggagtactttccttctcagatgcttcgtaccggaaacaactttaccttcagctacacctttgaagacgttcctttccatagcagctacgctcacagccaaagtctggaccgtctcatgaatcctctcatcgaccagtacctgtattacttgagcagaacaaacactccaagcggaaccaccacgatgtccaggcttcagttttctcaggccggagcaagtgacattcgggaccagtctagaaactggcttcctggaccctgttaccgccagcagcgagtatcaaagacagctgcggacaacaacaacagtgattactcgtggactggagctaccaagtaccacctcaatggaagagactctctggtgaatccgggcccagctatggccagccacaaggacgatgaagaaaaatattttcctcagagcggggttctcatctttggaaaacaagactcgggaaaaactaatgtggacattgaaaaggttatgattacagacgaagaggaaatcaggaccaccaatcccgtggctacggagcagtatggttctgtatctaccaacctccagagcggcaacacacaagcagctacctcagatgtcaacacacaaggcgttcttccaggcatggtctggcaggacagagacgtgtacctgcaggggcccatctgggcaaagattccacacacggacggacattttcacccctctcccctcatgggcggattcggacttaaacaccctcctccacaaattctcatcaagaacaccccggtacctgcgaatccttcgaccactttcagtgcggcaaagtttgcttccttcatcacacagtactccacggggcaggtcagcgtggagatcgagtgggagctgcagaaggagaacagcaaacgctggaatcccgaaattcagtacacttccaactacaacaaatctgttaatgtggactttactgtggacactaatggtgtgtattcagagcctcgccccattggcaccagatacctgactcgtaatctgtaa

SEQ ID NO: 213 - protein, 735 aa, Adeno-associated virus
MAADGYLPDWLEDTLSEGIRQWWKLKPGPPPPKPAERHKDDSRGLVLPGYKYLGPFNGLDKGEPVNEADAAALEHDKAYDRQLDSGDNPYLKYNHADAEFQERLKEDTSFGGNLGRAVFQAKKRILEPLGLVEEPVKTAPGKKRPVEHSPAEPDSSSGTGKAGQQPARKRLNFGQTGDADSVPDPRPLGQPPAAPSGLGTNTMASGSGAPMADNNEGADGVGNSSGNWHCDSTWMGDRVITTSTRTWALPTYNNHLYKQISSQSGASNDNHYFGYSTPWGYFDFNRFHCHFSPRDWQRLINNNWGFRPKRLSFKLFNIQVKEVTQNDGTTTIANNLTSTVQVFTDSEYQLPYVLGSAHQGCLPPFPADVFMVPQYGYLTLNNGSQAVGRSSFYCLEYFPSQMLRTGNNFTFSYTFEDVPFHSSYAHSQSLDRLMNPLIDQYLYYLSRTNTPSGTTTMSRLQFSQAGASDIRDQSRNWLPGPCYRQQRVSKTAADNNNSDYSWTGATKYHLNGRDSLVNPGPAMASHKDDEEKYFPQSGVLIFGKQDSGKTNVDIEKVMITDEEEIRTTNPVATEQYGSVSTNLQSGNTQAATSDVNTQGVLPGMVWQDRDVYLQGPIWAKIPHTDGHFHPSPLMGGFGLKHPPPQILIKNTPVPANPSTTFSAAKFASFITQYSTGQVSVEIEWELQKENSKRWNPEIQYTSNYNKSVNVDFTVDTNGVYSEPRPIGTRYLTRNL

SEQ ID NO: 214 - DNA, 2208 bp, Adeno-associated virus
atggctgccgatggttatcttccagattggctcgaggacactctctctgaaggaataagacagtggtggaagctcaaacctggcccaccaccaccaaagcccgcagagcggcataaggacgacagcaggggtcttgtgcttcctgggtacaagtacctcggacccttcaacggactcgacaagggagagccggtcaacgaggcagacgccgcggccctcgagcacgacaaggcctacgaccggcagctcgacagcggagacaacccgtacctcaagtacaaccacgccgacgcggagtttcaggagcgccttaaaggagatacgtcttttgggggcaacctcggacgagcagtcttccaggccaaaaagaggattcttgaacctctgggcctggttgaggaacctgttaagacggctccgggaaaaaagaggccggtagagcactctcctgcggagccagactcctcctcgggaaccggaaaagcgggccagcagcctgcaagaaagagattgaattttggtcagactggagacgcagactcagtacctgacccccagcctctcggacagccaccagcagccccctctggtctgggaactaatacgatggcttcaggcagtggcgcaccaatggcagacaataacgagggcgccgacggagtgggtaattcctcgggaaattggcattgcgattccacatggatgggcggcagagtcatcaccaccagcacccgcacctgggccctgcccacctacaacaaccatctgtacaagcaaatctccagccagtctggagccagcaacgacaaccactactttggctacagcaccccctgggggtattttgacttcaacagattccactgccacttctccccacgtgactggcaaagactcatcaacaacaactggggattccggcccaagagactcagcttcaagctctttaacattcaagtcaaagaggtcacgcagaatgacggtacgacgacgattgccaataaccttaccagcacggttcaggtgtttactgactcggagtaccagctcccgtacgtcctcggctcggcgcatcaaggatgcctcccgccgttcccagcagacgtcttcatggtgccacagtatggatacctcaccctgaacaacggcagtcaggcggtaggacgctcttccttttactgcctggagtactttccttctcagacgcttcgtaccggaaacaactttaccttcagctacacctttgaagacgttcctttccatagcagctacgctcacagccaaagtctggaccgtctcatgaatcctctcatcgaccagtacctgtattacttgagcagaacaaacactccaagcggaaccaccacgatgtccaggcttcagttttctcaggccggagcaagtgacattcgggaccagtctagaaactggcttcctggaccctgttaccgccagcagcgagtatcaaagacagctgcggacaacaacaacagtgattactcgtggactggagctaccaagtaccacctcaatggaagagactctctggtgaatccgggcccagctatggccagccacaaggacgatgaagaaaaatattttcctcagagcggggttctcatctttggaaaacaagactcgggaaaaactaatgtggacattgaaaaggttatgattacagacgaagaggaaatcaggaccaccaatcccgtggctacggagcagtatggttctgtatctaccaacctccagagcggcaacacacaagcagctacctcagatgtcaacacacaaggcgttcttccaggcatggtctggcaggacagagacgtgtacctgcaggggcccatctgggcaaagattccacacacggacggacattttcacccctctcccctcatgggcggattcggacttaaacaccctcctccacaaattctcatcaagaacaccccggtacctgcgaatccttcgaccactttcagtgcggcaaagtttgcttccttcatcacacagtactccacggggcaggtcagcgtggagatcgagtgggagctgcagaaggagaacagcaaacgctggaatcccgaaattcagtacacttccaactacaacaaatctgttaatgtggactttactgtggacactaatggtgtgtattcagagcctcgccccattggcaccagatacctgactcgtaatctgtaa

SEQ ID NO: 215 - protein, 735 aa, Adeno-associated virus
MAADGYLPDWLEDTLSEGIRQWWKLKPGPPPPKPAERHKDDSRGLVLPGYKYLGPFNGLDKGEPVNEADAAALEHDKAYDRQLDSGDNPYLKYNHADAEFQERLKGDTSFGGNLGRAVFQAKKRILEPLGLVEEPVKTAPGKKRPVEHSPAEPDSSSGTGKAGQQPARKRLNFGQTGDADSVPDPQPLGQPPAAPSGLGTNTMASGSGAPMADNNEGADGVGNSSGNWHCDSTWMGGRVITTSTRTWALPTYNNHLYKQISSQSGASNDNHYFGYSTPWGYFDFNRFHCHFSPRDWQRLINNNWGFRPKRLSFKLFNIQVKEVTQNDGTTTIANNLTSTVQVFTDSEYQLPYVLGSAHQGCLPPFPADVFMVPQYGYLTLNNGSQAVGRSSFYCLEYFPSQTLRTGNNFTFSYTFEDVPFHSSYAHSQSLDRLMNPLIDQYLYYLSRTNTPSGTTTMSRLQFSQAGASDIRDQSRNWLPGPCYRQQRVSKTAADNNNSDYSWTGATKYHLNGRDSLVNPGPAMASHKDDEEKYFPQSGVLIFGKQDSGKTNVDIEKVMITDEEEIRTTNPVATEQYGSVSTNLQSGNTQAATSDVNTQGVLPGMVWQDRDVYLQGPIWAKIPHTDGHFHPSPLMGGFGLKHPPPQILIKNTPVPANPSTTFSAAKFASFITQYSTGQVSVEIEWELQKENSKRWNPEIQYTSNYNKSVNVDFTVDTNGVYSEPRPIGTRYLTRNL

SEQ ID NO: 216 - DNA, 2208 bp, Adeno-associated virus
atggctgccgatggttatcttccagattggctcgaggacactctctctgaaggaataagacagtggtggaagctcaaacctggcccaccaccaccaaagcccgcagagcggcataaggacgacagcaggggtcttgtgcttcctgggtacaagtacctcggacccttcaacggactcgacaagggagagccggtcaacgaggcagacgccgcggccctcgagcacgacaaggcctacgaccggcagctcgacagcggagacaacccgtacctcaagtacaaccacgccgacgcggagtttcaggagcgtcttaaagaagatacgtcttttgggggcaacctcggacgagcagtcttccaggccaaaaagaggattcttgaacctctgggcctggttgaggaacctgttaagacggctccgggaaaaaagaggccggtagagcactctcctgcggagccagactcctcctcgggaaccggaaaagcgggccagcagcctgcaagaaagagattgaattttggtcagactggagacgcagactcagtacctgacccccagcctctcggacagccaccagcagccccctctggtctgggaactaatacgatggcttcaggcagtggcgcaccaatggcagacaataacgagggcgccgacggagtgggtaattcctcgggaaattggcattgcgattccacatggatgggcgacagagtcatcaccaccagcacccgcacctgggccctgcccacctgcaacaaccatctgtacaagcaaatctccagccagtctggagccagcaacgacaaccactactttggctacagcaccccctgggggtattttgacttcaacagattccactgccacttctccccacgtgactggcaaagactcatcaacaacaactggggattccggcccaagagactcagcttcaagctctttaacattcaagtcaaagaggtcacgcagaatgacggtacgacgacgattgccaataaccttaccagcacggttcaggtgtttactgactcggagtaccagctcccgtacgtcctcggctcggcgcatcaaggatgcctcccgccgttcccagcagacgtcttcatggtgccacagtatggatacctcaccctgaacaacggcagtcaggcggtaggacgctcttccttttactgcctggagtattttccttctcagatgcttcgtaccggaaacaactttaccttcagctacacctttgaagacgttcctttccatagcagctacgctcacagccaaagtctggaccgtctcatgaatcctctcatcgaccagtacctgtattacttgagcagaacaaacactccaagcggaaccaccacgatgtccaggcttcagttttctcaggccggagcaagtgacattcgggaccagtctagaaactggcttcctggaccctgttaccgccagcagcgagtatcaaagacagctgcggacaacaacaacagtgattactcgtggactggagctaccaagtaccacctcaatggaagagactctctggtgaatccgggcccagctatggccagccacaaggacgatgaagaaaaatattttcctcagagcggggttctcatctttggaaaacaagactcgggaaaaactaatgtggacattgaaaaggttatgattacagacgaagaggaaatcaggaccaccaatcccgtggctacggagcagtatggttctgtatctacctacctccagagcggcaacacacaagcagctacctcagatgtcaacacacaaggcgttcttccaggcatggtctggcaggacagagacgtgtacctgcgggggcccatctgggcaaagattccacacacggacggacattttcacccctctcccctcatgggcggatttggacttaaacaccctcctccacaaattctcatcaagaacaccccggtacctgcgaatccttcgaccactttcagtgcggcaaagtttgcttccttcatcacacagtactccacggggcaggtcagcgtggagatcgagtgggagctgcagaaggagaacagcaaacgctggaatcccgaaattcagtacacttccaactacaacaaatctgttaatgtggactttactgtggacactaatggtgtgtattcagagcctcgccccattggcaccagatacctgactcgtaatctgtaa

SEQ ID NO: 217 - protein, 735 aa, Adeno-associated virus
MAADGYLPDWLEDTLSEGIRQWWKLKPGPPPPKPAERHKDDSRGLVLPGYKYLGPFNGLDKGEPVNEADAAALEHDKAYDRQLDSGDNPYLKYNHADAEFQERLKEDTSFGGNLGRAVFQAKKRILEPLGLVEEPVKTAPGKKRPVEHSPAEPDSSSGTGKAGQQPARKRLNFGQTGDADSVPDPQPLGQPPAAPSGLGTNTMASGSGAPMADNNEGADGVGNSSGNWHCDSTWMGDRVITTSTRTWALPTCNNHLYKQISSQSGASNDNHYFGYSTPWGYFDFNRFHCHFSPRDWQRLINNNWGFRPKRLSFKLFNIQVKEVTQNDGTTTIANNLTSTVQVFTDSEYQLPYVLGSAHQGCLPPFPADVFMVPQYGYLTLNNGSQAVGRSSFYCLEYFPSQMLRTGNNFTFSYTFEDVPFHSSYAHSQSLDRLMNPLIDQYLYYLSRTNTPSGTTTMSRLQFSQAGASDIRDQSRNWLPGPCYRQQRVSKTAADNNNSDYSWTGATKYHLNGRDSLVNPGPAMASHKDDEEKYFPQSGVLIFGKQDSGKTNVDIEKVMITDEEEIRTTNPVATEQYGSVSTYLQSGNTQAATSDVNTQGVLPGMVWQDRDVYLRGPIWAKIPHTDGHFHPSPLMGGFGLKHPPPQILIKNTPVPANPSTTFSAAKFASFITQYSTGQVSVEIEWELQKENSKRWNPEIQYTSNYNKSVNVDFTVDTNGVYSEPRPIGTRYLTRNL

SEQ ID NO: 218 - DNA, 2208 bp, Adeno-associated virus; identical to SEQ ID NO: 212

SEQ ID NO: 219 - protein, 735 aa, Adeno-associated virus; identical to SEQ ID NO: 213

SEQ ID NO: 220 - DNA, 2208 bp, Adeno-associated virus
atggctgccgatggttatcttccagattggctcgaggacactctctctgaaggaataagacagtggtggaagctcaaacctggcccaccaccaccaaagcccgcagagcggcataaggacggcagcaggggtcttgtgcttcctgggtacaagtacctcggacccttcaacggactcgacaagggagagccggtcaacgaggcagacgccgcggccctcgagcacgacaaggcctacgaccggcagctcaacagcggagacaacccgtacctcaagtacaaccacgccgacgcggagtttcaggagcgccttaaagaagatacgtcttttgggggcaacctcggacgagcagtcttccaggcaaaaaagagggttcttgaacctctgggcctggttgaggagcctgttaaaacggctccgggaaaaaagagaccggtagagcactctcctgcggagccagactcctcctcgggaaccggaaaagcgggccagcagcctgcaagaaagagattgaattttggtcagactggagacgcagactccgtacctgacccccagcctctcggacagccaccagcagccccctctggtctgggatctactacaatggctacaggcagtggcgcaccaatggcagacaataacgagggtgccgatggagtgggtaattcctcaggaaattggcattgcgattcccaatggctgggcgacagagtcatcaccacaagcactcgaacctgggccctgcccacctacaacaaccacctctacaagcaaatctccagccaatcaggagcctcaaacgacaaccactattttggctacagcaccccttgggggtattttgacttcaacagattccactgccacttttcaccacgtgactggcaaagactcatcaacaacaactggggattccgacccaagagactcaacttcaagctctttaacattcaagtcaaagaggtcacgcagaatgacggtacgacgacgattgccaataaccttaccagcacggttcaggtgtttactgactcggagtaccagctcccgtacgtcctcggctcggcgcatcaaggatgcctcccgccgttcccagcggacgtcttcatggtcccacagtatggatacctcaccctgaacaacgggagtcaggcggtaggacgctctcccttttactgcctggagtactttccttctcagatgctgcgtactggaaacaactttcagttcagctacacttttgaagacgtgcctttccacagcagctacgctcacagccagagtctggatcggctgatgaatcctctgatcgaccagtacctgtattatctgaacaagacacaaacaaatagtggaactcttcagcagtctcggctactgtttagccaagctggacccaccaacatgtctcttcaagctaaaaactggctgcctggaccttgctacagacagcagcgtctgtcaaagcaggcaaacgacaacaacaacagcaactttccctggactgcagctacaaagtatcatctaaatggccgggactcgttggttaatccaggaccagctatggccagtcacaaggatgacgaagaaaagtttttccccatgcatggaaccctgatatttggtaaacaaggaacaaatgccaacgacgcggatttggaaaatgtcatgattacagatgaagaagaaatcaggaccaccaatcccgtggctacggagcagtacgggactgtgtcaaataatttgcaaaactcaaacactggtccaactactggaactgtcaatcaccaaggagcgttacctggtatggtgtggcaggatcgagatgtgtaccttcagggacccatttgggccaagattcctcacaccgatggacactttcatccttctccactgatgggaggttttggactcaaacacccgcctcctcagattatgatcaaaaacactcccgttccagccaatcctcctacaaacttcagttctgccaagtttgcttctttcatcacacagtattccacggggcaggtcagcgtggagatcgagtgggagctgcagaaggagaacagcaaacgctggaatcccgaaattcagtacacttccaactacaacaaatctgttaatgtggactttactgtggacaataatggcgtgtactcagagcctcgccccattggcaccagatacctgactcgtaatctgtaa

SEQ ID NO: 221 - protein, 735 aa, Adeno-associated virus
MAADGYLPDWLEDTLSEGIRQWWKLKPGPPPPKPAERHKDGSRGLVLPGYKYLGPFNGLDKGEPVNEADAAALEHDKAYDRQLNSGDNPYLKYNHADAEFQERLKEDTSFGGNLGRAVFQAKKRVLEPLGLVEEPVKTAPGKKRPVEHSPAEPDSSSGTGKAGQQPARKRLNFGQTGDADSVPDPQPLGQPPAAPSGLGSTTMATGSGAPMADNNEGADGVGNSSGNWHCDSQWLGDRVITTSTRTWALPTYNNHLYKQISSQSGASNDNHYFGYSTPWGYFDFNRFHCHFSPRDWQRLINNNWGFRPKRLNFKLFNIQVKEVTQNDGTTTIANNLTSTVQVFTDSEYQLPYVLGSAHQGCLPPFPADVFMVPQYGYLTLNNGSQAVGRSPFYCLEYFPSQMLRTGNNFQFSYTFEDVPFHSSYAHSQSLDRLMNPLIDQYLYYLNKTQTNSGTLQQSRLLFSQAGPTNMSLQAKNWLPGPCYRQQRLSKQANDNNNSNFPWTAATKYHLNGRDSLVNPGPAMASHKDDEEKFFPMHGTLIFGKQGTNANDADLENVMITDEEEIRTTNPVATEQYGTVSNNLQNSNTGPTTGTVNHQGALPGMVWQDRDVYLQGPIWAKIPHTDGHFHPSPLMGGFGLKHPPPQIMIKNTPVPANPPTNFSSAKFASFITQYSTGQVSVEIEWELQKENSKRWNPEIQYTSNYNKSVNVDFTVDNNGVYSEPRPIGTRYLTRNL

SEQ ID NO: 222 - DNA, 2208 bp, Adeno-associated virus
atggctgccgatggttatcttccagattggctcgaggacactctctctgaaggaataagacagtggtggaagctcaaacctggcccaccaccaccaaagcccgcagagcggcataaggacgacagcaggggtcttgtgcttcctgggtacaagtacctcggacccttcaacggactcgacaagggagagccggtcaacgaggcagacgccgcggccctcgagcacgacaaggcctacgaccggcagctcgacagcggagacaacccgtacctcaagtacaaccacgccgacgcggagtttcaggagcgtcttaaagaagatacgtcttttgggggcaacctcggacgagcagtcttccaggccaaaaagaggattcttgaacctctgggcctggttgaggaacctgttaagacggctccgggaaaaaagaggccggtagagcactctcctgcggagccagactcctcctcgggaaccggaaaagcgggccagcagcctgcaagaaagagattgaattttggtcagactggagacgcagactcagtacctgacccccagcctctcggacagccaccagcagccccctctggtctgggaactaatacgatggcttcaggcagtggcgcaccaatggcagacaataacgagggcgccgacggagtgggtaattcctcgggaaattggcattgcgattccacatggatgggcgacagagtcatcaccaccagcacccgcacctgggccctgcccacctacaacaaccatctgtacaagcaaatctccagccagtctggagccagcaacgacaaccactactttggctacagcaccccctgggggtattttgacttcaacagattccactgccacttctccccacgtgactggcaaagactcatcaacaacaactggggattccggcccaagagactcagcttcaagctctttaacattcaagtcaaagaggtcacgcagaatgacggtacgacgacgattgccaataaccttaccagcacggttcaggtgtttactgactcggagtaccagctcccgtacgtcctcggctcggcgcatcaaggatgcctcccgccgttcccagcagacgtcttcatggtgccacagtatggatacctcaccctgaacaacggcagtcaggcggtaggacgctcttccttttactgcctggagtactttccttctcagatgcttcgtaccggaaacaactttaccttcagctacacctttgaagacgttcctttccatagcagctacgctcacagccaaagtctggaccgtctcatgaatcctctcatcgaccagtacctgtattacttgagcagaacaaacactccaagcggaaccaccacgatgtccaggcttcagttttctcaggccggagcaagtgacattcgggaccagtctagaaactggcttcctggaccctgttaccgccagcagcgagtatcaaagacagctgcggacaacaacaacagtgattactcgtggactggagctaccaagtaccacctcaatggaagagactctctggtgaatccgggcccagctatggccagccacaaggacgatgaagaaaaatattttcctcagagcggggttctcatctttggaaaacaagactcgggaaaaactaatgtggacattgaaaaggttatgattacagacgaagaggaaatcaggaccaccaatcccgtggctacggagcagtatggttctgtatctaccaacctccagagcggcaacacacaagcagctacctcagatgtcaacacacaaggcgttcttccaggcatggtctggcaggacagagacgtgtacctgcaggggcccatctgggcaaagattccacacacggacggacattttcacccctctcccctcatgggcggattcggacttaaacaccctcctccacaaattctcatcaagaacaccccggtacctgcgaatccttcgaccactttcagtgcggcaaagtttgcttccttcatcacacagtactccacggggcaggtcagcgtggagatcgagtgggagctgcagaaggagaacagcaaacgctggaatcccgaaattcagtacacttccaactacaacaaatctgttaatgtggactttactgtggacactaatggtgtgtattcagagcctcgccccattggcaccagatacctgactcgtaatctgtaa

SEQ ID NO: 223 - protein, 735 aa, Adeno-associated virus
MAADGYLPDWLEDTLSEGIRQWWKLKPGPPPPKPAERHKDDSRGLVLPGYKYLGPFNGLDKGEPVNEADAAALEHDKAYDRQLDSGDNPYLKYNHADAEFQERLKEDTSFGGNLGRAVFQAKKRILEPLGLVEEPVKTAPGKKRPVEHSPAEPDSSSGTGKAGQQPARKRLNFGQTGDADSVPDPQPLGQPPAAPSGLGTNTMASGSGAPMADNNEGADGVGNSSGNWHCDSTWMGDRVITTSTRTWALPTYNNHLYKQISSQSGASNDNHYFGYSTPWGYFDFNRFHCHFSPRDWQRLINNNWGFRPKRLSFKLFNIQVKEVTQNDGTTTIANNLTSTVQVFTDSEYQLPYVLGSAHQGCLPPFPADVFMVPQYGYLTLNNGSQAVGRSSFYCLEYFPSQMLRTGNNFTFSYTFEDVPFHSSYAHSQSLDRLMNPLIDQYLYYLSRTNTPSGTTTMSRLQFSQAGASDIRDQSRNWLPGPCYRQQRVSKTAADNNNSDYSWTGATKYHLNGRDSLVNPGPAMASHKDDEEKYFPQSGVLIFGKQDSGKTNVDIEKVMITDEEEIRTTNPVATEQYGSVSTNLQSGNTQAATSDVNTQGVLPGMVWQDRDVYLQGPIWAKIPHTDGHFHPSPLMGGFGLKHPPPQILIKNTPVPANPSTTFSAAKFASFITQYSTGQVSVEIEWELQKENSKRWNPEIQYTSNYNKSVNVDFTVDTNGVYSEPRPIGTRYLTRNL

SEQ ID NO: 224 - DNA, 2208 bp, Adeno-associated virus
atggctgccgatggttatcttccagattggctcgaggacactctctctgaaggaataagacagtggtggaagctcaaacctggcccaccaccaccaaagcccgcagagcggcataaggacgacagcaggggtcttgtgcttcctgggtacaagtacctcggacccttcaacggactcgacaagggagagccggtcaacgaggcagacgccgcggccctcgagcacgacaaggcctacgaccggcagctcgacagcggagacaacccgtacctcaagtacaaccacgccgacgcggagtttcaggagcgtcttaaagaagatacgtcttttgggggcaacctcggacgagcagtcttccaggccaaaaagaggattcttgaacctctgggcctggttgaggaacctgttaagacggctccgggaaaaaagaggccggtagagcactctcctgcggagccagactcctcctcgggaaccggaaaagcgggccagcagcctgcaagaaagagattgaattttggtcagactggagacgcagactcagtacctgacccccagcctctcggacagccaccagcagccccctctggtctgggaactaatacgatggcttcaggcagtggcgcaccaatggcagacaataacgagggcgccgacggagtgggtaattcctcgggaaattggcattgcgattccacatggatgggcgacagagtcatcaccaccagcacccgcacctgggccctgcccacctacaacaaccatctgtacaagcaaatctccagccagtctggagccagcaacgacaaccactactttggctacagcaccccctgggggtatttcgacttcaacagattccactgccacttctccccacgtgactggcaaagactcatcaacaacaactggggattccggcccaagagactcagcttcaagctctttaacattcaagtcaaagaggtcacgcagaatgacggtacgacgacgattgccaataaccttaccagcacggttcaggtgtttactgactcggggtaccagctcccgtacgtcctcggctcggcgcatcaaggatgccttccgccgttcccagcagacgtcttcatggtgccacagtatggatacctcaccctgaacaacggcagtcaggcggtaggacgctcttccttttactgcctggagtactttccttctcagatgcttcgtaccggaaacaactttaccttcagctacacctttgaagacgttcctttccatagcagctacgctcacggccaaagtctggaccgtctcatgaatcctctcatcgaccagtacctgtattacttgagcagaacaaacactccaagcggaaccaccacgatgtccaggcttcagttttctcaggccggagcaagtgacgttcgggaccagtctagaaactggcttcctggaccctgttaccgccagcagcgagtatcaaagacagctgcggacaacaacaacagtgattactcgtggactggagctaccaagtaccacctcaatggaagagactctctggtgaatccgggcccagctatggccagccacaaggacgatgaagaaaaatattttcctcagagcggggttctcgtctttggaaaacaagactcgggaaaaactaatgtggacattgaaaaggttatgattacagacgaagaggaaatcaggaccaccaatcccgcggctacggagcagtatggttctgtatctaccaacctccagagcggcaacacacaagcagctacctcagatgtcaacacacaaggcgttcttccaggcatggtctggcaggacagagacgtgtacctgcaggggcccatctgggcaaagattccacacacggacggacattttcacccctctcccctcatgggcggattcggacttaaacaccctcctccacaaattctcatcaagaacaccccggtacctgcgaatccttcgaccactttcagtgcggcaaagtttgtttccttcatcacacagtactccacggggcaggtcagcgtggagatcgagtgggagctgcagaaggagaacagcaaacgctggaatcccgaaattcagtacacttccaactacaacaaatctgttaatgtggactttactgtggacactaatggtgtgtattcagagcctcgccccattggcaccagatacctgactcgtaatctgtaa

SEQ ID NO: 225 - protein, 735 aa, Adeno-associated virus
MAADGYLPDWLEDTLSEGIRQWWKLKPGPPPPKPAERHKDDSRGLVLPGYKYLGPFNGLDKGEPVNEADAAALEHDKAYDRQLDSGDNPYLKYNHADAEFQERLKEDTSFGGNLGRAVFQAKKRILEPLGLVEEPVKTAPGKKRPVEHSPAEPDSSSGTGKAGQQPARKRLNFGQTGDADSVPDPQPLGQPPAAPSGLGTNTMASGSGAPMADNNEGADGVGNSSGNWHCDSTWMGDRVITTSTRTWALPTYNNHLYKQISSQSGASNDNHYFGYSTPWGYFDFNRFHCHFSPRDWQRLINNNWGFRPKRLSFKLFNIQVKEVTQNDGTTTIANNLTSTVQVFTDSGYQLPYVLGSAHQGCLPPFPADVFMVPQYGYLTLNNGSQAVGRSSFYCLEYFPSQMLRTGNNFTFSYTFEDVPFHSSYAHGQSLDRLMNPLIDQYLYYLSRTNTPSGTTTMSRLQFSQAGASDVRDQSRNWLPGPCYRQQRVSKTAADNNNSDYSWTGATKYHLNGRDSLVNPGPAMASHKDDEEKYFPQSGVLVFGKQDSGKTNVDIEKVMITDEEEIRTTNPAATEQYGSVSTNLQSGNTQAATSDVNTQGVLPGMVWQDRDVYLQGPIWAKIPHTDGHFHPSPLMGGFGLKHPPPQILIKNTPVPANPSTTFSAAKFVSFITQYSTGQVSVEIEWELQKENSKRWNPEIQYTSNYNKSVNVDFTVDTNGVYSEPRPIGTRYLTRNL

SEQ ID NO: 226 - DNA, 2208 bp, Adeno-associated virus
atggctgccgatggttatcttccagattggctcgaggacactctctctgaaggaataagacagtggtggaaactcaaacctggcccaccaccaccaaagcccgcagagcggcataaggacgacagcaggggtcttgtgcttcctgggtacaagtacctcggacccttcaacggactcgacaagggagagccggtcaacgaggcagacgccgcggccctcgagcacgacaaggcctacgaccggcagctcgacagcggagacaacccgtacctcaagtacaaccacgccgacgcggagtttcaggagcgccttaaagaagatacgtcttttgggggcaacctcggacgagcagtcttccaggcaaaaaagagggttctggaacctctgagcctggttgaggagcctgttaagacggctccgggaaaaaagaggccggtagagcactctcccgcagagccagattcctcctccggaactggaaagtcgggcaaccagcctgcaagaaagagattgaatttcggtcagactggagactcagactccgtacctgacccccagcctctcggacagccaccagcagccccctctggtctgggaactaatacgatggctacaggcagtggcgcaccaatggcagacaataacgagggcgccgacggagtgggtaattcctcgggaaattggcattgcgattccacatggatgggcgacagagtcatcaccaccagcacccgaacctgggccctgcccacctacaacaaccatctgtacaagcaaatatccagccagtctggagccagcaacgacaatcactactttggctacagcaccccctgggggtattttgacttcaacagattccactgccacttttcaccacgtgactggcaaagactcatcaacaacaactggggattccgacccaagagactcaacttcaagctctttaacattcaagtcaaagaggtcacgcagaatgacggtacgacgacgattgccaataaccttaccagcacggttcaggtgtttactgactcggagtaccagctcccgtacgtcctcggctcggcgcatcaaggatgcctcccgccgttcccagcagacgtcttcatggtgccacagtatggatacctcaccctgaacaacgggagtcaggcagtaggacgctcttcattttactgcctagagtactttccttctcagatgctgcgtaccggaaacaactttaccttcagctacacctttgaggacgttcctttccacagcagctacgctcacagccagagtttggaccgtctcatgaatcctctcatcgaccagtacctgtattacttgagcagaacaaacactccaagcggaaccaccacgcagtccaggcttcagttttctcaggccggagcgagtgacattcaggaccagtctaggaactggcttcctggaccctgttaccgtcagcagcgagtatcaaagacatctgcggataacaacaacagtgaatactcgtggactggagctaccaagtaccacctcaatggcagagactctctggtgaatccgggcccggccatggccagccacaaagacgatgaagaaaagttttttcctcagagcggggttcttatctttgggaagcaaggctcagagaaaacaaatgtggatattgaaaaggtcatgattacagacgaagaggaaatcaggaccaccaatcccgtggctacggagcagtatggttctgtatctaccaacctccagagcggcaacacacaagcagctaccgcagatgtcaacacacaaggcgttcttccaggcatggtcgggcaagacagagacgtgtacctgcaggggcctacttgggcaaagattccacacacggacggacattttcacccctctcccctcatgggcggatttggacttaaacaccctcctccacagattctcatcaagaacaccccggtacctgcgaatccttcgaccaccttcagtgcggcaaagtttgcttccttcattacacagtactccacggggcaggtcagcgtggagatcgagtgggagctgcagaaggagaacagcaaacgctggaatcccgagatccagtacacttccaactacaacaagtctgttaatgtggactttactgtggacactaatggcgtgtattcagagcctcgccccattggcaccagatacctgactcgtaatctgtaa

SEQ ID NO: 227 - protein, 735 aa, Adeno-associated virus
MAADGYLPDWLEDTLSEGIRQWWKLKPGPPPPKPAERHKDDSRGLVLPGYKYLGPFNGLDKGEPVNEADAAALEHDKAYDRQLDSGDNPYLKYNHADAEFQERLKEDTSFGGNLGRAVFQAKKRVLEPLSLVEEPVKTAPGKKRPVEHSPAEPDSSSGTGKSGNQPARKRLNFGQTGDSDSVPDPQPLGQPPAAPSGLGTNTMATGSGAPMADNNEGADGVGNSSGNWHCDSTWMGDRVITTSTRTWALPTYNNHLYKQISSQSGASNDNHYFGYSTPWGYFDFNRFHCHFSPRDWQRLINNNWGFRPKRLNFKLFNIQVKEVTQNDGTTTIANNLTSTVQVFTDSEYQLPYVLGSAHQGCLPPFPADVFMVPQYGYLTLNNGSQAVGRSSFYCLEYFPSQMLRTGNNFTFSYTFEDVPFHSSYAHSQSLDRLMNPLIDQYLYYLSRTNTPSGTTTQSRLQFSQAGASDIQDQSRNWLPGPCYRQQRVSKTSADNNNSEYSWTGATKYHLNGRDSLVNPGPAMASHKDDEEKFFPQSGVLIFGKQGSEKTNVDIEKVMITDEEEIRTTNPVATEQYGSVSTNLQSGNTQAATADVNTQGVLPGMVGQDRDVYLQGPTWAKIPHTDGHFHPSPLMGGFGLKHPPPQILIKNTPVPANPSTTFSAAKFASFITQYSTGQVSVEIEWELQKENSKRWNPEIQYTSNYNKSVNVDFTVDTNGVYSEPRPIGTRYLTRNL

SEQ ID NO: 228 - DNA, 2208 bp, Adeno-associated virus
atggctgccgatggttatcttccagattggctcgaggacactctctctgaaggaataagacagtggtggaagctcaaacctggcccaccaccaccaaagcccgcagagcggcataaggacgacagcaggggtcttgtgcttcctgggtacaagtacctcggacccttcaacggactcgacaagggagagccggtcaacgaggcagacgccgcggccctcgagcacgacaaggcctacgaccggcagctcgacagcggagacaacccgtacctcaagtacaaccacgccgacgcagagtttcaggagcgccttaaagaagatacgtcttttgggggcaacctcggacgagcagtcttccaggcaaaaaagagggttctggaacctctgggcctggttgaggagcctgttaagacggctccgggaaaaaagaggccggtagagcactctcctgcagagccagattcctcctccggaactggaaagtcgggcaaccagcctgcaagaaagagattgaatttcggtcagactggagactcagactccgtacctgacccccagcctctcggacagccaccagcagccccctctggtctgggaactaatacgatggctacaggcagtggcgcaccaatggcagacaataacgagggcgccgacggagtgggtaattcctcgggaaattggcattgcgattccacatggatgggcgacagagtcatcaccaccagcacccgaacctgggccctgcccacctacaacaaccatctgtacaagcaaatatccagccagtctggagccagcaacgacaatcactactttggctacagcaccccctgggggtattttgacttcaacagattccactgccacttttcaccacgtgactggcaaagactcatcaacaacaactggggattccgacccaagagactcaacttcaagctctttaacattcaagtcaaagaggtcacgcagaatgacggtacgacgacgattgccaataaccttaccagcacggttcaggtgtttactgactcggagtaccagctcccgtacgtcctcggctcggcgcatcaaggatgcctcccgccgttcccagcagacgtcttcatggtgccacagtatggatacctcaccctgaacaacgggagtcaggcagtaggacgctcttcattttactgcctagggtactttccttctcagatgctgcgtaccggaaacaactttaccttcagctacacctttgaggacgttcctttccacagcagctacgctcacagccagagtttggaccgtctcatgaatcctctcatcgaccagtacctgtattacttgagcagaacaaacactccaagcggaaccaccacgcagtccaggcttcagttttctcaggccggagcgagtgacattcgggaccagtctaggaactggcttcctggaccctgttaccgtcagcagcgagtatcaaagacatctgcggataacaacaacagtgaatactcgtggactggagctaccaagtaccacctcaatggcagagactctctggtgaatccgggcccggccatggccagccacaaagacgatgaagaaaagttttttcctcagagcggggttcttatctttgggaagcaaggcccagagaaaacaaatgtggatattgaaaaggtcatgattacagacgaagaggaaatcaggaccaccaatcccgtggctacggagcagtatggttctgtatctaccaacctccagagcggcaacacacaagcagctaccgcagatgtcaacacacaaggcgttcttccaggcatggtctggcaagacagagacgtgtacctgcaggggcctatttgggcaaagattccacacacggacggacattttcacccctctcccctcatgggcggatttggacttaaacaccctcctccacagattctcatcaagaacaccccggtacctgcgaatccttcgaccaccttcagtgcggcaaagtttgcttccttcattacacagtactccacggggcaggtcagcgtggagatcgagtgggagctgcagaaggagaacagcaaacgctggaatcccgagatccagtacacttccaactacaacaagtctgttaatgtggactttactgtggacactaatggcgtgtattcagagcctcgccccattggcaccagatacctgactcgtaatctgtaa

SEQ ID NO: 229 - protein, 735 aa, Adeno-associated virus
MAADGYLPDWLEDTLSEGIRQWWKLKPGPPPPKPAERHKDDSRGLVLPGYKYLGPFNGLDKGEPVNEADAAALEHDKAYDRQLDSGDNPYLKYNHADAEFQERLKEDTSFGGNLGRAVFQAKKRVLEPLGLVEEPVKTAPGKKRPVEHSPAEPDSSSGTGKSGNQPARKRLNFGQTGDSDSVPDPQPLGQPPAAPSGLGTNTMATGSGAPMADNNEGADGVGNSSGNWHCDSTWMGDRVITTSTRTWALPTYNNHLYKQISSQSGASNDNHYFGYSTPWGYFDFNRFHCHFSPRDWQRLINNNWGFRPKRLNFKLFNIQVKEVTQNDGTTTIANNLTSTVQVFTDSEYQLPYVLGSAHQGCLPPFPADVFMVPQYGYLTLNNGSQAVGRSSFYCLGYFPSQMLRTGNNFTFSYTFEDVPFHSSYAHSQSLDRLMNPLIDQYLYYLSRTNTPSGTTTQSRLQFSQAGASDIRDQSRNWLPGPCYRQQRVSKTSADNNNSEYSWTGATKYHLNGRDSLVNPGPAMASHKDDEEKFFPQSGVLIFGKQGPEKTNVDIEKVMITDEEEIRTTNPVATEQYGSVSTNLQSGNTQAATADVNTQGVLPGMVWQDRDVYLQGPIWAKIPHTDGHFHPSPLMGGFGLKHPPPQILIKNTPVPANPSTTFSAAKFASFITQYSTGQVSVEIEWELQKENSKRWNPEIQYTSNYNKSVNVDFTVDTNGVYSEPRPIGTRYLTRNL

SEQ ID NO: 230 - protein, 735 aa, Adeno-associated virus
MAADGYLPDWLEDTLSEGIRQWWKLKPGPPPPKPAERHKDDSRGLVLPGYKYLGPFNGLDKGEPVNEADAAALEHDKAYDRQLDSGDNPYLKYNHADAEFQERLKEDTSFGGNLGRAVFQAKKRVLEPLGLVEEPVKTAPGKKRPVEHSPAEPDSSSGTGKSGNQPARKRLNFGQTGDSDSVPDPQPLGQPPAAPSGLGTNTMATGSGAPMADNNEGADGVGNSSGNWHCDSTWMGDRVITTSTRTWALPTYNNHLYKQISSQSGASNDNHYFGYSTPWGYFDFNRFHCHFSPRDWQRLINNNWGFRPKRLNFKLFNIQVKEVTQNDGTTTIANNLTSTVQVFTDSEYQLPYVLGSAHQGCLPPFPADVFMVPQYGYLTLNNGSQAVGRSSFYCLEYFPSQMLRTGNNFTFSYTFEDVPFHSSYAHSQSLDRLMNPLIDQYLYYLSRTNTPSGTTTQSRLQFSQAGASDIRDQSRNWLPGPCYRQQRVSKTSADNNNSEYSWTGATKYHLNGRDSLVNPGPAMASHKDDEEKFFPQSGVLIFGKQGPEKTNVDIEKVMITDEEEIRTTNPVATEQYGSVSTNLQSGNTQAATADVNTQGVLPGMVWQDRDVYLQGPIWAKIPHTDGHFHPSPLMGGFGLKHPPPQILIKNTPVPANPSTTFSAAKFASFITQYSTGQVSVEIEWELQKENSKRWNPEIQYTSNYNKSVNVDFTVDTNGVYSEPRPIGTRYLTRNL

SEQ ID NO: 231 - protein, 735 aa, Adeno-associated virus; identical to SEQ ID NO: 230

SEQ ID NO: 232 - DNA, 2211 bp, Adeno-associated virus
atggctgccgatggttatcttccagattggctcgaggacactctctctgaaggaataagacagtggtggaagctcaaacctggcccaccaccaccaaagcccgcagagcggcataaggacgacagcaggggtcttgtgcttcctgggtacaagtacctcggacccttcaacggactcgacaagggggagccggtcaacgaggcagacgccgcggccctcgagcacgacaaggcctacgaccggcagctcgacagcggagacaacccgtacctcaagtacaaccacgccgacgcagagtttcaggagcgccttaaagaagatacgtcttttgggggcaacctcggacgagcagtcttccaggcgaaaaagagggttcttgaacctctgcggcctggtttgaggaaacctgttaagacggctccgggaaaaaagaggccggtagagcactctcctgtggagccagactcctcctcgggaaccggaaaagcgggccagcagcctgcaagaaaaagattaaattttggtcagactggagacgcagactccgtacctgacccccagcctctcggacagccaccagcagccccctctggtctgggatctactacaatggctacaggcagtggcgcaccaatggcagacaataacgagggtgccgatggagtgggtaattcctcaggaaattggcattgcgattcccaatggctggacgacagagtcatcgccaccagcacccgaacctgggccctgcccacatacaacaaccacctctacaagcaaatctccagccaatcaggagcctgcaacgacaaccactactttggctacagcaccccctgggggtattttgacttcaacagattccactgccacttttcaccacgtgactggcaaagactcatcaacagcaactggggattccggcccaaaagactcaacttcaagctctttaatattcaagtcaaagaggtcacgcagaatgacggtacgacgacgattgccaataaccttaccagcacggttcaggtgtttactgactcggagtaccagctcccgtacgtcccgggctcggcgcatcaaggatgcctcccgccgtttccagcggacgtcttcatggtcccacagtatggatacctcaccctgaacaacgggagtcaggcggtaggacgctcttccttttactgcctggagtactttccttctcagatgctgcgtactggaaacaactttcagttcagctacacttttgaagacgtgcctttccacagcagctacgctcactgccagagtctggatcggctgatgaatcctctgatcgaccagtacctgtattatctgaacaagacacaaacaaatagtggaactcttcagcagtctcggctactgtttagccaagctggaccaaccaacatgtctcttcaagctaaaaactggctgcctggaccttgctacagacagcagcgtctgtcaaaacaggcaaacgacaataacaactgcaactttccctggactgcagctacaaagtatcatctaaatggccgggactcgttggttaatccaggaccagctatggccagtcacaaggatgacgaagaaaagtttttccccatgcatggaaccctgatatttggtaaacaaggaacaaatgccaacgacgcggatttggaaaatgtcatgattacagatgaagaagaaatcaggcccaccaatcccgtggctacggagcagtacgggactgtgtcaaataatttgcaaaactcaaacactggtccaactacaggaactgtcaatcaccaaggagcgttacctggtatggtgtggcaggatcgagacgtgtacctgcagggacccatttgggccaagattcctcacaccgatggacactttcatccttctccactgatgggaggttttggactcaaacacccgcctcctcagatcatgatcaaaagcactcccgttccagccaatcctcccacaaacttcagttctgccaagtttgcttcttccatcacacagtattccacgggacaggtcagcgtggagatcgagtgggagctgcagaaggagaacagcaaacgctggaatcccgaaattcagtacacttccaactacaacaagtctgttaatgtggactttactgtggacactaatggtgtgtattcagagcctcgccccattggcaccagatacctgactcgtaatctgtaa

SEQ ID NO: 233 - protein, 736 aa, Adeno-associated virus
MAADGYLPDWLEDTLSEGIRQWWKLKPGPPPPKPAERHKDDSRGLVLPGYKYLGPFNGLDKGEPVNEADAAALEHDKAYDRQLDSGDNPYLKYNHADAEFQERLKEDTSFGGNLGRAVFQAKKRVLEPLRPGLRKPVKTAPGKKRPVEHSPVEPDSSSGTGKAGQQPARKRLNFGQTGDADSVPDPQPLGQPPAAPSGLGSTTMATGSGAPMADNNEGADGVGNSSGNWHCDSQWLDDRVIATSTRTWALPTYNNHLYKQISSQSGACNDNHYFGYSTPWGYFDFNRFHCHFSPRDWQRLINSNWGFRPKRLNFKLFNIQVKEVTQNDGTTTIANNLTSTVQVFTDSEYQLPYVPGSAHQGCLPPFPADVFMVPQYGYLTLNNGSQAVGRSSFYCLEYFPSQMLRTGNNFQFSYTFEDVPFHSSYAHCQSLDRLMNPLIDQYLYYLNKTQTNSGTLQQSRLLFSQAGPTNMSLQAKNWLPGPCYRQQRLSKQANDNNNCNFPWTAATKYHLNGRDSLVNPGPAMASHKDDEEKFFPMHGTLIFGKQGTNANDADLENVMITDEEEIRPTNPVATEQYGTVSNNLQNSNTGPTTGTVNHQGALPGMVWQDRDVYLQGPIWAKIPHTDGHFHPSPLMGGFGLKHPPPQIMIKSTPVPANPPTNFSSAKFASSITQYSTGQVSVEIEWELQKENSKRWNPEIQYTSNYNKSVNVDFTVDTNGVYSEPRPIGTRYLTRNL

SEQ ID NO: 234 - DNA, 2208 bp, Adeno-associated virus
atggctgccgatggttatcttccagattggctcgaggacactctctctgaaggaataagacagtggtggaagctcaaacctggcccaccaccaccaaagcccgcagagcggcataaggacgacagcaggggtcttgtgcttcctgggtacaagtacctcggacccttcaacggactcgacaagggagagccggtcaacgaggcagacgccgcggccctcgagcacgacaaggcctacgaccggcagctcgacagcggagacaacccgtacctcaagtacaaccacgccgacgcggagtttcaggagcgccttaaagaggatacgtcttttgggggcaacctcggacgagcagtcttccaggcaaaaaagagggttctggaacctctgggcctggttgaggagcctgttaagacggctccgggaaaaaagaggccggtagagcactctcctgcagagccagattcctcctccggaactggaaagtcgggcaaccagcctgcaagaaagagattgaatttcggtcagactggagactcagactccgtacctgacccccagcctctcggacagccaccagcagccccctctggtctgggaactaatacgatggctacaggcagtggcgcaccaatggcagacaataacgagggcgccgacggagtgggtaattcctcgggaaattggcattgcgattccacatggatgggcgacagagtcatcaccaccagcacccgaacctgggccctgcccacctacaacaaccatctgtacaagcaaatatccagccagtctggagccagcaacgacaatcactactttggctacagcaccccctgggggtattttgacttcaacagattccactgccacttttcaccacgtgactggcaaagactcatcaacaacaactggggattccgacccaagagactcaacttcaagctctttaacattcaagtcaaagaggtcacgcagaatgacggtacgacgacgattgccaataaccttaccagcacggttcaggtgtttactgactcggagtaccagctcccgtacgtcctcggctcggcgcatcaaggatgcctcccgccgttcccagcagacgtcttcatggtgccacagtatggatacctcaccctgaacaacgggagtcaggcagtaggacgctcttcattttactgcctagagtactttccttctcagatgctgcgtaccggaaacagctttaccttcagctacacctttgaggacgttcctttccacagcagctacgctcacagccagagtttggaccgtctcatgaatcctctcatcgaccagtacctgtattacttgagcagaacaaacactccaagcggaaccaccacgcagtccaggcttcagttttctcaggccggagcgagtgacattcgggaccagtctaggaactggcttcctggaccctgttaccgtcagcagcgagtatcaaagacatctgcggataacaacaacagtgaatactcgtggactggagctaccaagtaccacctcaatggcagagactctctggtgaatccgggcccggccatggccagccacaaagacgatgaagaaaagttctttcctcagagcggggttcttatctttgggaagcaaggctcagagaaaacaaatgtggatattgaaaaggtcatgattacagacgaagaggaaatcaggaccaccaatcccgtggctacggagcagtatggttctgtatctaccaacctccagagcggcaacacacaagcagctaccgcagatgtcaacacacaaggcgttcttccaggcatggtctggcaagacagagacgtgtacctgcaggggcctatttgggcaaagattccacacacggacggacattttcacccctctcccctcatgggcggatttggacttaaacaccctcctccacagattctcatcaagaacaccccggtacctgcgaatccttcgaccaccttcagtgcggcaaagtttgcttccttcattacacagtactccacggggcaggtcagcgtggagatcgagtgggagctgcagaaggagaacagcaaacgctggaatcccgagatccagtacacttccaactacaacaagtctgttaatgtggactttactgtggacactaatggcgtgtattcagagcctcgccccattggcaccagatacctgactcgtaatctgtaa

SEQ ID NO: 235 - protein, 735 aa, Adeno-associated virus
MAADGYLPDWLEDTLSEGIRQWWKLKPGPPPPKPAERHKDDSRGLVLPGYKYLGPFNGLDKGEPVNEADAAALEHDKAYDRQLDSGDNPYLKYNHADAEFQERLKEDTSFGGNLGRAVFQAKKRVLEPLGLVEEPVKTAPGKKRPVEHSPAEPDSSSGTGKSGNQPARKRLNFGQTGDSDSVPDPQPLGQPPAAPSGLGTNTMATGSGAPMADNNEGADGVGNSSGNWHCDSTWMGDRVITTSTRTWALPTYNNHLYKQISSQSGASNDNHYFGYSTPWGYFDFNRFHCHFSPRDWQRLINNNWGFRPKRLNFKLFNIQVKEVTQNDGTTTIANNLTSTVQVFTDSEYQLPYVLGSAHQGCLPPFPADVFMVPQYGYLTLNNGSQAVGRSSFYCLEYFPSQMLRTGNSFTFSYTFEDVPFHSSYAHSQSLDRLMNPLIDQYLYYLSRTNTPSGTTTQSRLQFSQAGASDIRDQSRNWLPGPCYRQQRVSKTSADNNNSEYSWTGATKYHLNGRDSLVNPGPAMASHKDDEEKFFPQSGVLIFGKQGSEKTNVDIEKVMITDEEEIRTTNPVATEQYGSVSTNLQSGNTQAATADVNTQGVLPGMVWQDRDVYLQGPIWAKIPHTDGHFHPSPLMGGFGLKHPPPQILIKNTPVPANPSTTFSAAKFASFITQYSTGQVSVEIEWELQKENSKRWNPEIQYTSNYNKSVNVDFTVDTNGVYSEPRPIGTRYLTRNL

SEQ ID NO: 236 - DNA, 2211 bp, Adeno-associated virus; identical to SEQ ID NO: 126

SEQ ID NO: 237 - protein, 736 aa, Adeno-associated virus
MAADGYLPDWLEDTLSEGIRQWWKLKPGPPPPKPAERHKDDSRGLVLPGYKYLGPGNGLDKGEPVNAADAAALEHDKAYDQQLKAGDNPYLKYNHADAEFQERLKEDTSFGGNLGRAVFQAKKRLLEPLGLVEEAAKTAPGKKRPVEQSPQEPDSSAGIGKSGSQPAKKKLNFGQTGDTESVPDPQPIGEPPAAPSGVGSLTMASGGGAPVADNNEGADGVGSSSGNWHCDSQWLGDRVITTSTRTWALPTYNNHLYKQISNSTSGGSSNDNAYFGYSTPWGYFDFNRFHCHFSPRDWQRLINNNWGFRPKRLNFKLFNIQVKEVTDNNGVKTIANNLTSTVQVFTDSDYQLPYVLGSAHEGCLPPFPADVFMIPQYGYLTLNDGGQAVGRSSFYCLEYFPSQMLRTGNNFQFSYEFENVPFHSSYAHSQSLDRLMNPLIDQYLYYLSKTINGSGQNQQTLKFSVAGPSNMAVQGRNYIPGPSYRQQRVSTTVTQNNNSEFAWPGASSWALNGRNSLMNPGPAMASHKEGEDRFFPLSGSLIFGKQGTGRDNVDADKVMITNEEEIKTTNPVATESYGQVATNHQSAQAQAQTGWVQNQGILPGMVWQDRDVYLQGPIWAKIPHTDGNFHPSPLMGGFGMKHPPPQILIKNTPVPADPPTAFNKDKLNSFITQYSTGQVSVEIEWELQKENSKRWNPEIQYTSNYYKSNNVEFAVSTEGVYSEPRPIGTRYLTRNL

SEQ ID NO: 238 - DNA, 2211 bp, Adeno-associated virus
atggctgccgatggttatcttccagattggctcgaggacactctctctgaaggaataagacagtggtggaagctcaaacctggcccaccaccaccaaagcccgcagagcggcataaggacgacagcaggggtcttgtgcttcctgggtacaagtacctcggacccggcaacggactcgacaagggggagccggtcaacgcagcagacgcggcggccctcgagcacgacaaggcctacgaccagcagctcaaggccggagacaacccgtacctcaagtacaaccacgccgacgccgagttccaggagcggctcaaagaagatacgtcttttgggggcaacctcgggcgagcagtcttccaggccaaaaagaggcttcttgaacctcttggtctggttgaggaagcggctaagacggctcctggaaagaagaggcctgtagagcagtctcctcaggaaccggactcctccgcgggtattggcaaatcgggttcacagcccgctaaaaagaaactcaatttcggtcagactggcgacacagagtcagtccccgaccctcaaccaatcggagaacctcccgcagccccctcaggtgtgggatctcttacaatggcttcaggtggtggcgcaccagtggcagacaataacgaaggtgccgatggagtgggtagttcctcgggaaattggcattgcgattcccaatggctgggggacagagtcatcaccaccagcacccgaacctgggccctgcccacctacaacaatcacctctacaagcaaatctccaacagcacatctggaggatcttcaaatgacaacgcctacttcggctacagcaccccctgggggtattttgacttcaacagattccactgccacttctcaccacgtgactggcagcgactcatcaacaacaactggggattccggcctaagcgactcaacttcaagctcttcaacattcaggtcaaagaggttacggacaacaatggagtcaagaccatcgccaataaccttaccagcacggtccaggtcttcacggactcagactatcagctcccgtacgtgctcgggtcggctcacgagggctgcctcccgccgttcccagcggacgttttcatgattcctcagtacgggtatctgacgcttaatgatgggagccaggccgtgggtcgttcgtccttttactgcctggaatatttcccgtcgcaaatgctaagaacgggtaacaacttccagttcagctacgagtttgagaacgtacctttccatagcagctacgctcacagccaaagcctggaccgactaatgaatccactcatcgaccaatacttgtactatctctcaaagactattaacggttctggacagaatcaacaaacgctaaaattcagcgtggccggacccagcaacatggctgtccagggaagaaactacatacctggacccagctaccgacaacaacgtgtctcaaccactgtgactcaaaacaacaacagcgaatttgcttggcctggagcttcttcttgggctctcaatggacgtaatagcttgatgaatcctggacctgctatggccagccacaaagaaggagaggaccgtttctttcctttgtctggatctttaatttttggcaaacaaggaactggaagagacaacgtggatgcggacaaagtcatgataaccaacgaagaagaaattaaaactactaacccggtagcaacggagtcctatggacaagtggccacaaaccaccagagtgcccaagcacaggcgcagaccggctgggttcaaaaccaaggaatacttccgggtatggtttggcaggacagagatgtgtacctgcaaggacccatttgggccaaaattcctcacacggacggcaactttcacccttctccgctaatgggagggtttggaatgaagcacccgcctcctcagatcctcatcaaaaacacacctgtacctgcggatcctccaacggctttcaataaggacaagctgaactctttcatcacccagtattctactggccaagtcagcgtggagattgagtgggagctgcagaaggaaaacagcaagcgctggaacccggagatccagtacacttccaactattacaagtctaataatgttgaatttgctgttaatactgaaggtgtatatagtgaaccccgccccattggcaccagatacctgactcgtaatctgtaa

SEQ ID NO: 239 - protein, 736 aa, Adeno-associated virus
MAADGYLPDWLEDTLSEGIRQWWKLKPGPPPPKPAERHKDDSRGLVLPGYKYLGPGNGLDKGEPVNAADAAALEHDKAYDQQLKAGDNPYLKYNHADAEFQERLKEDTSFGGNLGRAVFQAKKRLLEPLGLVEEAAKTAPGKKRPVEQSPQEPDSSAGIGKSGSQPAKKKLNFGQTGDTESVPDPQPIGEPPAAPSGVGSLTMASGGGAPVADNNEGADGVGSSSGNWHCDSQWLGDRVITTSTRTWALPTYNNHLYKQISNSTSGGSSNDNAYFGYSTPWGYFDFNRFHCHFSPRDWQRLINNNWGFRPKRLNFKLFNIQVKEVTDNNGVKTIANNLTSTVQVFTDSDYQLPYVLGSAHEGCLPPFPADVFMIPQYGYLTLNDGSQAVGRSSFYCLEYFPSQMLRTGNNFQFSYEFENVPFHSSYAHSQSLDRLMNPLIDQYLYYLSKTINGSGQNQQTLKFSVAGPSNMAVQGRNYIPGPSYRQQRVSTTVTQNNNSEFAWPGASSWALNGRNSLMNPGPAMASHKEGEDRFFPLSGSLIFGKQGTGRDNVDADKVMITNEEEIKTTNPVATESYGQVATNHQSAQAQAQTGWVQNQGILPGMVWQDRDVYLQGPIWAKIPHTDGNFHPSPLMGGFGMKHPPPQILIKNTPVPADPPTAFNKDKLNSFITQYSTGQVSVEIEWELQKENSKRWNPEIQYTSNYYKSNNVEFAVNTEGVYSEPRPIGTRYLTRNL

SEQ ID NO: 240 - DNA, 2208 bp, Adeno-associated virus
atggctgccgatggttatcttccagattggctcgaggacactctctctgaaggaataagacagcggtggaagctcaaacctggcccaccaccaccagagcccgcagagcggcataaggacgacagcaggggtcttgtgcttcctgggtacaagtacctcggacccttcaacggactcgacaagggagagccggtcaacgaggcagacgccgcggccctcgagcacgacaaagcctacgaccggcagctcgacagcggagacaacccgtacctcaagtacaaccacgccgacgcggagtttcaggagcgccttaaagaagatacgtcttttgggggcaacctcggacgagcagtcttccaggcgaaaaagagggtacttgaacctctgggcctggttgaggaacctgttaagacggctccgggaaaaaagaggccggtagagcactctcctgtggagccagactcctcctcgggaaccggaaaggcgggccagcagcctgcaagaaaaagattgaattttggtcagactggagacgcagactcagtacctgacccccagcctctcggacagccaccagcagccccctctggtctgggaactaatacgatggctacaggcagtggcgcaccaatggcagacaataacgagggcgccgacggagtgggtaattcctcgggaaattggcattgcgattccacatggatgggcgacagagtcatcaccaccagcacccgaacctgggccctgcccacctacaacaaccacctctacaaacaaatttccagccaatcaggagcctcgaacgacaatcactactttggctacagcaccccttgggggtattttgacttcaacagattccactgccacttttcaccacgtgactggcaaagactcatcaacaacaactggggattccgacccaagagactcaacttcaagctctttaacattcaagtcaaagaggtcacgcagaatgacggtacgacgacgattgccaataaccttaccggcacggttcaggtgtttactgactcggagtaccagctcccgtacgtcctcggctcggcgcatcaaggatgcctcccgccgttcccagcagacgtcttcatggtgccacagtatggatacctcaccctgaacaacgggagtcaggcagtaggacgctcttcattttactgcctggagtactttccttctcagatgctgcgtaccggaaacaactttaccttcagctacacttttgaggacgttcctttccacagcagctacgctcacagccagagtctgggccgtctcatgaatcctctcatcgaccagtacctgtattacttgagcagaacaaacactccaagtggaaccaccacgcagtcaaggcttcagttttctcaggccggagcgagtgacattcgggaccagtctaggaactggcttcctggaccctgttaccgccagcagcgagtatcaaagacatctgcggataacaacaacagtgaatactcgtggactggagctaccaagtaccacctcaatggcagagactctctggtgaatccgggcccggccatggcaagccacaaggacgatgaagaaaagttttttcctcagagcggggttctcatctttgggaagcaaggctcagagaaaacaaatgtggacattgaaaaggtcatgattacagacgaagaggaaatcaggacaaccaatcccgtggctacggagcagtatggttctgtatctaccaacctccagagaggcaacagacaagcagctaccgcagatgtcaacacacaaggcgttcttccaggcatggtctggcaggacagagatgtgtaccttcaggggcccatctgggcaaagattccacacacggacggacattttcacccctctcccctcatgggtggattcggacttaaacaccctcctccacagattctcatcaagaacaccccggtacctgcgaatccttcgaccaccttcagtgcggcaaagtttgcttccttcatcacacagtactccacgggacaggtcagcgtggagatcgagtgggagctgcagaaggaaaacagcaaacgctggaatcccgaaattcagtacacttccaactacaacaagtctgttaatgtggactttactgtggacactaatggcgtgtattcagagcctcgccccattggcaccagatacctgactcgtaatctgtaa

SEQ ID NO: 241 - protein, 735 aa, Adeno-associated virus
MAADGYLPDWLEDTLSEGIRQRWKLKPGPPPPEPAERHKDDSRGLVLPGYKYLGPFNGLDKGEPVNEADAAALEHDKAYDRQLDSGDNPYLKYNHADAEFQERLKEDTSFGGNLGRAVFQAKKRVLEPLGLVEEPVKTAPGKKRPVEHSPVEPDSSSGTGKAGQQPARKRLNFGQTGDADSVPDPQPLGQPPAAPSGLGTNTMATGSGAPMADNNEGADGVGNSSGNWHCDSTWMGDRVITTSTRTWALPTYNNHLYKQISSQSGASNDNHYFGYSTPWGYFDFNRFHCHFSPRDWQRLINNNWGFRPKRLNFKLFNIQVKEVTQNDGTTTIANNLTGTVQVFTDSEYQLPYVLGSAHQGCLPPFPADVFMVPQYGYLTLNNGSQAVGRSSFYCLEYFPSQMLRTGNNFTFSYTFEDVPFHSSYAHSQSLGRLMNPLIDQYLYYLSRTNTPSGTTTQSRLQFSQAGASDIRDQSRNWLPGPCYRQQRVSKTSADNNNSEYSWTGATKYHLNGRDSLVNPGPAMASHKDDEEKFFPQSGVLIFGKQGSEKTNVDIEKVMITDEEEIRTTNPVATEQYGSVSTNLQRGNRQAATADVNTQGVLPGMVWQDRDVYLQGPIWAKIPHTDGHFHPSPLMGGFGLKHPPPQILIKNTPVPANPSTTFSAAKFASFITQYSTGQVSVEIEWELQKENSKRWNPEIQYTSNYNKSVNVDFTVDTNGVYSEPRPIGTRYLTRNL

SEQ ID NO: 242 - DNA, 2208 bp, Adeno-associated virus
atggctgccgatggttatcttccagattggctcgaggacactctctctgaaggaataagacagcggtggaagctcaaacctggcccaccaccaccagagcccgcagagcggcataaggacgacagcaggggtcttgtgcttcctgggtacaagtacctcggacccttcaacggactcgacaagggagagccggtcaacgaggcagacgccgcggccctcgagcacgacaaagcctacgaccggcagctcgacagcggagacaacccgtacctcaagtacaaccacgccgacgcggagtttcaggagcgccttaaagaagatacgtcctttgggggcaacctcggacgagcagtcttccaggcgaaaaagagggtacttgaacctctgggcctggttgaggaacctgttaagacggctccgggaaaaaagaggccggtagagcactctcctgtggagccagactcctcctcgggaaccggaaaggcgggccagcagcctgcaagaaaaagattgaattttggtcagactggagacgcagactcagtacctgacccccagcctctcggacagccaccagcagccccctctggtctgggaactaatacgatggctacaggcagtggcgcaccaatggcagacaataacgagggcgccgacggagtgggtaattcctcgggaaattggcattgcgattccacatggatgggcgacagagtcatcaccaccagcacccgaacctgggccctgcccacctacaacaaccacctctacaaacaaatttccagccaatcaggagcctcgaacgacaatcactactttggctacagcaccccttgggggtattttgacttcaacagattccactgccacttttcaccacgtgactggcaaagactcatcaacaacaactggggattccgacccaagagactcaacttcaagctctttaacattcaagtcaaagaggtcacgcagaatgacggtacgacgacgattgccaataaccttaccagcacggttcaggtgtttactgactcggagtaccagctcccgtacgtcctcggctcggcgcatcaaggatgcctcccgccgttcccagcagacgtcttcatggtgccacagtatggatacctcaccctgaacaacgagagtcaggcagtaggacgctcttcattttactgcctggagtactttccttctcagatgctgcgtaccggaaacaactttaccttcagctacacttttgaggacgttcctttccacagcagctacgctcacagccagagtctgggccgtctcatgaatcctctcatcgaccagtacctgtattacttgagcagaacaaacactccaagtggaaccaccacgcagtcaaggcttcagttttctcaggccggagcgagtgacattcgggaccagtctaggaactggcttcctggaccctgttaccgccagcagcgagtatcaaagacatctgcggataacaacaacagtgaatactcgtggactggagctaccaagtaccacctcaatggcagagactctctggtgaatccgggcccggccatggcaagccacaaggacgatgaagaaaagttttttcctcagagcggggttctcatctttgggaagcaaggctcagagaaaacaaatgtggacattgaaaaggtcatgattacagacgaagaggaaatcaggacaaccaatcccgtggctacggagcagtatggttctgtatctaccaacctccagagaggcaacagacaagcagctaccgcagatgtcaacacacaaggcgttcttccaggcatggtctggcaggacagagatgtgtaccttcaggggcccatctgggcaaagattccacacacggacggacattttcacccctctcccctcatgggtggattcggacttaaacaccctcctccacagattctcatcaagaacaccccggtacctgcgaatccttcgaccaccttcagtgcggcaaagtttgcttccttcatcacacagtactccacgggacaggtcagcgtggagatcgagtgggagctgcagaaggaaaacagcaaacgctggaatcccgaaattcagtacacttccaactacaacaagtctgttaatgtggactttactgtggacactaatggcgtgtattcagagcctcgccccattggcaccagatacctgactcgtaatctgtaa

SEQ ID NO: 243 - protein, 735 aa, Adeno-associated virus
MAADGYLPDWLEDTLSEGIRQRWKLKPGPPPPEPAERHKDDSRGLVLPGYKYLGPFNGLDKGEPVNEADAAALEHDKAYDRQLDSGDNPYLKYNHADAEFQERLKEDTSFGGNLGRAVFQAKKRVLEPLGLVEEPVKTAPGKKRPVEHSPVEPDSSSGTGKAGQQPARKRLNFGQTGDADSVPDPQPLGQPPAAPSGLGTNTMATGSGAPMADNNEGADGVGNSSGNWHCDSTWMGDRVITTSTRTWALPTYNNHLYKQISSQSGASNDNHYFGYSTPWGYFDFNRFHCHFSPRDWQRLINNNWGFRPKRLNFKLFNIQVKEVTQNDGTTTIANNLTSTVQVFTDSEYQLPYVLGSAHQGCLPPFPADVFMVPQYGYLTLNNESQAVGRSSFYCLEYFPSQMLRTGNNFTFSYTFEDVPFHSSYAHSQSLGRLMNPLIDQYLYYLSRTNTPSGTTTQSRLQFSQAGASDIRDQSRNWLPGPCYRQQRVSKTSADNNNSEYSWTGATKYHLNGRDSLVNPGPAMASHKDDEEKFFPQSGVLIFGKQGSEKTNVDIEKVMITDEEEIRTTNPVATEQYGSVSTNLQRGNRQAATADVNTQGVLPGMVWQDRDVYLQGPIWAKIPHTDGHFHPSPLMGGFGLKHPPPQILIKNTPVPANPSTTFSAAKFASFITQYSTGQVSVEIEWELQKENSKRWNPEIQYTSNYNKSVNVDFTVDTNGVYSEPRPIGTRYLTRNL

SEQ ID NO: 244 - DNA, 2208 bp, Adeno-associated virus
atggctgccgatggttatcttccagattggctcgaggacactctctctgaaggaataagacagcggtggaagctcaaacctggcccaccaccaccagagcccgcagagcggcataaggacgacagcaggggtcttgtgcttcctgggtacaagtacctcggacccttcaacggactcgacaagggagagccggtcaacgaggcagacgccgcggccctcgagcacgacaaagcctacgaccggcagctcgacagcggagacaacccgtacctcaagtacaaccacgccgacgcggagtttcaggagcgccttaaagaagatacgtcttttgggggcaacctcggacgagcagtcttccaggcgaaaaagagggtacttgaacctctgggcctggttgaggaacctgttaagacggctccgggaaaaaagaggccggtagagcactctcctgtggagccagactcctcctcgggaaccggaaaggcgggccagcagcctgcaagaaaaagattgaattttggtcagactggagacgcagactcagtacctgacccccagcctctcggacagccaccagcagccccctctggtctgggaactaatacgatggctacaggcagtggcgcaccaatggcagacaataacgagggcgccgacggagtgggtaattcctcgggaaattggcattgcgattccacatggatgggcgacagagtcatcaccaccagcacccgaacctgggccctgcccacctacaacaaccacctctacaaacaaatttccagccaatcaggagcctcgaacgacaatcactactttggctacagcaccccttgggggtattttgacttcaacagattccactgccacttttcaccacgtgactggcaaagactcatcaacaacaactggggattccgacccaagagactcaacttcaagctctttaacattcaagtcaaagaggtcacgcagaatgacggtacgacgacgattgccaataaccttaccagcacggttcaggtgtttactgactcggagtaccagctcccgtacgtcctcggctcggcgcatcaaggatgcctcccgccgttcccagcagacgtcttcatggtaccacagtatggatacctcaccctgaacaacgggagtcaggcagtaggacgctcttcattttactgcctggagtactttccttctcagatgctgcgtaccggaaacaactttaccttcagctacacttttgaggacgttcctttccacagcagctacgctcacagccagagtctgggccgtctcatgaatcctctcatcgaccagtacctgtattacttgagcagaacaaacactccaagtggaaccaccacgcagtcaaggcttcagttttctcaggccggagcgagtgacattcgggaccagtctaggaactggcttcctggaccctgttaccgccagcagcgagtatcaaagacatctgcggataacaacaacagtgaatactcgtggactggagctaccaagtaccacctcaatggcagagactctctggtgaatccgggcccggccatggcaagccacaaggacgatgaagaaaagttttttcctcagagcggggttctcatctttgggaagcaaggctcagagaaaacaaatgtggacattgaaaaggtcatgattacagacgaagaggaaatcaggacaaccaatcccgtggctacggagcagtatggttctgtatctaccaacctccagagaggcaacagacaagcagctaccgcagatgtcaacacacaaggcgttcttccaggcatggtctggcaggacagagatgtgtaccttcaggggcccatctgggcaaagattccacacacggacggacattttcacccctctcccctcatgggtggattcggacttaaacaccctcctccacagattctcatcaagaacaccccggtacctgcgaatccttcgaccaccttcagtgcggcaaagtttgcttccttcatcacacagtactccacgggacaggtcagcgtggagatcgagtgggagctgcagaaggaaaacagcaaacgctggaatcccgaaattcagtacacttccaactacaacaagtctgttaatgtggactttactgtggacactaatggcgtgtattcagagcctcgccccattggcaccagatacctgactcgtaatctgtaa

SEQ ID NO: 245 - protein, 735 aa, Adeno-associated virus
MAADGYLPDWLEDTLSEGIRQRWKLKPGPPPPEPAERHKDDSRGLVLPGYKYLGPFNGLDKGEPVNEADAAALEHDKAYDRQLDSGDNPYLKYNHADAEFQERLKEDTSFGGNLGRAVFQAKKRVLEPLGLVEEPVKTAPGKKRPVEHSPVEPDSSSGTGKAGQQPARKRLNFGQTGDADSVPDPQPLGQPPAAPSGLGTNTMATGSGAPMADNNEGADGVGNSSGNWHCDSTWMGDRVITTSTRTWALPTYNNHLYKQISSQSGASNDNHYFGYSTPWGYFDFNRFHCHFSPRDWQRLINNNWGFRPKRLNFKLFNIQVKEVTQNDGTTTIANNLTSTVQVFTDSEYQLPYVLGSAHQGCLPPFPADVFMVPQYGYLTLNNGSQAVGRSSFYCLEYFPSQMLRTGNNFTFSYTFEDVPFHSSYAHSQSLGRLMNPLIDQYLYYLSRTNTPSGTTTQSRLQFSQAGASDIRDQSRNWLPGPCYRQQRVSKTSADNNNSEYSWTGATKYHLNGRDSLVNPGPAMASHKDDEEKFFPQSGVLIFGKQGSEKTNVDIEKVMITDEEEIRTTNPVATEQYGSVSTNLQRGNRQAATADVNTQGVLPGMVWQDRDVYLQGPIWAKIPHTDGHFHPSPLMGGFGLKHPPPQILIKNTPVPANPSTTFSAAKFASFITQYSTGQVSVEIEWELQKENSKRWNPEIQYTSNYNKSVNVDFTVDTNGVYSEPRPIGTRYLTRNL

SEQ ID NO: 246 - DNA, 2208 bp, Adeno-associated virus
atggctgccgatggttatcttccagattggctcgaggacactctctctgaaggaataagacagcggtggaagctcaaacctggcccaccaccaccagagcccgcagagcggcataaggacgacagcaggggtcttgtgcttcctgggtacaagtacctcggacccttcaacggactcgacaagggagagccggtcaacgaggcagacgccgcggccctcgagcacgacaaagcctacgaccggcagctcgacagcggagacaacccgtacctcaagtacaaccacgccgacgcggagtttcaggagcgccttaaagaagatacgtcttttgggggcaacctcggacgagcagtcttccaggcgaaaaagagggtactcgaacctctgggcctggttgaggaacctgttaagacggctccgggaaaaaagaggccggtagagcactctcctgtggagccagactcctcctcgggaaccggaaaggcgggccagcagcctgcaagaaaaagattgaattttggtcagactggagacgcagactcagtacctgacccccagcctctcggacagccaccagcagccccctctggtctgggaactaatacgatggctacaggcagtggcgcaccaatggcagacaataacgagggcgccgacggagtgggtaattcctcgggaaattggcattgcgattccacatggatgggcgacagagtcatcaccaccagcacccgaacctgggccctgcccacctacaacaaccacctctacaaacaaatttccagccaatcaggagcctcgaacgacaatcactactttggctacagcaccccttgggggtattttgacttcaacagattccactgccacttttcaccacgtgactggcaaagactcatcaacaacaactggggattccgacccaagagactcaacttcaagctctttaacattcaagtcaaagaggtcacgcagaatgacggtacgacgacgattgccaataaccttaccagcacggttcaggtgtttactgactcggagtaccagctcccgtacgtcctcggctcggcgcatcaaggatgcctcccgccgttcccagcagacgtcttcatggtgccacagtatggatacctcaccctgaacaacgggagtcaggcagcaggacgctcttcattttactgcctggagtactttccttctcagatgctgcgtaccggaaacaactttaccttcagctacacttttgaggacgttcctttccacagcagctacgctcacagccagagtctgggccgtctcatgaatcctctcatcgaccagtacctgtattacttgagcagaacaaacactccaagtggaaccaccacgcagtcaaggcttcagttttctcaggccggagcgagtgacattcgggaccagtctaggaactggcttcctggaccctgttaccgccagcagcgagtatcaaagacatctgcggataacaacaacagtgaatactcgtggactggagctaccaagtaccacctcaatggcagagactctctggtgaatccgggcccggccatggcaagccacaaggacgatgaagaaaagttttttcctcagagcggggttctcatctttgggaagcaaggctcagagaaaacaaatgtggacattgaaaaggtcatgattacagacgaagaggaaatcaggacaaccaatcccgtggctacggagcagtatggttctgtatctaccaacctccagagaggcaacagacaagcagctaccgcagatgtcaacacacaaggcgttcttccaggcatggtctggcaggacagagatgtgtaccttcaggggcccatctgggcaaagattccacacacggacggacattttcacccctctcccctcatgggtggattcggacttaaacaccctcctccacagattctcatcaagaacaccccggtacctgcgaatccttcgaccaccttcagtgcggcaaagtttgcttccttcatcacacagtactccacgggacaggtcagcgtggagatcgagtgggagctgcagaaggaaaacagcaaacgctggaatcccgaaattcagtacacttccaactacaacaagtccgttaatgtggactttactgtggacactaatggcgtgtattcagagcctcgccccattggcaccagatacctgactcgtaatctgtaa

SEQ ID NO: 247 - protein, 735 aa, Adeno-associated virus
MAADGYLPDWLEDTLSEGIRQRWKLKPGPPPPEPAERHKDDSRGLVLPGYKYLGPFNGLDKGEPVNEADAAALEHDKAYDRQLDSGDNPYLKYNHADAEFQERLKEDTSFGGNLGRAVFQAKKRVLEPLGLVEEPVKTAPGKKRPVEHSPVEPDSSSGTGKAGQQPARKRLNFGQTGDADSVPDPQPLGQPPAAPSGLGTNTMATGSGAPMADNNEGADGVGNSSGNWHCDSTWMGDRVITTSTRTWALPTYNNHLYKQISSQSGASNDNHYFGYSTPWGYFDFNRFHCHFSPRDWQRLINNNWGFRPKRLNFKLFNIQVKEVTQNDGTTTIANNLTSTVQVFTDSEYQLPYVLGSAHQGCLPPFPADVFMVPQYGYLTLNNGSQAAGRSSFYCLEYFPSQMLRTGNNFTFSYTFEDVPFHSSYAHSQSLGRLMNPLIDQYLYYLSRTNTPSGTTTQSRLQFSQAGASDIRDQSRNWLPGPCYRQQRVSKTSADNNNSEYSWTGATKYHLNGRDSLVNPGPAMASHKDDEEKFFPQSGVLIFGKQGSEKTNVDIEKVMITDEEEIRTTNPVATEQYGSVSTNLQRGNRQAATADVNTQGVLPGMVWQDRDVYLQGPIWAKIPHTDGHFHPSPLMGGFGLKHPPPQILIKNTPVPANPSTTFSAAKFASFITQYSTGQVSVEIEWELQKENSKRWNPEIQYTSNYNKSVNVDFTVDTNGVYSEPRPIGTRYLTRNL

SEQ ID NO: 248 - protein, 738 aa, Adeno-associated virus; identical to SEQ ID NO: 90

SEQ ID NO: 249 - DNA, 2217 bp, Adeno-associated virus
atggctgctgacggttatcttccagattggctcgaggacaacctctctgagggcattcgcgagtggtgggacctgaaacctggagcccccaagcccaaggccaaccagcagaagcaggacgacggccggggtctggtgcttcctggctacaagtacctcggacccttcaacggactcgacaagggggagcccgtcaacgcggcggacgcagcggccctcgagcacgacaaggcctacgaccagcagctcaaagcgggtgacaatccgtacctgcggtataaccacgccgacgccgagtttcaggagcgtctgcaagaagatacgtcttttgggggcaacctcgggcgagcagtcttccaggccaagaagcgggttctcgaacctctcggtctggttgaggaagctgctaagacggctcctggaaagaagagaccggtagaaccgtcacctcagcgttcccccgactcctccacgggcatcggcaagaaaggccagcagcccgctaaaaagagactgaactttggtcagactggcgactcagagtcagtccccgaccctcaaccaatcggagaaccaccagcaggcccctctggtctgggatctggtacaatggctgcaggcggtggcgctccaatggcagacaataacgaaggcgccgacggagtgggtagttcctcaggaaattggcattgcgattccacatggctgggcgacagagtcatcaccaccagcacccgaacctgggccctgcccacctacaacaaccacctctacaagcaaatatccaatgggacatcgggaggaagcaccaacgacaacacctacttcggctacagcaccccctgggggtattttgacttcaacagattccactgccacttctcaccacgtgactggcagcgactcatcaacaacaactggggattccggccaaaaagactcagcttcaagctcttcaacatccaggtcaaggaggtcacgcagaatgaaggcaccaagaccatcgccaataaccttaccagcacgattcaggtatttacggactcggaataccagctgccgtacgtcctcggctccgcgcaccagggctgcctgcctccgttcccggcggacgtcttcatgattccccagtacggctaccttacactgaacaatggaagtcaagccgtaggccgttcctccttctactgcctggaatattttccatctcaaatgctgcgaactggaaacaattttgaattcagctacaccttcgaggacgtgcctttccacagcagctacgcacacagccagagcttggaccgactgatgaatcctctcatcgaccagtacctgtactacttatccagaactcagtccacaggaggaactcaaggtacccagcaattgttattttctcaagctgggcctgcaaacatgtcggctcaggctaagaactggctacctggaccttgctaccggcagcagcgagtctctacgacactgtcgcaaaacaacaacagcaactttgcttggactggtgccaccaaatatcacctgaacggaagagactctttggtaaatcccggtgtcgccatggcaacccacaaggacgacgaggaacgcttcttcccgtcgagtggagtcctgatgttcggaaaacagggtgctggaagagacaatgtggactacagcagcgttatgctaaccagcgaagaagaaattaaaaccactaaccccgtagccacagaacaatacggtgtggtggctgacaacttgcagcaaaccaatacagggcctattgtgggaaatgtcaacagccaaggagccttacctggcatggtctggcagaaccgagacgtgtacctgcagggtcccatctgggccaagattcctcacacggacggcaacttccacccttcaccgctaatgggaggatttggactgaagcacccacctcctcagatcctgatcaagaacacgccggtacctgcggatcctccaacaacgttcagccaggcgaaattggcttccttcattacgcagtacagcaccggacaggtcagcgtggaaatcgagtgggagctgcagaaggagaacagcaaacgctggaacccagagattcagtacacttcaaactactacaaatctacaaatgtggactttgctgtcaatacagagggaacttattctgagcctcgccccattggtactcgttacctcacccgtaatctgtaa

SEQ ID NO: 250 - protein, 738 aa, Adeno-associated virus
MAADGYLPDWLEDNLSEGIREWWDLKPGAPKPKANQQKQDDGRGLVLPGYKYLGPFNGLDKGEPVNAADAAALEHDKAYDQQLKAGDNPYLRYNHADAEFQERLQEDTSFGGNLGRAVFQAKKRVLEPLGLVEEAAKTAPGKKRPVEPSPQRSPDSSTGIGKKGQQPAKKRLNFGQTGDSESVPDPQPIGEPPAGPSGLGSGTMAAGGGAPMADNNEGADGVGSSSGNWHCDSTWLGDRVITTSTRTWALPTYNNHLYKQISNGTSGGSTNDNTYFGYSTPWGYFDFNRFHCHFSPRDWQRLINNNWGFRPKRLSFKLFNIQVKEVTQNEGTKTIANNLTSTIQVFTDSEYQLPYVLGSAHQGCLPPFPADVFMIPQYGYLTLNNGSQAVGRSSFYCLEYFPSQMLRTGNNFEFSYTFEDVPFHSSYAHSQSLDRLMNPLIDQYLYYLSRTQSTGGTQGTQQLLFSQAGPANMSAQAKNWLPGPCYRQQRVSTTLSQNNNSNFAWTGATKYHLNGRDSLVNPGVAMATHKDDEERFFPSSGVLMFGKQGAGRDNVDYSSVMLTSEEEIKTTNPVATEQYGVVADNLQQTNTGPIVGNVNSQGALPGMVWQNRDVYLQGPIWAKIPHTDGNCHPSPLMGGFGLKHPPPQILIKNTPVPADPPTTFSQAKLASFITQYSTGQVSVEIEWELQKENSKRWNPEIQYTSNYYKSTNVDFAVNTEGTYSEPRPIGTRYLTRNL

SEQ ID NO: 251 - protein, 738 aa, Adeno-associated virus
MAADGYLPDWLEDNLSEGIREWWDLKPGAPKPKANQQKQDDGRGLVLPGYKYLGPFNGLDKGEPVNAADAAALEHDKAYDQQLKAGDNPYLRYNHADAEFQERLQEDTSFGGNLGRAVFQAKKRVLEPLGLVEEGAKTAPGKKRPVEPSPQRSPDSSTGIGKKGQQPARKRLNFGRTGDSESVPDPQPIGEPPAAPSSVGSGTMAAGGGAPMADNNEGADGVGSSSGNWHCDSTWLGDRVITTSTRTWALPTYNNHLYKQISNGTSGGSTNDNTYFGYSTPWGYLDFNRFHCHFSPRDWQRLINNNWGFRPKRLSFKLFNIQVKEVTQNEGTKTIANNLASTIQVFTDSEYQPPYVLGSAHQGCLPPFPADVFMIPQYGYLTLNNGSQAVGRSSFYCLEYFPSQMLRTGNNFSFSYTFEDVPFHSSYAHSQSLDRLMNPLIDQYLYYLSRTQSTGGTAGTQQLLFSRAGPSNMSAQARNWLPGPCYRQQRVSTTLSQNNNSNFAWTGATKYHLNGRDSLVNPGVAMATNKDDEDRFFPSSGILMFGKQGAGKDNVDYSNVMLTSEEEIKTTNPVATEQYGVVADNLQQQNTAPTVGAVNSQGALPGMVWQNRDVYLQGPIWAKIPHTDGNFHPSPLMGGFGLKHPPPQILIKNTPVPADPPTAFNQAKLNSFIAQYSTGQVSVEIEWELQKENSKRWNPEIQYTSNYYKSTNADFAVNTEGVYSEPRPIGTRYLTRNL

SEQ ID NO: 252 - DNA, 2217 bp, Adeno-associated virus
atggctgccgatggttatcttccagattggctcgaggacaacctctctgagggcattcgcgagtggtgggacctgaaacctggagccccgaaacccaaagccaaccagcaaaagcaggacgacggccggggtctggtgcttcctggctacaagtacctcggacccttcaacggactcgacaagggggagcccgtcaacgcggcggacgcagcggccctcgagcacgacaaggcctacgaccagcagctcaaagcgggtgacaatccgtacctgcggtataatcacgccgacgccgagtttcaggagcgtctgcaagaagatacgtcttttgggggcaacctcgggcgagcagtcttccaggccaagaagcgggttctcgaacctctcggtctggttgaggaaggcgctaagacggctcctggaaagaagagaccggtagagccgtcaccacagcgttcccccgactcctccacgggcatcggcaagaaaggccagcagcccgccagaaagagactcaatttcggtcggactggcgactcagagtcagtccccgaccctcaacctatcggagaacctccagcagcgccctctagtgtgggatctggtacaatggctgcaggcggtggcgcaccaatggcagacaataacgaaggtgccgacggagtgggtagttcctcgggaaattggcattgcgattccacatggctgggcgacagagttatcaccaccagcacccgaacctgggccctgcccacctacaacaaccacctctacaagcaaatctccaacgggacctcgggaggcagcaccaacgacaacacctactttggctacagcaccccctgggggtatcttgactttaacagattccactgccacttctcaccacgtgactggcagcgactcatcaacaacaactggggattccggcccaagagactcagcttcaagctcttcaacatccaggtcaaagaggtcacgcagaatgaaggcaccaagaccatcgccaataacctcgccagcaccatccaggtgtttacggactcggaataccagccgccgtacgtcctcggctctgcccaccagggctgcctgcctccgttcccggcggacgtcttcatgattcctcagtacggctacctgactctcaacaacggtagtcaggccgtgggacgttcctccttctactgcctggagtacttcccctctcagatgctgagaacgggcaacaacttttccttcagctacactttcgaggacgtgcctttccacagcagctacgcgcacagccagagtttggacaggctgatgaatcctctcatcgaccagtacctgtactacctgtcaagaacccagtctacgggaggcacagcgggaacccagcagttgctgttttctcgggccgggcctagcaacatgtcggctcaggccagaaactggctgcctggaccctgctacagacagcagcgcgtctccacgacactgtcgcaaaacaacaacagcaactttgcctggactggtgccaccaagtatcatctgaacggcagagactctctggtgaatccgggcgtcgccatggcaaccaacaaggacgacgaggaccgcttcttcccatccagcggcatcctcatgtttggcaagcagggagctggaaaagacaacgtggactatagcaacgtgatgctaaccagcgaggaagaaatcaagaccaccaaccccgtggccacagaacagtatggcgtggtggctgataacctacagcagcaaaacaccgctcctactgtgggggccgtcaacagccagggagccttacctggcatggtctggcagaaccgggacgtgtacctgcagggtcctatttgggccaagattcctcacacagatggcaactttcacccgtctcctttaatgggcggctttggacttaaacatccgcctcctcagatcctcatcaaaaacactcctgttcctgcggatcctccaacagcgttcaaccaggccaagctgaattctttcatcgcgcagtacagcaccggacaagtcagcgtggagatcgagtgggagctgcagaaggagaacagcaagcgctggaacccagagattcagtatacttccaactactacaaatctacaaatgcggactttgctgttaatactgagggtgtttactctgagcctcgccccattggcactcgttacctcacccgtaatctgtaa

SEQ ID NO: 253 - DNA, 2208 bp, Adeno-associated virus
atggctgccgatggttatcttccagattggctcgaggacactctctctgaaggaataagacagtggtggaagctcaaacctggcccaccaccaccaaagcccgcagagcggcataaggacgacagcaggggtcttgtgcttcctgggtacaagtacctcggacccttcaacggactcgacaagggggagccggtcaacgaggcagacgccgcggccctcgagcacgacaaggcctacgaccggcagctcgacagcggagacaacccgtacctcaagtacaaccacgccgacgcagagtttcaggagcgccttaaagaagatacgtcttttgggggcaacctcggacgagcagtcttccaggcgaaaaagagggttcttgaacctctgggcctggttgaggagcctgttaagacggctccgggaaaaaagaggccggtagagcactctcctgtggagccagactcctcctcgggaaccggaaaagcgggccagcagcctgcaagaaaaagattaaattttggtcagactggagacgcagactccgtacctgacccccagcctctcggacagccaccagcagccccctctggtctgggatctactacaatggctacaggcagtggcgcaccaatggcagacaataacgagggtgccgatggagtgggtaattcctcaggaaattggcattgcgattcccaatggctgggcgacagagtcatcaccaccagcacccgaacctgggccctgcccacatacaacaaccacctctacaagcaaatctccagccaatcaggagccagcaacgacaaccactactttggctacagcaccccctgggggtattttgacttcaacagattccactgccacttttcaccacgtgactggcaaagactcgtcaacaacaaccggggattccggcccaaaagactcaacttcaagctctttaatattcaagtcaaagaggtcacgcagaatgacggtacgacgacgattgccaataaccttaccagcacggttcaggtgtttactgactcggagtaccagctcccgtacgtcctgggctcggcgcatcaaggatgcctcccgccgtttccagcggacgtcttcatggtcccacagtatggatacctcaccctgaacaacgggagtcaggcggtaggacgctcttccttttactgcctggagtactttccttctcagatgctgcgtactggaaacaactttcagttcagctacacttttgaagacgtgcctttccacagcagctacgctcacagccagagtctggatcggctgatgaatcctctgatcgaccagtacctgtattatctgaacaagacacaaacaaatagtggaactcttcagcagtctcggctactgtttagccaagctggaccaaccaacatgtctcttcaagctaaaaactggctgcctggaccttgctacagacagcagcgtctgtcaaaacaggcaaacgacaacaacaacagcaactttccctggactgcagctacaaagtatcatctaaatggccgggactcgttggttaatccaggaccagctatggccagtcacaaggatgacgaagaaaagtttttccccatgcatggaaccctgatatttggtaaacaaggaacaaatgccaacgacgcggatttggaaaatgtcatgattacagatgaagaagaaatcagggccaccaatcccgtggctacggagcagtacgggactgtgtcaaataatttgcaaaactcaaacactggtccaactactggaactgtcaatcaccaaggagcgttacctggtatggtgtggcaggatcgagacgtgtacctgcagggacccatttgggccaagattcctcacaccgatggacactttcatccttctccactgatgggaggttttggactcaaacacccgcctcctcagatcatgatcaaaaacactcccgttccagccaatcctcccacaaacttcagttctgccaagtttgcttctttcatcacacagtattccacgggacaggtcagcgtggagatcgagtgggagctgcagaaggagaacagcaaacgctggaatcccgaaattcagtacacttccaactacaacaagtctgttaatgtggactttactgtggacactaatggtgtgtattcagagcctcgccccattggcaccagatacctgactcgtaatctgtaa

SEQ ID NO: 254 - protein, 735 aa, Adeno-associated virus
MAADGYLPDWLEDTLSEGIRQWWKLKPGPPPPKPAERHKDDSRGLVLPGYKYLGPFNGLDKGEPVNEADAAALEHDKAYDRQLDSGDNPYLKYNHADAEFQERLKEDTSFGGNLGRAVFQAKKRVLEPLGLVEEPVKTAPGKKRPVEHSPVEPDSSSGTGKAGQQPARKRLNFGQTGDADSVPDPQPLGQPPAAPSGLGSTTMATGSGAPMADNNEGADGVGNSSGNWHCDSQWLGDRVITTSTRTWALPTYNNHLYKQISSQSGASNDNHYFGYSTPWGYFDFNRFHCHFSPRDWQRLVNNNRGFRPKRLNFKLFNIQVKEVTQNDGTTTIANNLTSTVQVFTDSEYQLPYVLGSAHQGCLPPFPADVFMVPQYGYLTLNNGSQAVGRSSFYCLEYFPSQMLRTGNNFQFSYTFEDVPFHSSYAHSQSLDRLMNPLIDQYLYYLNKTQTNSGTLQQSRLLFSQAGPTNMSLQAKNWLPGPCYRQQRLSKQANDNNNSNFPWTAATKYHLNGRDSLVNPGPAMASHKDDEEKFFPMHGTLIFGKQGTNANDADLENVMITDEEEIRATNPVATEQYGTVSNNLQNSNTGPTTGTVNHQGALPGMVWQDRDVYLQGPIWAKIPHTDGHFHPSPLMGGFGLKHPPPQIMIKNTPVPANPPTNFSSAKFASFITQYSTGQVSVEIEWELQKENSKRWNPEIQYTSNYNKSVNVDFTVDTNGVYSEPRPIGTRYLTRNL

SEQ ID NO: 255 - protein, 738 aa, Adeno-associated virus
MAADGYLPDWLEDNLSEGIREWWDLKPGAPKPKANQQKQDDGRGLVLPGYKYLGPFNGLDKGEPVNAADAAALEHDKAYDQQLKAGDNPYLRYNHADAEFQERLQEDTSFGGNLGRAVFQAKKRVLEPLGLVEEAAKTAPGKKRPVEPSPQRSPDSSTGIGKKGQQPAKKRLSFGQTGDSESVPDPQPIGEPPAGPSGLGSGTMAAGGGAPMADNNEGADGVGSSSGNWHCDSTWLGDRVITTSTRTWALPTYNNHLYKQISNGTSGGSTNDNTYFGYSTPWGYFDFNRFHCHFSPRDWQRLINNNWGFRPKRLSFKLFNIQVKEVTQNEGTKTIANNLTSTIQVFTDSEYQLPYVLGSAHQGCLPPFPADVFMIPQYGYLTLNNGSQAVGRSSFYCLEYFPSQMLRTGNNSEFSYTFEDVPFHSSYAHSQSLDRLMNPLIDQYLYYLSRTQSTGGTQGTQQLLFSQAGPANMSAQAKNWLPGPCYRQQRVSTTLSQNNNSNFAWTGATKYHLNGRDSLVNPGVAMATHKDDEERFFPSSGVLMFGKQGAGRDNVDYSSVMLTSEEEIKTTNPVATEQYGVVADNLQQTNTGPIVGNVNSQGALPGMVWQNRDVYLQGPIWAKIPHTDGNFHPSPLMGGFGLKHPPPQILIKNTPVPADPPTTFSQAKLASFITQYSTGQVSVEIEWELQKENSKRWNPEIQYTSNYYKSTNVDFAVNTEGTYSEPRPIGTRYLTRNL

SEQ ID NO: 256 - DNA, 2217 bp, Adeno-associated virus
atggctgctgacggttatcttccagattggctcgaggacaacctctctgagggcattcgcgagtggtgggacctgaaacctggagcccccaagcccaaggccaaccagcagaagcaggacgacggccggggtctggtgcttcctggctacaagtacctcggacccttcaacggactcgacaagggggagcccgtcaacgcggcggacgcagcggccctcgagcacgacaaggcctacgaccagcagctcaaagcgggtgacaatccgtacctgcggtataaccacgccgacgccgagtttcaggagcgtctgcaagaagatacgtcttttgggggcaacctcgggcgagcagtcttccaggccaagaagcgggttctcgaacctctcggtctggttgaggaagctgctaagacggctcctggaaagaagagaccggtagaaccgtcacctcagcgttcccccgactcctccacgggcatcggcaagaaaggccagcagcccgctaaaaagagactgagctttggtcagactggcgactcagagtcagtccccgaccctcaaccaatcggagaaccaccagcaggcccctctggtctgggatctggtacaatggctgcaggcggtggcgctccaatggcagacaataacgaaggcgccgacggagtgggtagttcctcaggaaattggcattgcgattccacatggctgggcgacagagtcatcaccaccagcacccgaacctgggccctgcccacctacaacaaccacctctacaagcaaatatccaatgggacatcgggaggaagcaccaacgacaacacctacttcggctacagcaccccctgggggtattttgacttcaacagattccactgccacttctcaccacgtgactggcagcgactcatcaacaacaactggggattccggccaaaaagactcagcttcaagctcttcaacatccaggtcaaggaggtcacgcagaatgaaggcaccaagaccatcgccaataaccttaccagcacgattcaggtatttacggactcggaataccagctgccgtacgtcctcggctccgcgcaccagggctgcctgcctccgttcccggcggacgtcttcatgattccccagtacggctaccttacactgaacaatggaagtcaagccgtaggccgttcctccttctactgcctggaatattttccatctcaaatgctgcgaactggaaacaattctgaattcagctacaccttcgaggacgtgcctttccacagcagctacgcacacagccagagcttggaccgactgatgaatcctctcatcgaccagtacctgtactacttatccagaactcagtccacaggaggaactcaaggtacccagcaattgttattttctcaagctgggcctgcaaacatgtcggctcaggctaagaactggctacctggaccttgctaccggcagcagcgagtctctacgacactgtcgcaaaacaacaacagcaactttgcttggactggtgccaccaaatatcacctgaacggaagagactctttggtaaatcccggtgtcgccatggcaacccacaaggacgacgaggaacgcttcttcccgtcgagtggagtcctgatgtttggaaaacagggtgctggaagagacaatgtggactacagcagcgttatgctaaccagcgaagaagaaattaaaaccactaaccctgtagccacagaacaatacggtgtggtggctgacaacttgcagcaaaccaatacagggcctattgtgggaaatgtcaacagccaaggagccttacctggcatggtctggcagaaccgagacgtgtacctgcagggtcccatctgggccaagattcctcacacggacggcaacttccacccttcaccgctaatgggaggatttggactgaagcacccacctcctcagatcctgatcaagaacacgccggtacctgcggatcctccaacaacgttcagccaggcgaaattggcttccttcattacgcagtacagcaccggacaggtcagcgtggaaatcgagtgggagctgcagaaggagaacagcaaacgctggaacccagagattcagtacacttcaaactactacaaatctacaaatgtggactttgctgtcaatacagagggaacttattctgagcctcgccccattggtactcgttacctcacccgtaatctgtaa

SEQ ID NO: 257 - protein, 738 aa, Adeno-associated virus
MAADGYLPDWLEDNLSEGIREWWDLKPGAPKPKANQQKQDDGRGLVLPGYKYLGPFNGLDKGEPVNAADAAALEHDKAYDQQLKAGDNPYLRYNHADAEFQERLQEDTSFGGNLGRAVFQAKKRVLEPLGPVEEAAKTAPGKKRPVEPPPQRSPDSSTGIGKKGQQPAKKRLNFGQTGDSESVPDPQPIGEPPAGPSGLGSGTMAAGGGAPMADNNEGADGVGSSSGNWHCDSTWLGDRVITTSTRTWALPTYNNHLYKQISNGTSGGSTNDNTYFGYSTPWGYFDFNRFHCHFSPRDWQRLINNNWGFRPKRLSFKLFNIQVKEVTQNEGTKTVANNLTSTIQVFTDSEYQLPYVLGSAHQGCLPPFPADVFMIPQYGYLTLNNGSQAVGRSSFYCLEYFPSQMLRTGNNFEFSYTFEDVPFHSSYAHSQSLDRLMNPLIDQYLYYLSRTQSTGGTQGTQQLLFSQAGPANMSAQAKNWLPGPCYRQQRVSTTLSQNNNSNFAWTGATKYHLNGRDSLVNPGVAMATHKDDEERFFPSSGVLMFGKQGAGRDNVDYSSVMLTSEEEIKTTNPVATEQYGVVADNLQQTNTGPIVGNVNSQGALPGMVWQNRDVYLQGPIWAKIPHTDGNFHPSPLMGGFGLKHPPPQILIKNTPVPADPPTTFSQAKLASFITQYSTGQVSVEIEWELQKENSKRWNPEIQYTSNYYKSTNVDFAVNTEGTYSEPRPIGTRYLTRNL

SEQ ID NO: 258 - DNA, 2217 bp, Adeno-associated virus
atggctgctgacggttatcttccagattggctcgaggacaacctctctgagggcattcgcgagtggtgggacctgaaacctggagcccccaagcccaaggccaaccagcagaagcaggacgacggccggggtctggtgcttcctggctacaagtacctcggacccttcaacggactcgacaagggggagcccgtcaacgcggcggacgcagcggccctcgagcacgacaaggcctacgaccagcagctcaaagcgggtgacaatccgtacctgcggtataaccacgccgacgccgagtttcaggagcgtctacaagaagatacgtcttttgggggcaacctcgggcgagcagtcttccaggccaagaagcgggttctcgaacctctcggtccggttgaggaagctgctaagacggctcctggaaagaagagaccggtagaaccgccacctcagcgttcccccgactcctccacgggcatcggcaagaaaggccagcagcccgctaaaaagagactgaactttggtcagactggcgactcagagtcagtccccgaccctcaaccaatcggagaaccaccagcaggcccctctggtctgggatctggtacaatggctgcaggcggtggcgctccaatggcagacaataacgaaggcgccgacggagtgggtagttcctcaggaaattggcattgcgattccacatggctgggcgacagagtcatcaccaccagcacccgaacctgggccctgcccacctacaacaaccacctctacaagcaaatatccaatgggacatcgggaggaagcaccaacgacaacacctacttcggctacagcaccccctgggggtattttgacttcaacagattccactgccacttctcaccacgtgactggcagcgactcatcaacaacaactggggattccggccaaaaagactcagcttcaagctcttcaacatccaggtcaaggaggtcacgcagaatgaaggcaccaagaccgtcgccaataaccttaccagcacgattcaggtatttacggactcggaataccagctgccgtacgtcctcggctccgcgcaccagggctgcctgcctccgttcccggcggacgtcttcatgattccccagtacggctaccttacactgaacaatggaagtcaagccgtaggccgttcctccttctactgcctggaatattttccatctcaaatgctgcgaactggaaacaattttgaattcagctacaccttcgaggacgtgcctttccacagcagctacgcacacagccagagcttggaccgactgatgaatcctctcatcgaccagtacctgtactacttatccagaactcagtccacaggaggaactcaaggtacccagcaattgttattttctcaagctgggcctgcaaacatgtcggctcaggctaagaactggctacctggaccttgctaccggcagcagcgagtctctacgacactgtcgcaaaacaacaacagcaactttgcttggactggtgccaccaaatatcacctgaacggaagagactctttggtaaatcccggtgtcgccatggcaacccacaaggacgacgaggaacgcttcttcccgtcgagtggagtcctgatgtttggaaaacagggtgctggaagagacaatgtggactacagcagcgttatgctaaccagcgaagaagaaattaaaaccactaaccctgtagccacagaacaatacggtgtggtggctgacaacttgcagcaaaccaatacagggcctattgtgggaaatgtcaacagccaaggagccttacctggcatggtctggcagaaccgagacgtgtacctgcagggtcccatctgggccaagattcctcacacggacggcaacttccacccttcaccgctaatgggaggatttggactgaagcacccacctcctcagatcctgatcaagaacacgccggtacctgcggatcctccaacaacgttcagccaggcgaaattggcttccttcattacgcagtacagcaccggacaggtcagcgtggaaatcgagtgggagctgcagaaggagaacagcaaacgttggaacccagagattcagtacacttcaaactactacaaatctacaaatgtggactttgctgtcaatacagagggaacttattctgagcctcgccccattggtactcgttacctcacccgtaatctgtaa

SEQ ID NO: 259 - protein, 738 aa, Adeno-associated virus
MAADGYLPDWLEDNLSEGIREWWDLKPGAPKPKANQQKQDDGRGLVLPGYKYLGPFNGLDKGEPVNAADAAALEHDKAYDQQLKAGDNPYLRYNHADAEFQERLQEDTSFGGNLGRAVFQAKKRVLEPLGLVEEAAKTAPGKKRPVEPSPQRSPDSSTGIGKKGQQPAKKRLNFGQTGDSESVPDPQPIGEPPAGPSGLGSGTMAAGGGAPMADNNEGADGVGSSSGNWHCDSTWLGDRVITTSTRTWALPTYNNHLYKQISNGTSGGSTNDNTYFGYSTPWGYFDFNRFHCHFSPRDWQRLINNNWGFRPKRLSFKLFNIQVKEVTQNEGTKTIANNLTSTIQVFTDSEYQLPYVLGSAHQGCLPPFPADVFMIPQYGYLTLNNGSQAVGRSSFYCLEYFPSQMLRTGNNFEFSYTFEDVPFHSSYAHSQSLDRLMNPLIDQYLYYLSRTQSTGGTQGTQQLLFSQAGPANMSAQAKNWLPGPCYRQQRVSTTLSQSNNSNFAWTGATKYHLNGRDSLVNPGVAMATHKDDEERFFPSSGVLMFGKQGAGRDNVDYSSVMLTSEEEIKTTNPVATEQYGVVADNLQQTNTGPIVGNVNSQGALPGMVWQNRDVYLQGPIWAKIPHTDGNFHPSPLMGGLGLKHPPPQILIKNTPVPADPPTTFSQAKLASFITQYSTGQVSVEIEWELQKENSKRWNPEIQYTSNYYKSTNVDFAVNTEGTYSEPRPIGTRYLTRNL

SEQ ID NO: 260 - DNA, 2217 bp, Adeno-associated virus
atggctgctgacggttatcttccagattggctcgaggacaacctctctgagggcattcgcgagtggtgggacctgaaacctggagcccccaagcccaaggccaaccagcagaagcaggacgacggccggggtctggtgcttcctggctacaagtacctcggacccttcaacggactcgacaagggggagcccgtcaacgcggcggacgcagcggccctcgagcacgacaaggcctacgaccagcagctcaaagcgggtgacaatccgtacctgcggtataaccacgccgacgccgagtttcaggagcgtctgcaagaagatacgtcttttgggggcaacctcgggcgagcagtcttccaggccaagaagcgggttctcgaacctctcggtctggttgaggaagcggctaagacggctcctggaaagaagagaccggtagaaccgtcacctcagcgttcccccgactcctccacgggcatcggcaagaaaggccagcagcccgctaaaaagagactgaactttggtcagactggcgactcagagtcagtccccgaccctcaaccaatcggagaaccaccagcaggcccctctggtctgggatctggtacaatggctgcaggcggtggcgctccaatggcagacaataacgaaggcgccgacggagtgggtagttcctcaggaaattggcattgcgattccacatggctgggcgacagagtcatcaccaccagcacccgaacctgggccctgcccacctacaacaaccacctctacaagcaaatatccaatgggacatcgggaggaagcaccaacgacaacacctacttcggctacagcaccccctgggggtattttgacttcaacagattccactgccacttctcaccacgtgactggcagcgactcatcaacaacaactggggattccggccaaaaagactcagcttcaagctcttcaacatccaggtcaaggaggtcacgcagaatgaaggcaccaagaccatcgccaataaccttaccagcacgattcaggtatttacggactcggaataccagctgccgtacgtcctcggctccgcgcaccagggctgcctgcctccgttcccggcggacgtcttcatgattccccagtacggctaccttacactgaacaatggaagtcaagccgtaggccgttcctccttctactgcctggaatattttccatctcaaatgctgcgaactggaaacaattttgaattcagctacaccttcgaggacgtgcctttccacagcagctacgcacacagccagagcttggaccgactgatgaatcctctcatcgaccagtacctgtactacttatccagaactcagtccacaggaggaactcaaggtacccagcaattgttattttctcaagctgggcctgcaaacatgtcggctcaggctaagaactggctacctggaccttgctaccggcagcagcgagtctctacgacactgtcgcaaagcaacaacagcaactttgcttggactggtgccaccaaatatcacctgaacggaagagactctttggtaaatcccggtgtcgccatggcaacccacaaggacgacgaggaacgcttcttcccgtcgagtggagtcctgatgtttggaaaacagggtgctggaagagacaatgtggactacagcagcgttatgctaaccagcgaagaagaaattaaaaccactaaccctgtagccacagaacaatacggtgtggtggctgacaacttgcagcaaaccaatacagggcctattgtgggaaatgtcaacagccaaggagccttacctggcatggtctggcagaaccgagacgtgtacctgcagggtcccatctgggccaagattcctcacacggacggcaacttccacccttcaccgctaatgggaggacttggactgaagcacccacctcctcagatcctgatcaagaacacgccggtacctgcggatcctccaacaacgttcagccaggcgaaattggcttccttcattacgcagtacagcaccggacaggtcagcgtggaaatcgagtgggagctgcagaaggagaacagcaaacgctggaacccagagattcagtacacttcaaactactacaaatctacaaatgtggactttgctgtcaatacagagggaacttattctgagcctcgccccattggtactcgttacctcacccgtaatctgtaa

SEQ ID NO: 261 - protein, 737 aa, Adeno-associated virus
MAADGYLPDWLEDNLSEGIREWWDLKPGAPKPKANQQKQDDGRGLVLPGYKYLGPFNGLDKGEPVNAADAAALEHDKAYDQQLKAGDNPYPRYNHADAEFQERLQEDTPFGGNLGRAVFQAKKRVLEPLGLVEEAAKTAPGKKRPVEPSPQRSPDSSTGIGKKGQQPAKKRLNFGQTGDSESVPDPQPIGEPPAGPSGLGSGTMAAGGGAPMADNNEGADGVGNASGNWHCDSTWLGDRVITTSTRTWALPTYNNHLYKQISSASTGASNDNHYFGYSTPWGYFDFNRFHCHFSPRDWQRLINNNWGFRPKRLNFKLFNIQVKEVTTNDGVTTIANNLTSTVQVFSDSEYQLPYVLGSAHQGCLPPFPADVFMIPQYGYLTLNNGSQAVGRSSFYCLEYFPSQMLRTGNNFTFSYTFEEVPLHSSYAHSQSLDRLMNPLIVQYLYYLNRTQNQSGSAQNKDLLFSRGSPAGMSVQPKNWLPGPCYRQQRVSKTKTDNNNSNFTWTGASKYNLNGRESIINPGTAMASHKDDEDKFFPMSGVMIFGKESAGASNTALDNVMITDEEEIKATNPVATERFGTVAVNFQSSSTDPATGDVHAMGALPGMVWQDRDVYLQGPIWAKIPHTDGHFHPSPLMGGFGLKNPPPQILIKNTPVPANPPAEFSATKFASFITQYSTGQVSVEIEWELQKENSKRWNPEVQYTSNYAKSASVDFTVDNNGLYTEPRPIGTRYLTRPL

SEQ ID NO: 262 - protein, 737 aa, Adeno-associated virus
MAADGYLPDWLEDNLSEGIREWWDLKPGAPKPKANQQKQDDGRGLVLPGYKYLGPFNGLDKGEPVNAADAAALEHDKAYDQQLKAGDNPYPRYNHADAEFQERLQEDTSFGGNLGRAVFQAKKRVLEPLGLVEEAAKTAPGKKRPVEPSPQRSPDSSTGIGKKGQQPAKKRLNFGQTGDSESVPDPQPIGEPPAGPSGLGSGTMAAGGGAPMADNNEGADGVGNASGNWHCDSTWLGDRVITTSTRTWALPTYNNHLYKQISSASTGASNDNHYFGYSTPWGYFDFNRFHCHFSPRDWQRLINNNWGFRPKRLNFKLFNIQVKEVTTNDGVTTIANNLTSTVQVFSDSEYQLPYVLGSAHQGCLPPFPADVFMIPQYGYLTLNNGSQAVGRSSFYCLEYFPSQMLRTGNNFTFSYTFEEVPLHSSYAHSQSLDRLMNPLIDQYLYYLNRTQNQSGSAQNKDLLFSRGSPAGMSVQPKNWLPGPCYRQQRVSKTKTDNNNSNFTWTGASKYNLNGRESIINPGTAMASHKDDEDKFFPMSGVMIFGKESAGASNTALDNVMITDEEEIKATNPVATERFGTVAVNFQSSSTDPATGDVHAMGALPGMVWQDRDVYLQGPIWAKIPHTDGHFHPSPLMGGFGLKNPPPQILIKNTPVPANPPAEFSATKFASFITQYSTGQVSVEIEWELQKENSKRWNPEVQYTSNYAKSASVDFTVDNNGLYTEPRPIGTRYLTRPL

SEQ ID NO: 263 - DNA, 2214 bp, Adeno-associated virus
atggctgctgacggttatcttccagattggctcgaggacaacctctctgagggcattcgcgagtggtgggacctgaaacctggagcccccaagcccaaggccaaccagcagaagcaggacgacggccggggtctggtgcttcctggctacaagtacctcggacccttcaacggactcgacaagggggagcccgtcaacgcggcggacgcagcggccctcgagcacgacaaggcctacgaccagcagctcaaagcgggtgacaatccgtacccgcggtataaccacgccgacgccgagtttcaggagcgtctgcaagaagatacgccttttgggggcaacctcgggcgagcagtcttccaggccaagaagcgggttctcgaacctctcggtctggttgaggaagctgctaagacggctcctggaaagaagagaccggtagaaccgtcacctcagcgttcccccgactcctccacgggcatcggcaagaaaggccagcagcccgctaaaaagagactgaactttggtcagactggcgactcagagtcagtccccgaccctcaaccaatcggagaaccaccagcaggcccctctggtctgggatctggtacaatggctgcaggcggtggcgctccaatggcagacaataacgaaggcgccgacggagtgggtaatgcctcaggaaattggcattgcgattccacatggctgggcgacagagtcatcaccaccagcacccgcacctgggccttgcccacctacaataaccacctctacaagcaaatctccagtgcttcaacgggggccagcaacgacaaccactacttcggctacagcaccccctgggggtattttgatttcaacagattccactgccacttttcaccacgtgactggcagcgactcatcaacaacaattggggattccggcccaagagactcaacttcaaactcttcaacatccaagtcaaggaggtcacgacgaatgatggcgtcacaaccatcgctaataaccttaccagcacggttcaagtcttctcggactcggagtaccagcttccgtacgtcctcggctctgcgcaccagggctgcctccctccgttcccggcggacgtgttcatgattccgcaatacggctacctgacgctcaacaatggcagccaagccgtgggacgttcatccttttactgcctggaatatttcccttctcagatgctgagaacgggcaacaactttaccttcagctacacctttgaggaagtgcctctccacagcagctacgcgcacagccagagcctggaccggctgatgaatcctctcatcgtccaatacctgtattacctgaacagaactcaaaatcagtccggaagtgcccaaaacaaggacttgctgttcagccgtgggtctccagctggcatgtctgttcagcccaaaaactggctacctggaccctgttatcggcagcagcgcgtttctaaaacaaaaacagacaacaacaacagcaattttacctggactggtgcttcaaaatataacctcaatgggcgtgaatccatcatcaaccctggcactgctatggcctcacacaaagacgacgaagacaagttctttcccatgagcggtgtcatgatttttggaaaagagagcgccggagcttcaaacactgcattggacaatgtcatgattacagacgaagaggaaattaaagccactaaccctgtggccaccgaaagatttgggaccgtggcagtcaatttccagagcagcagcacagaccctgcgaccggagatgtgcatgctatgggagcattacctggcatggtgtggcaagatagagacgtgtacctgcagggtcccatttgggccaaaattcctcacacagatggacactttcacccgtctcctcttatgggcggctttggactcaagaacccgcctcctcagatcctcatcaaaaacacgcctgttcctgcgaatcctccggcggagttttcagctacaaagtttgcttcattcatcacccaatactccacaggacaagtgagtgtggaaattgaatgggagctgcagaaagaaaacagcaagcgctggaatcccgaagtgcagtacacatccaattatgcaaaatctgccagcgttgattttactgtggacaacaatggactttatactgagcctcgccccattggcacccgttaccttacccgtcccctgtaa

SEQ ID NO: 264 - protein, 736 aa, Adeno-associated virus
MAADGYLPDWLEDTLSEGIRQWWKLRPGPPPPKPAERHKDDSRGLVLPGYKYLGPFNGLDKGEPVNEADAAALEHDKAYDRQLDSGDNPYLKYNHADAEFQERLKEDTSFGGNLGRAVFQAKKRVLEPLGLVEEGAETAPGKKRPVEQSPQGPDSSSGIGKTGQQPAKKRLNFGQTGDSESVPDPQPLGEPPATPAAVGPTTMASGGGAPMADNNEGADGVGNASGNWHCDSTWLGDRVITTSTRTWALPTYNNHLYKQISSASTGASNDNHYFGYSTPWGYFDFNRFHCHFSPRDWQRLINNNWGFRPKRLNFKLFNIQVKEVTTNDGVTTIANNLTSTVQVFSDSEYQLPYVLGSAHQGCLPPFPADVFMIPQYGYLTLNNGSQAVGRSSFYCLEYFPSQMLRTGNNFTFSYTFEEVPFHSSYAHSQSLDRLMNPLIDQYLYYPNRTQNQSGSAQNKDLLFSRGSPAGMSVQPKNWLPGPCYRQQRVSKTKTDNNNSNFTWTGASKYNLNGRESIINPGTAMASHKDDEDKFFPMSGVMIFGKESAGASNTALDNVMITDEEEIKATNPVATERFGTVAVNFQSSSTDPATGDVHAMGALPGMVWQGRDVYLQGPIWAKIPHTDGHFHPSPLMGGFGLKNPPPQILIKNTPVPANPPAEFSATKFASFITQYSTGQVSVEIEWELQKENSKRWNPEVQYTSNYAKSANVDFTVDNNGLYTEPRPIGTRYLTRPL

SEQ ID NO: 265 - DNA, 2211 bp, Adeno-associated virus
atggctgccgatggttatcttccagattggctcgaggacactctctctgaaggaataagacagtggtggaagctcagacctggcccaccaccaccaaagcccgcagagcggcataaggacgacagcaggggtcttgtgcttcctgggtacaagtacctcggacccttcaacggactcgacaagggagagccggtcaacgaggcagacgccgcggccctcgagcacgacaaagcctacgaccggcagctcgacagcggagacaacccgtacctcaagtacaaccacgccgacgcggagtttcaggagcgccttaaagaagatacgtcttttgggggcaacctcgggcgagcagtcttccaggccaagaagcgggttctcgaacctctcggtctggttgaggaaggcgctgagacggctcctggaaagaaacgtccggtagagcagtcgccacaagggccagactcctcctcgggcatcggcaagacaggccagcagcccgctaaaaagagactcaattttggtcagactggcgactcagagtcagtccccgatccacaacctctcggagaacctccagcaacccccgctgctgtgggacctactacaatggcttcaggcggtggcgcaccaatggcagacaataacgaaggcgccgacggagtgggtaatgcctcaggaaattggcattgcgattccacatggctgggcgacagagtcatcaccaccagcacccgcacctgggccttgcccacctacaataaccacctctacaagcaaatctccagtgcttcaacgggggccagcaacgacaaccactacttcggctacagcaccccctgggggtattttgatttcaacagattccactgccacttttcaccacgtgactggcagcgactcatcaacaacaattggggattccggcccaagagactcaacttcaaactcttcaacatccaagtcaaggaggtcacgacgaatgatggcgtcacaaccatcgctaataaccttaccagcacggttcaagtcttctcggactcggagtaccagcttccgtacgtcctcggctctgcgcaccagggctgcctccctccgttcccggcggacgtgttcatgattccgcaatacggctacctgacgctcaacaatggcagccaagccgtgggacgttcatccttttactgcctggaatatttcccttctcagatgctgagaacgggcaacaactttaccttcagctacacctttgaggaagtgcctttccacagcagctacgcgcacagccagagcctggaccggctgatgaatcctctcatcgaccaatacctgtattacccgaacagaactcaaaatcagtccggaagtgcccaaaacaaggacttgctgtttagccgtgggtctccagctggcatgtctgttcagcccaaaaactggctacctggaccctgttatcggcagcagcgcgtttctaaaacaaaaacagacaacaacaacagcaattttacctggactggtgcttcaaaatataacctcaatgggcgtgaatccatcatcaaccctggcactgctatggcctcacacaaagacgacgaagacaagttctttcccatgagcggtgtcatgatttttggaaaagagagcgccggagcttcaaacactgcattggacaatgtcatgattacagacgaagaggaaattaaagccactaaccctgtggccaccgaaagatttgggaccgtggcagtcaatttccagagcagcagcacagaccctgcgaccggagatgtgcatgctatgggagcattacctggcatggtgtggcaaggtagagacgtgtacctgcagggtcccatttgggccaaaattcctcacacagatggacactttcacccgtctcctcttatgggcggctttggactcaagaacccgcctcctcagatcctcatcaaaaacacgcctgttcctgcgaatcctccggcggagttttcagctacaaagtttgcttcattcatcacccaatactccacaggacaagtgagtgtggaaattgaatgggagctgcagaaagaaaacagcaagcgctggaatcccgaagtgcagtacacatccaattatgcaaaatctgccaacgttgattttactgtggacaacaatggactttatactgagcctcgccccattggcacccgttaccttacccgtcccctgtaa

SEQ ID NO: 266 - protein, 736 aa, Adeno-associated virus
MAADGYLPDWLEDTLSEGIRQWWKLRPGPPPPKPAERHKDDSRGLVLPGYKYLGPFNGLDKGEPVNEADAAALEHDKAYDRQLDSGDNPYLKYNHADAEFQERLKEDTSFGGNLGRAVFQAKKRVLEPLGLVEEGAKTAPGKKRPVEQSPQGPDSSSGIGKTGQQPAKKRLNFGQTGDSESVPDPQPLGEPPATPAAVGPTTMASGGGAPMADNNEGADGVGNASGNWHCDSTWLGDRVITTSTRTWALPTYNNHLYKQISSASTGASNDNHYFGYSTPWGYFDFNRFHCHFSPRDWQRLINNNWGFRPKRLNFKLFNIQVKEVTTNDGVTTIANNLTSTVQVFSDSEYQLPYVLGSAHQGCLPPFPADVFMIPQYGYLTLNNGSQAVGRSSFYCLEYFPSQMLRTGNNFTFSYTFEEVPFHSSYAHSQSLDRLMNPLIDQYLYYPNRTQNQSGSAQNKDLLFSRGSPAGMSVQPKNWLPGPCYRQQRVSKTKTDNNNSNFTWTGASKYNLNGRESIINPGTAMASHKDDEDKFFPMSGVMIFGKESAGASNTALDNVMITDEEEIKATNPVATERFGTVAVNFQSSSTDPATGDVHAMGALPGMVWQGRDVYLQGPIWAKIPHTDGHFHPSPLMGGFGLKNPPPQILIKNTPVPANPPAEFSATKFASFITQYSTGQVSVEIEWELQKENSKRWNPEVQYTSNYAKSANVDFTVDNNGLYTEPRPIGTRYLTRPL

SEQ ID NO: 267 - protein, 736 aa, Adeno-associated virus
MAADGYLPDWLEDTLSEGIRQWWKLRPGPPPPKPAERHKDDSRGLVLPGYKYLGPFNGLDKGEPVNEADAAALEHDKAYDRQLDSGDNPYLKYNHADAEFQERLKEDTSFGGNLGRAVFQAKKRVLEPLGLVEEGAKTAPGKKRPVEQSPQGPDSSSGIGKTGQQPAKKRLNFGQTGDSESVPDPQPLGEPPATPAAVGPTTMASGGGAPMADNNEGADGVGNASGNWHCDSTWLGDRVITTSTRTWALPTYNNHLYKQISSASTGASNDNHYFGYSTPWGYFDFNRFHCHFSPRDWQRLINNNWGFRPKRLNFKLFNIQVKEVTTNDGVTTIANNLTSTVQVFSDSEYQLPYVLGSAHQGCLPPFPADVFMIPQYGYLTLNNGSQAVGRSSFYCLEYFPSQMLRTGNNFTFSYTFEEVPFHSSYAHSQSLDRLMNPLIDQYLYYLNRTQNQSGSAQNKDLLFSRGSPAGMSVQPKNWLPGPCYRQQRVSKTKTDNNNSNFTWTGASKYNLNGRESIINPGTAMASHKDDEDKFFPMSGVMIFGKESAGASNTALDNVMITDEEEIKATNPVATERFGTVAVNFQSSSTDPATGDVHAMGALPGMVWQGRDVYLQGPIWAKIPHTDGHFHPSPLMGGFGLKNPPPQILIKNTPVPANPPAEFSATKFASFITQYSTGQVSVEIEWELQKENSKRWNPEVQYTSNYAKSANVDFTVDNNGLYTEPRPIGTRYLTRPL

SEQ ID NO: 268 - protein, 736 aa, Adeno-associated virus
MAADGYLPDWLEDTLSEGIRQWWKLRPGPPPPKPAERHKDDSRGLVLPGYKYLGPFNGLDKGEPVNEADAAALEHDKAYDRQLDSGDNPYLKYNHADAEFQERLKEDTSFGGNLGRAVFQAKKRVLEPLGLVEEGAKTAPGKKRPVEQSPQGPDSSSGIGKTGQQPAKKRLNFGQTGDSESVPDPQPLGEPPATPAAVGPTTMASGGGAPMADNNEGADGVGNASGNWHCDSTWLGDRVITTSTRTWALPTYNNHLYKQISSASTGASNDNHYFGYSTPWGYFDFNRFHCHFSPRDWQRLINNNWGFRPKRLNFKLFNIQVKEVTTNDGVTTIANNLTSTVQVFSDSEYQLPYVLGSAHQGCLPPFPADVFMIPQYGYLTLNNGSQAVGRSSFYCLEYFPSQMLRTGNNFTFSYTFEEVPFHSSYAHSQSLDRLMNPLIDQYLYYLNRTQNQSGSAQNKDLLFSRGSPAGMSVQPKNWLPGPCYRQQRVSKTKTDNNNSNFTWTGASKYNLNGRESIINPGTAMASHKDDEDKFFPMSGVMIFGKESAGASNTALDNVMITDEEEIKATNPVATERFGTVAVNFQSSSTDPATGDVHAMGALPGMVWQDRDVYLQGPIWAKIPHTDGHFHPSPLMGGFGLKNPPPQILIKNTPVPANPPAEFSATKFASFITQYSTGQVSVEIEWELQKENSKRWNPEVQYTSNYAKSANVDFTVDNNGLYTEPRPIGTRYLTRPL

SEQ ID NO: 269 - DNA, 2208 bp, Adeno-associated virus
atggctgccgatggctatcttccagattggctcgaggacactctctctgaaggaataagacagtggtggaagctcaaacctggcccaccaccaccaaagcccgcagagcggcatagggacgacagcaggggtcttgtgcttcctgggtacaagtacctcggacccttcaacggactcgacaagggagagccggtcaacgaggcagacgccgcggccctcgagcacgacaaagcctacgaccggcagctcgacagcggagacaacccgtacctcaagtacaaccacgccgacgcggagtttcaggagcgccttaaagaagatacgtcttttgggggcaacctcggacgagcagtcttccaggcgaaaaagagggttcttgaacctctgggcctggttgaggaacctgttaagacggctccgggaaaaaagaggccggtagagcactctcctgtggagccagactcctcctcgggaaccggaaaggcgggccagcagcctgcaagaaaaagattgaattttggtcagactggagacgcagactcagtacctgacccccagcctctcggacagccaccagcagccccctctggtctgggaactaatacgatggctacaggcagtggcgcaccaatggcagacaataacgagggcgccgacggagtgggtaattcctcgggaaattggcattgcgattccacatggatgggcgacagagtcatcaccaccagcacccgaacctgggccctgcccacctacaacaaccacctctacaaacaaatttccagccaatcaggagcctcgaacgacaatcactactttggctacagcaccccttgggggtattttgacttcaacagattccactgccacttttcaccacgtgactggcaaagactcatcaacaacaactggggattccgacccaagagactcaacttcaagctctttaacattcaagtcaaagaggtcacgcagaatgacggtacgacgacgattgccaataaccttaccagcacggttcaggtgtttactgactcggggtaccagctcccgtacgtcctcggctcggcgcatcaaggatgcctcccgccgttcccagcagacgtcttcatggtgccacagtatggataccccaccctgaacaacgggagtcaggcagtaggacgctcttcattttactgcctggagtactttccttctcagatgctgcgtaccggaaacaactttaccttcagctacacttttgaggacgttcctttccacagcagctacgctcacagccagagtctggaccgtctcatgaatcctctcatcgaccagtacctgtattacttgagcacaacaaacactccaagtggaaccaccacgcagtcaaggcttcagttttctcaggccggagcgagtgacattcgggaccagtctaggaactggcttcctggaccctgttaccgccagcagcgagtatcaaagacatctgcggataacaacaacagtgaatactcgtggactggagctaccaagtaccacctcaatggcagagactctctggtgaatccgggcccggccgtggcaagccacaaggacgatgaagaaaagttttttcctcagagcggggttctcatctttgggaagcaaggctcagagaaaacaaatgtggacattgaaaaggtcatgattacagacgaagaggaaatcaggacaaccaatcccgtggctacggagcagtatggttctgtatctaccaacctccagagaggcaacagacaagcagctaccgcagatgtcaacacacaaggcgttcttccaggcatggtctggcaggacagagatgtgtaccttcaggggcccatctgggcaaagattccacacacggacggacattttcacccctctcccctcatgggtggattcggacttaaacaccctcctccacagattctcatcaagaacaccccggtacctgcgaatccttcgaccaccttcagtgcggcaaagtttgcttccttcatcacacagtactccacgggacaggtcagcgtggagatcgagtgggagctgcagaaggaaaacagcaaacgctggaatcccgaaattcagtacacttccaactacaacaagtctgttaatgtggactttactgtggacactaatggcgtgtattcagagcctcgccccattggcaccagatacctgactcgtaatctgtaa

SEQ ID NO: 270 - protein, 735 aa, Adeno-associated virus
MAADGYLPDWLEDTLSEGIRQWWKLKPGPPPPKPAERHRDDSRGLVLPGYKYLGPFNGLDKGEPVNEADAAALEHDKAYDRQLDSGDNPYLKYNHADAEFQERLKEDTSFGGNLGRAVFQAKKRVLEPLGLVEEPVKTAPGKKRPVEHSPVEPDSSSGTGKAGQQPARKRLNFGQTGDADSVPDPQPLGQPPAAPSGLGTNTMATGSGAPMADNNEGADGVGNSSGNWHCDSTWMGDRVITTSTRTWALPTYNNHLYKQISSQSGASNDNHYFGYSTPWGYFDFNRFHCHFSPRDWQRLINNNWGFRPKRLNFKLFNIQVKEVTQNDGTTTIANNLTSTVQVFTDSGYQLPYVLGSAHQGCLPPFPADVFMVPQYGYPTLNNGSQAVGRSSFYCLEYFPSQMLRTGNNFTFSYTFEDVPFHSSYAHSQSLDRLMNPLIDQYLYYLSTTNTPSGTTTQSRLQFSQAGASDIRDQSRNWLPGPCYRQQRVSKTSADNNNSEYSWTGATKYHLNGRDSLVNPGPAVASHKDDEEKFFPQSGVLIFGKQGSEKTNVDIEKVMITDEEEIRTTNPVATEQYGSVSTNLQRGNRQAATADVNTQGVLPGMVWQDRDVYLQGPIWAKIPHTDGHFHPSPLMGGFGLKHPPPQILIKNTPVPANPSTTFSAAKFASFITQYSTGQVSVEIEWELQKENSKRWNPEIQYTSNYNKSVNVDFTVDTNGVYSEPRPIGTRYLTRNL

SEQ ID NO: 271 - DNA, 2211 bp, Adeno-associated virus
atggctgccgacggttatcttccagattggctcgaggacactctctctgaaggaataagacagtggtggaagctcaaacctggcccaccaccaccaaagcccgcagagcggcataaggacgacagcaggggtcttgtgcttcctgggtacaagtacctcggacccttcaacggactcgacaagggagagccggtcaacgaggcagacgccgcggccctcgagcacgacaaagcctacgaccggcagctcgacagcggagacaacccgtacctcaagtacaaccacgccgacgcggagtttcaggagcgccttaaagaagatacgtcttttgggggcaacctcgggcgggcagtcttccaggccaagaagcgggttctcgaacctctcggtctggttgaggaaggcgctaagacggctcctggaaagaaacgtccggtagagcagtcgccacaagagccagactccccctcgggcatcggcaagacaggccagcagcccgctaaaaagagactcaattttggtcagactggcgactcagagtcagtccccgatccacaacctctcggagaacctccagcaacccccgctgctgtgggacctactacaatggcttcaggcggtggcgcaccaatggcagacaataacgaaggcgccgacggagtgggtaatgcctcaggaaattggcactgcgattccacatggctgggcgacagagtcatcaccaccagcacccgcacctgggccttgcccacctacaataaccacctctacaagcaaatctccagtgcttcaacgggggccagcaacgacaaccactacttcggctacagcaccccctgggggtattttgatttcaacagattccactgccacttttcaccacgtgactggcagcgactcatcaacaacaattggggattccggcccaagagactcaacttcaaactcttcaacatccaagtcaaggaggtcacgacgaatgatggcgtcacaaccatcgctaataaccttaccagcacggttcaagtcttctcggactcggagtaccagcttccgtacgtcctcggctctgcgcaccagggccgcctccctccgttcccggcggacgtgttcatgattccgcaatacggctacctgacgctcaacaatggcagccaagccgtgggacgttcatcctcttactgcctggaatatttcccttctcagatgctgagaacgggcaacaactttaccttcagctacacctttgaggaagtgcctctccacagcagctgcgcgcacagccagagcctggaccggctgatgaatcctctcatcgaccaatacctgtattacctgaacagaactcaaaatcagtccggaagtgcccaaaacagggacttgctgttcagccgtgggtctccagctggcatgtctgttcagcccaaaaactggctacctggaccctgttatcggcagcagcgcgtttctaaaacaaaaacagacaacaacaacagcaattttacctggactggtgcttcaaaatataacctcaatgggcgtgaatccatcatcaaccctggcactgctatggcctcacacaaagacgacgaagacaagttctttcccatgagcggtgtcatgatttttggaaaagagagcgccggagcttcaaacactgcattggacaatgtcatgattacagacgaagaggaaattaaagccactaaccctgtggccaccgaaagatttgggaccgtggcagtcaatttccagagcagcagcacagaccctgcgaccggagatgtgcatgctatgggagcattacctggcatggtgtggcaagatagagacgtgtacctgcagggtcccatttgggccaaaattcctcacacagatggacactttcacccgtctcctcttatgggcggctttggactcaagaacccgcctcctcagatcctcatcaaaaacacgcctgttcctgcgaatcctccggcggagttttcagctacaaagtttgcttcattcatcacccaatactccgcaggacaagtgagtgtggaaattgaatgggagctgcagaaagaaaacagcaagcgctggaatcccgaagtgcagtacacatccaattatgcaaaatctgccaacgttgattttactgtggacaacaatggactttatactgagcctcgccccattggcacccgttaccttacccgtcccctgtaa

SEQ ID NO: 272 - protein, 736 aa, Adeno-associated virus
MAADGYLPDWLEDTLSEGIRQWWKLKPGPPPPKPAERHKDDSRGLVLPGYKYLGPFNGLDKGEPVNEADAAALEHDKAYDRQLDSGDNPYLKYNHADAEFQERLKEDTSFGGNLGRAVFQAKKRVLEPLGLVEEGAKTAPGKKRPVEQSPQEPDSPSGIGKTGQQPAKKRLNFGQTGDSESVPDPQPLGEPPATPAAVGPTTMASGGGAPMADNNEGADGVGNASGNWHCDSTWLGDRVITTSTRTWALPTYNNHLYKQISSASTGASNDNHYFGYSTPWGYFDFNRFHCHFSPRDWQRLINNNWGFRPKRLNFKLFNIQVKEVTTNDGVTTIANNLTSTVQVFSDSEYQLPYVLGSAHQGRLPPFPADVFMIPQYGYLTLNNGSQAVGRSSSYCLEYFPSQMLRTGNNFTFSYTFEEVPLHSSCAHSQSLDRLMNPLIDQYLYYLNRTQNQSGSAQNRDLLFSRGSPAGMSVQPKNWLPGPCYRQQRVSKTKTDNNNSNFTWTGASKYNLNGRESIINPGTAMASHKDDEDKFFPMSGVMIFGKESAGASNTALDNVMITDEEEIKATNPVATERFGTVAVNFQSSSTDPATGDVHAMGALPGMVWQDRDVYLQGPIWAKIPHTDGHFHPSPLMGGFGLKNPPPQILIKNTPVPANPPAEFSATKFASFITQYSAGQVSVEIEWELQKENSKRWNPEVQYTSNYAKSANVDFTVDNNGLYTEPRPIGTRYLTRPL

SEQ ID NO: 273 - protein, 736 aa, Adeno-associated virus
MAADGYLPDWLEDTLSEGIRQWWKLKPGPPPPKPAERHKDDSRGLVLPGYKYLGPFNGLDKGEPVNEADAAALEHDKAYDRQLDSGDNPYLKYNHADAEFQERLKEDTSFGGNLGRAVFQAKKRVLEPLGLVEEGAKTAPGKKRPVEQSPQEPDSSSGIGKTGQQPAKKRLNFGQTGDSESVPDPQPLGEPPATPAAVGPTTMASGGGAPMADNNEGADGVGNASGNWHCDSTWLGDRVITTSTRTWALPTYNNHLYKQISSASTGASNDNHYFGYSTPWGYFDFNRFHCHFSPRDWQRLINNNWGFRPKRLNFKLFNIQVKEVTTNDGVTTIANNLTSTVQVFSDSEYQLPYVLGSAHQGCLPPFPADVFMIPQYGYLTLNNGSQAVGRSSFYCLEYFPSQMLRTGNNFTFSYTFEEVPLHSSCAHSQSLDRLMNPLIDQYLYYLNRTQNQSGSAQNRDLLFSRGSPAGMSVQPKNWLPGPCYRQQRVSKTKTDNNNSNFTWTGASKYNLNGRESIINPGTAMASHKDDEDKFFPMSGVMIFGKESAGASNTALDNVMITDEEEIKATNPVATERFGTVAVNFQSSSTDPATGDVHAMGALPGMVWQDRDVYLQGPIWAKIPHTDGHFHPSPLMGGFGLKNPPPQILIKNTPVPANPPAEFSATKFASFITQYSTGQVSVEIEWELQKENSKRWNPEVQYTSNYAKSANVDFTVDNNGLYTEPRPIGTRYLTRPL

SEQ ID NO: 274 - DNA, 2208 bp, Adeno-associated virus
atggctgccgatggctatcttccagattggctcgaggacactctctctgaaggaataagacagtggtggaagctcaaacctggcccaccaccaccaaagcccgcagagcggcatagggacgacagcaggggtcttgtgcttcctgggtacaagtacctcggacccttcaacggactcgacaagggagagccggtcaacgaggcagacgccgcggccctcgagcacgacaaagcctacgaccggcagctcgacagcggagacaacccgtacctcaagtacaaccacgccgacgcggagtttcaggagcgccttaaagaagatacgtcttttgggggcaacctcggacgagcagtcttccaggcgaaaaagagggttcttgaacctctgggcctggttggggaacctgttaagacggctccgggaaaaaagaggccggtagagcactctcctgtggagccagactcctcctcgggaaccggaaaggcgggccagcagcctgcaagaaaaagattgaattttggtcagactggagacgcagactcagtacctgacccccagcctctcggacagccaccagcagccccctctggtctgggaactaatacgatggctacaggcagtggcgcaccaatggcagacaataacgagggcgccgacggagtgggtaattcctcgggaaattggcattgcgattccacatggatgggcgacagagtcatcaccaccagcacccgaacctgggccctgcccacctacaacaaccacctctacaaacaaatttccagccaatcaggagcctcgaacgacagtcactactttggctacagcaccccttgggggtattttgacttcaacagattccactgccacttttcaccacgtgactggcaaagactcatcaacaacaactggggattccgacccaagagactcaacttcaagctctttaacattcaagtcaaagaggtcacgcagaatgacggtacgacgacgattgccaataaccttaccagcacggttcaggtgtttactgactcggagtaccagctcccgtacgtcctcggctcggcgcatcaaggatgcctcccgccgttcccagcagacgtcttcatggtgccacagtatggatacctcaccctgaacaacgggagtcaggcagtaggacgctcttcattttactgcctggagtactttccttctcagatgctgcgtaccggaaacaactttaccttcagctacacttttgaggacgttcctttccacagcagctacgctcacagccagagtctggaccgtctcatgaatcctctcatcgaccagtacctgtattacttgagcacaacaaacactccaagtggaaccaccacgcagtcaaggctccagttttctcaggccggagcgagtgacattcgggaccagtctaggaactggcttcctggaccctgttaccgccagcagcgagtatcaaagacatctgcggataacaacaacagtgaatactcgtggactggagctaccaagtaccacctcaatggcagagactctctggtgaatccgggcccggccatggcaagccacaaggacaatgaagaaaagttttttcctcagagcggggttctcatctttgggaagcaaggctcagagaaaacaaatgtggacattgaaaaggtcatgattacagacgaagaggaaatcaggacaaccaatcccgtggctacggagcagtatggttctgtatctaccaacctccagagaggcaacagacaagcagctaccgcagatgtcaacacacaaggcgttcttccaggcatggtctggcaggacagagatgtgtaccttcaggggcccatctgggcaaagattccacacacggacggacattttcacccctctcccctcatgggtggattcggacttaaacaccctcctccacagattctcatcaagaacaccccggtacctgcgaatccttcgaccaccttcagtgcggcaaagtttgcttccttcatcacacagtactccacgggacaggtcagcgtggagatcgagtgggagctgcagaaggaaaacagcaaacgctggaatcccgaaattcagtacacttccaactacaacaagtctgttaatgtggactttactgtggacactaatggcgtgtattcagagcctcgccccattggcaccagatacctgactcgtaatctgtaa

SEQ ID NO: 275 - protein, 735 aa, Adeno-associated virus
MAADGYLPDWLEDTLSEGIRQWWKLKPGPPPPKPAERHRDDSRGLVLPGYKYLGPFNGLDKGEPVNEADAAALEHDKAYDRQLDSGDNPYLKYNHADAEFQERLKEDTSFGGNLGRAVFQAKKRVLEPLGLVGEPVKTAPGKKRPVEHSPVEPDSSSGTGKAGQQPARKRLNFGQTGDADSVPDPQPLGQPPAAPSGLGTNTMATGSGAPMADNNEGADGVGNSSGNWHCDSTWMGDRVITTSTRTWALPTYNNHLYKQISSQSGASNDSHYFGYSTPWGYFDFNRFHCHFSPRDWQRLINNNWGFRPKRLNFKLFNIQVKEVTQNDGTTTIANNLTSTVQVFTDSEYQLPYVLGSAHQGCLPPFPADVFMVPQYGYLTLNNGSQAVGRSSFYCLEYFPSQMLRTGNNFTFSYTFEDVPFHSSYAHSQSLDRLMNPLIDQYLYYLSTTNTPSGTTTQSRLQFSQAGASDIRDQSRNWLPGPCYRQQRVSKTSADNNNSEYSWTGATKYHLNGRDSLVNPGPAMASHKDNEEKFFPQSGVLIFGKQGSEKTNVDIEKVMITDEEEIRTTNPVATEQYGSVSTNLQRGNRQAATADVNTQGVLPGMVWQDRDVYLQGPIWAKIPHTDGHFHPSPLMGGFGLKHPPPQILIKNTPVPANPSTTFSAAKFASFITQYSTGQVSVEIEWELQKENSKRWNPEIQYTSNYNKSVNVDFTVDTNGVYSEPRPIGTRYLTRNL

SEQ ID NO: 276 - protein, 737 aa, Adeno-associated virus
RMAADGYLPDWLEDNLSEGIREWWDLKPGAPKPKANQQKQDDGRGLVLPGYKYLGPFNGLDKGEPVNAADAAALEHDKAYDQQLKAGDNPYLRYNHADAEFQERLQEDTSFGGNLGRAVFQAKKRVLEPLGLVEEGAKTAPGKKRPVEQSPQEPDSSSGIGKTGQQPAKKRLNFGQTGDSESVPDPQPLGEPPATPAAVGPTTMASGGGAPMADNNEGADGVGNASGNWHCDSTWLGDRVITTSTRTWALPTYNNHLYKQISSTSTGASNDNHYFGYGTPWGYFDFNRFHCHFSPRDWQRLINNNWGFRPKRLNFKLFNIQVEEVTTNDGVTTIANNLTSTVQVFSDSEYQLPYVLGSAHQGCLPPFPADVFMIPQYGYLTLNNGSQAVGRSSFYCLEYFPSQMLRTGNNFTFSYTFEEVPFHSSYAHSQSLDRLMNPLIDQYLYYLNRTQNQSGSAQNKDLLFSRGSPAGMSVQPKNWLPGPCYRQQRVSKTKTDNNNSNFTWTGASKYNLNGRESIINPGTAVASHKDDEDKFFPMSGVMIFGKESAGASSTALDNVMITDEEEIKATNPVATERFGTVAVNFQSSSTDPATGDVHAMGALPGMVWQDRDVYLQGPIWAKIPHTDGHFHPSPLMGGFGLKNPPPQILIKNTPVPANPPAEFSATKFASFITQYSTGQVSVEIEWELQKENSKRWNPEVQYTSNYAKSANVDFTVDNNGLYTEPRPIGTRYLTRPL

SEQ ID NO: 277 - protein, 736 aa, Adeno-associated virus
MAADGYLPDWLEDNLSEGIREWWDLKPGAPKPKANQQKQDDGRGLVLPGYKYLGPFNGLDKGEPVNAADAAALEHDKAYDQQLKAGDNPYLRYNHADAEFQERLQEDTSFGGNLGRAVFQAKKRVLEPLGLVEEGAKTAPGKKRPVEQSPQEPDSSSGIGKTGQQPAKKRLNFGQTGDSESVPDPQPLGEPPATPAAVGPTTMASGGGAPMADNNEGADGVGNASGNWHCDSTWLGDRVITTSTRTWALPTYNNHLYKQISSTSTGASNDNHYFGYGTPWGYFDFNRFHCHFSPRDWQRLINNNWGFRPKRLNFKLFNIQVEEVTTNDGVTTIANNLTSTVQVFSDSEYQLPYVLGSAHQGCLPPFPADVFMIPQYGYLTLNNGSQAVGRSSFYCLEYFPSQMLRTGNNFTFSYTFEEVPFHSSYAHSQSLDRLMNPLIDQYLYYLNRTQNQSGSAQNKDLLFSRGSPAGMSVQPKNWLPGPCYRQQRVSKTKTDNNNSNFTWTGASKYNLNGRESIINPGTAVASHKDDEDKFFPMSGVMIFGKESAGASSTALDNVMITDEEEIKATNPVATERFGTVAVNFQSSSTDPATGDVHAMGALPGMVWQDRDVYLQGPIWAKIPHTDGHFHPSPLMGGFGLKNPPPQILIKNTPVPANPPAEFSATKFASFITQYSTGQVSVEIEWELQKENSKRWNPEVQYTSNYAKSANVDFTVDNNGLYTEPRPIGTRYLTRPL

SEQ ID NO: 278 - DNA, 2211 bp, Adeno-associated virus
atggctgccgatggttatcttccagattggctcgaggacaacctctctgagggcattcgcgagtggtgggacttgaaacctggagccccgaagcccaaagccaaccagcaaaagcaggacgacggccggggtctggtgcttcctggctacaagtacctcggacccttcaacggactcgacaagggggagcccgtcaacgcggcggacgcagcggccctcgagcacgacaaggcctacgaccagcagctcaaagcgggtgacaatccgtacctgcggtataaccacgccgacgccgagtttcaggagcgtctgcaagaagatacgtcttttgggggcaacctcgggcgagcagtcttccaggccaagaagcgggttctcgaacctctcggtctggttgaggaaggcgctaagacggctcctggaaagaaacgtccggtagagcagtcgccacaagagccagactcctcctcgggcatcggcaagacaggccagcagcccgctaaaaagagactcaattttggccagactggcgactcagagtcagtccccgatccacaacctctcggagaacctccagcaacccccgctgctgtgggacctactacaatggcttcaggcggtggcgcaccaatggcagacaataacgaaggcgccgacggagtgggtaatgcctcaggaaattggcattgcgattccacatggctgggcgacagagtcatcaccaccagcacccgcacctgggccttgcccacctacaataaccacctctacaagcaaatctccagtacttcaacgggggccagcaacgacaaccactacttcggctacggcaccccctgggggtattttgatttcaacagattccactgccacttttcaccacgtgactggcagcgactcatcaacaacaattggggattccggcccaagagactcaacttcaaactcttcaacatccaagtcgaggaggtcacgacgaatgatggcgtcacaaccatcgctaataaccttaccagcacggttcaagtcttctcggactcggagtaccagcttccgtacgtcctcggctctgcgcaccagggctgcctccctccgttcccggcggacgtgttcatgattccgcaatacggctacctgacgctcaacaatggcagccaagccgtgggacgttcatccttttactgcctggaatatttcccttctcagatgctgagaacgggcaacaactttaccttcagctacacctttgaggaagtgcctttccacagcagctacgcgcacagccagagcctggaccggctgatgaatcctctcatcgaccaatacctgtattacctgaacagaacacaaaatcagtccggaagtgcccaaaacaaggacttgctgtttagccgtgggtctccagctggcatgtctgttcagcccaaaaactggctacctggaccctgttatcggcagcagcgcgtttctaaaacaaaaacagacaacaacaacagcaattttacctggactggtgcttcaaaatataacctcaatgggcgtgaatccatcatcaaccctggcaccgctgtggcctcacacaaagacgacgaagacaagttctttcccatgagcggtgtcatgatttttggaaaagagagcgccggagcttcaagcactgcattggacaatgtcatgattacagacgaagaggaaattaaagccactaaccctgtggccaccgaaagatttgggaccgtggcagtcaatttccagagcagcagcacagaccctgcgaccggagatgtgcatgctatgggagcattacctggcatggtgtggcaagatagagacgtgtacctgcagggtcccatttgggccaaaattcctcacacagatggacactttcacccgtctcctcttatgggcggctttggactcaagaacccgcctcctcagatcctcatcaaaaacacgcctgttcctgcgaatcctccggcggagttttcagctacaaagtttgcttcattcatcacccaatactccacaggacaagtgagtgtggaaattgaatgggagctgcagaaagaaaacagcaagcgctggaatcccgaagtgcagtacacatccaattatgcaaaatctgccaacgttgattttactgtggacaacaatggactttatactgagcctcgccccattggcacccgttaccttacccgtcccctgtaa

SEQ ID NO: 279 - protein, 737 aa, Adeno-associated virus
RMAADGYLPDWLEDNLSEGIREWWDLKPGAPKPKANQQKQDDGRGLVLPGYKYLGPFNGLDKGEPVNAADAAALEHDKAYDQQLKAGDNPYLRYNHADAEFQERLQEDTSFGGNLGRAVFQAKKRVLEPLGLVEEGAKTAPGKKRPVEQSPQEPDSSSGIGKTGQQPAKKRLNFGQTGDSESVPDPQPLGEPPATPAAVGPTTMASGGGAPMADNNEGADGVGNASGNWHCDSTWLGDRVITTSTRTWALPTYNNHLYKQISSTSTGASNDNHYFGYSTPWGYFDFNRFHCHFSPRDWQRLINNNWGFRPKRLNFKLFNIQVEEVTTNDGVTTIANNLTSTVQVFSDSEYQLPYVLGSAHQGCLPPFPADVFMIPQYGYLTLNNGSQAVGRSSFYCLEYFPSQMLRTGNNFTFSYTFEEVPFHSSYAHSQSLDRLMNPLIDQYLYYLNRTQNQSGSAQNKDLLFSRGSPAGMSVQPKNWLPGPCYRQQRVSKTKTDNNNSNFTWTGASKYNLNGRESIINPGTAVASHKDDEDKFFPMSGVMIFGKESAGASSTALDNVMITDEEEIKATNPVATERFGTVAVNFQSSSTDPATGDVHAMGALPGMVWQDRDVYLQGPIWAKIPHTDGHFHPSPLMGGFGLKNPPPQILIKNTPVPANPPAEFSATKFASFITQYSTGQVSVEIEWELQKENSKRWNPEVQYTSNYAKSANVDFTVDNNGLYTEPRPIGTRYLTRPL

SEQ ID NO: 280 - protein, 737 aa, Adeno-associated virus
RMAADGYLPDWLEDNLSEGIREWWDLKPGAPKPKANQQKQDDGRGLVLPGYKYLGPFNGLDKGEPVNAADAAALEHDKAYDQQLKAGDNPYLRYNHADAEFQERLQEDTSFGGNLGRAVFQAKKRVLEPLGLVEEGAKTAPGKKRPVEQSPQEPDSSSGIGKTGQQPAKKRLNFGQTGDSESVPDPQPLGEPPATPAAVGPTTMASGGGAPMADNNEGADGVGNASGNWHCDSTWLGDRVITTSTRTWALPTYNNHLYKQISSTSTGASNDNHYFGYSTPWGYFDFNRFHCHFSPRDWQRLINNNWGFRPKRLNFKLFNIQVKEVTTNDGVTTIANNLTSTVQVFSDSEYQLPYVLGSAHQGCLPPFPADVFMIPQYGYLTLNNGSQAVGRSSFYCLEYFPSQMLRTGNNFTFSYTFEEVPFHSSYAHSQSLDRLMNPLIDQYLYYLNRTQNQSGSAQNKDLLFSRGSPAGMSVQPKNWLPGPCYRQQRVSKTKTDNNNSNFTWTGASKYNLNGRESIINPGTAVASHKDDEDKFFPMSGVMIFGKESAGASSTALDNVMITDEEEIKATNPVATERFGTVAVNFQSSSTDPATGDVHAMGALPGMVWQDRDVYLQGPIWAKIPHTDGHFHPSPLMGGFGLKNPPPQILIKNTPVPANPPAEFSATKFASFITQYSTGQVSVEIEWELQKENSKRWNPEVQYTSNYAKSANVDFTVDNNGLYTEPRPIGTRYLTRPL

SEQ ID NO: 281 - protein, 737 aa, Adeno-associated virus
RMAADGYLPDWLEDNLSEGIREWWDLKPGAPKPKANQQKQDDGRGLVLPGYKYLGPFNGLDKGEPVNAADAAALEHDKAYDQQLKAGDNPYLRYNHADAEFQERLQEDTSFGGNLGRAVFQAKKRVLEPLGLVEEGAKTAPGKKRPVEQSPQEPDSSSGIGKTGQQPAKKRLNFGQTGDSESVPDPQPLGEPPATPAAVGPTTMASGGGAPMADNNEGADGVGNASGNWHCDSTWLGDRVITTSTRTWALPTYNNHLYKQISSTSTGASNDNHYFGYSTPWGYFDFNRFHCHFSPRDWQRLINNNWGFRPKRLNFKLFNIQVKEVTTNDGVTTIANNLTSTVQVFSDSEYQLPYVLGSAHQGCLPPFPADVFMIPQYGYLTLNNGSQAVGRSSFYCLEYFPSQMLRTGNNFTFSYTFEEVPFHSSYAHSQSLDRLMNPLIDQYLYYLNRTQNQSGSAQNKDLLFSRGSPAGMSVQPKNWLPGPCYRQQRVSKTKTDNNNSNFTWTGASKYNLNGRESIINPGTAVASHKDDEDKFFPMSGVMIFGKESAGANSTALDNVMITDEEEIKATNPVATERFGTVAVNFQSSSTDPATGDVHAMGALPGMVWQDRDVYLQGPIWAKIPHTDGHFHPSPLMGGFGLKNPPPQILIKNTPVPANPPAEFSATKFASFITQYSTGQVSVEIEWELQKENSKRWNPEVQYTSNYAKSANVDFTVDNNGLYTEPRPIGTRYLTRPL

SEQ ID NO: 282 - DNA, 2208 bp, Adeno-associated virus
atggctgccgatggttatcttccagattggctcaaggacactctctctgaaggaataagacagtggtggaagctcaaacctggcccaccaccaccaaagcccgcagagcggcataaggacgacagcgggggtcttgtgcttcctgggtacaagtacctcggacccttcaacggactcgacaagggagagccggtcaacgaggcagacgccgcggccctcgagtacgacaaggcctacgaccggcagctcgacagcggagacaacccgtacctcaagtacaaccacgccgacgcggagtttcaggagcgccttaaagaagatacgtcttttgggggcaacctcggacgagcagtcttccaggcgaaaaagagggttcttgaacctctgggcctggttgaggaacctgttaagacggctccgggaaaaaagaggccggtagagcactctcctgtggagccagactcctcctcgggaacaggaaaagcgggccagcagcctgcgagaaagagattgaattttggtcagactggagacgcagactccgtacctgacccccagcctctcggacagccaccagcagccccctctggtctgggaactaatacgatggctacaggcagtggcgcaccaatggcagacaataacgagggcgccgacggagtgggtaattcctcgggaagttggcattgcgattccacatggatgggcgacagagtcatcaccaccagcacccgaacctgggctctgcccacctacaacaaccatctgtacaagcagatctccagccaatcaggagccagcaacgacaaccactactttggctacagcaccccttgggggtattttgacttcaacagattccactgccacttttcaccacgtgactggcaaagactcatcaacaacaactggggattccggcccaagagactcaacttcaagctctttaacattcaagtcaaggaggtcacgcagaatgacggtacgacgacgattgccaataaccttaccagcacggttcaggtgtttactgactcggagtaccagctcccgtacgtccccggctcggcgcatcaaggatgcctcccgccgttcccagcagacgtcttcatggtgccacagtatggatacctcaccctgaacaacgggagtcaggcagtaggacgctcttcattttactgcctggagtactttccttctcagatgcttcgtaccggaaacaactttaccttcagctacacctttgaggatgttcctttccacagcagctacgctcacagccagagtttggaccgtctcatgaatcctctcatcgaccagtacctgtattacttgagcagaacaaacactccaagcggaaccaccacgcagtccaggcttcagttttctcaggccggagcaagtgacattcgggaccagtctaggaactggcttcctggaccctgttaccgccagcagcgagtatcaaagacagctgcggacaacaacaacagtgaatactcgtggactggagctaccaagtaccacctcaatggcagagactctctggtgaatccgggcccggccatggccagccacaaggacgatgaagaaaagttttttcctcaaagcggggttctcatctttgggaagcaaggctcagagaaaacaaatgtggacattgaaaaggtcatgattacagacgaagaggaaatcagaaccaccaatcccgtggccacggagcagtatggttctgtatctaccaacctccagagcggcaacacacaagcagctactgcagatgtcaacacacaaggcgttcttccaggcatggtctggcaggacagagacgtgcacctgcaggggcctatctgggcaaagattccacacacggacggacattttcacccctctcccctcatgggcggatttggacttaaacaccctcctccacagattctcatcaagaacaccccggtacctgcaaatccttcgaccaccttcagtgcggcaaagtttgcttccttcatcacacagtattccacagggcaggtcagcgtggagatcgagtgggagctgcagaaggagaacagcaaacgctggaaccccgagatccagtacacttccaactacaacaaatctgttaatgtggactttactgtggacactaatggtgtgtattcagagcctcgccccattggcaccagatacctgactcgtaatctgtaa

SEQ ID NO: 283 - protein, 735 aa, Adeno-associated virus
MAADGYLPDWLKDTLSEGIRQWWKLKPGPPPPKPAERHKDDSGGLVLPGYKYLGPFNGLDKGEPVNEADAAALEYDKAYDRQLDSGDNPYLKYNHADAEFQERLKEDTSFGGNLGRAVFQAKKRVLEPLGLVEEPVKTAPGKKRPVEHSPVEPDSSSGTGKAGQQPARKRLNFGQTGDADSVPDPQPLGQPPAAPSGLGTNTMATGSGAPMADNNEGADGVGNSSGSWHCDSTWMGDRVITTSTRTWALPTYNNHLYKQISSQSGASNDNHYFGYSTPWGYFDFNRFHCHFSPRDWQRLINNNWGFRPKRLNFKLFNIQVKEVTQNDGTTTIANNLTSTVQVFTDSEYQLPYVPGSAHQGCLPPFPADVFMVPQYGYLTLNNGSQAVGRSSFYCLEYFPSQMLRTGNNFTFSYTFEDVPFHSSYAHSQSLDRLMNPLIDQYLYYLSRTNTPSGTTTQSRLQFSQAGASDIRDQSRNWLPGPCYRQQRVSKTAADNNNSEYSWTGATKYHLNGRDSLVNPGPAMASHKDDEEKFFPQSGVLIFGKQGSEKTNVDIEKVMITDEEEIRTTNPVATEQYGSVSTNLQSGNTQAATADVNTQGVLPGMVWQDRDVHLQGPIWAKIPHTDGHFHPSPLMGGFGLKHPPPQILIKNTPVPANPSTTFSAAKFASFITQYSTGQVSVEIEWELQKENSKRWNPEIQYTSNYNKSVNVDFTVDTNGVYSEPRPIGTRYLTRNL

SEQ ID NO: 284 - DNA, 2208 bp, Adeno-associated virus
atggctgccgatggttatcttccagattggctcgaggacactctctctgaaggaataagacagtggtggaagctcaaacctggcccaccaccaccaaagcccgcagagcggcataaggacgacagcaggggtcttgtgcttcctgggtacaagtacctcggacccttcaacggactcgacaagggggagccggtcaacgaggcagacgccgcggccctcgagcacgacaaggcctacgaccggcagctcgacagcggagacaacccgtacctcaagtacaaccacgccgacgcagagtttcaggagcgccttaaagaagatacgtcttttgggggcaacctcggacgagcagtcttccaggcgaaaaagagggttcttgaacctctgggcctggttgaggaacctgttaagacggctccgggaaaaaagaggccggtagagcactctcctgtggagccagactcctcctcgggaaccggaaaagcgggccagcagcctgcaagaaaaagattaaattttggtcagactggagacgcagactccgtacctgacccccagcctctcggacagccaccagcagccccctctggtctgggatctactacaatggctacaggcagtggcgcaccaatggcagacaataacgagggtgccgatggagtgggtaattcctcaggaaattggcattgcgattcccaatggctgggcgacagagtcatcaccaccagcacccgaacctgggccctgcccacatacaacaaccacctctacaagcaaatctccagccaatcaggagccagcaacgacaaccactactttggctacagcaccccctgggggtattttgacttcaacagattccactgccacttttcaccacgtgactggcaaagactcatcaacaacaactggggattccggcccaaaagactcaacttcaagctctttaatattcaagtcaaagaggtcacgcagaatgacggtacgacgacgattgccaataaccttaccagcacggttcaggtgtttactgactcggagtaccagctcccgtacgtcctgggctcggcgcatcaaggatgcctcccgccgtttccagcggacgtcttcatggtcccacagtatggatacctcaccctgaacaacgggagtcaggcggtaggacgctcttccttttactgcctggagtactttccttctcagatgctgcgtactggaaacaactttcagttcagctacacttttgaagacgtgcctttccacagcagctacgctcacagccagagtctggatcggctgatgaatcctctgatcgaccagtacctgtattatctgaacaagacacaaacaaatagtggaactcttcagcagtctcggctactgtttagccaagctggaccaaccaacatgtctcttcaagctaaaaactggctgcctggaccttgctacagacagcagcgtctgtcaaaacaggcaaacgacaacaacaacagcaactttccctggactgcagctacaaagtatcatctaaatggccgggactcgttggttaatccaggaccagctatggccagtcgcaaggatgacgaagaaaagtttttccccatgcatggaaccctgatatttggtaaacaaggaacaaatgccaacgacgcggatttggaaaatgtcatgattacagatgaagaagaaatcagggccaccaatcccgtggctacggagcagtacgggactgtgtcaaataatttgcaaaactcaaacactggtccaactactggaactgtcaatcaccaaggagcgttacctggtatggtgtggcaggatcgagacgtgtacctgcagggacccatttgggccaagattcctcacaccgatggacactttcatccttctccactgatgggaggttttggactcaaacacccgcctcctcagatcatgatcaaaaacactcccgttccagccaatcctcccacaaacttcagttctgccaagtttgcttctttcatcacacagtattccacgggacaggtcagcgtggagatcgagtgggagctgcagaaggagaacagcaaacgctggaatcccgaaattcagtacacttccaactacaacaagtctgttaatgtggactttactgtggacactaatggtgtgtattcagagcctcgccccattggcaccagatacctgactcgtaatctgtaa

SEQ ID NO: 285 - protein, 735 aa, Adeno-associated virus
MAADGYLPDWLEDTLSEGIRQWWKLKPGPPPPKPAERHKDDSRGLVLPGYKYLGPFNGLDKGEPVNEADAAALEHDKAYDRQLDSGDNPYLKYNHADAEFQERLKEDTSFGGNLGRAVFQAKKRVLEPLGLVEEPVKTAPGKKRPVEHSPVEPDSSSGTGKAGQQPARKRLNFGQTGDADSVPDPQPLGQPPAAPSGLGSTTMATGSGAPMADNNEGADGVGNSSGNWHCDSQWLGDRVITTSTRTWALPTYNNHLYKQISSQSGASNDNHYFGYSTPWGYFDFNRFHCHFSPRDWQRLINNNWGFRPKRLNFKLFNIQVKEVTQNDGTTTIANNLTSTVQVFTDSEYQLPYVLGSAHQGCLPPFPADVFMVPQYGYLTLNNGSQAVGRSSFYCLEYFPSQMLRTGNNFQFSYTFEDVPFHSSYAHSQSLDRLMNPLIDQYLYYLNKTQTNSGTLQQSRLLFSQAGPTNMSLQAKNWLPGPCYRQQRLSKQANDNNNSNFPWTAATKYHLNGRDSLVNPGPAMASRKDDEEKFFPMHGTLIFGKQGTNANDADLENVMITDEEEIRATNPVATEQYGTVSNNLQNSNTGPTTGTVNHQGALPGMVWQDRDVYLQGPIWAKIPHTDGHFHPSPLMGGFGLKHPPPQIMIKNTPVPANPPTNFSSAKFASFITQYSTGQVSVEIEWELQKENSKRWNPEIQYTSNYNKSVNVDFTVDTNGVYSEPRPIGTRYLTRNL

SEQ ID NO: 286 - DNA, 2208 bp, Adeno-associated virus
atggctgccgatggttatcttccagattggctcgaggacactctctctgaaggaataagacagtggtggaagctcaaacctggcccaccaccaccaaagcccgcagagcggcataaggacgacagcaggggtcttgtgcttcctgggtacaagtacctcggacccttcaacggactcgacaagggagagccggtcaacgaggcagacgccgcggccctcgagcacgacaaagcctacgaccggcagctcgacagcggagacaacccgtacctcaagtacaaccacgccgacgcggagtttcaggagcgccttaaagaagatacgtcttttgggggcaacctcggacgagcagtcttccaggcgaaaaagagggttcttgaacctctgggcctggttggggaacctgtcaagacggctccaggaaaaaagaggccggtagagcactctcctgtggagccagactcctcctcgggaaccggaaaggcgggccagcagcctgcaagaaaaagattgaattttggtcagactggagacgcagactcagtacctgacccccagcctctcggacagccaccagcagccccctctggtctgggaactaatacgatggctacaggcagtggcgcaccaatggcagacaataacgagggcgccgacggagtgggtaattcctcgggaaattggcattgcgattccacatggatgggcgacagagtcatcaccaccagcacccgaacctgggccctgcccacctacaacaaccacctctacaaacaaatttccagccaatcaggagcctcgaacgacaatcactactttggctacagcaccccttgggggtattttgacttcaacagattccactgccacttttcaccacgtgactggcaaagactcatcaacaacaactggggattccgacccaagagactcaacttcaagctctttaacattcaagtcaaagaggtcacgcagaatgacggtacgacgacgattgccaataaccttaccagcacggttcaggtgtttactgactcggagtaccagctcccgtacgtcctcggctcggcgcatcaaggatgcctcccgccgttcccagcagacgtcttcatggtgccacagtatggatacctcaccctgaacaacgggagtcaggcagtaggacgctcttcattttactgcctggagtactttccttctcagatgctgcgtaccggaaacaactttaccttcagctacacttttgaggacgttcctttccacagcggctacgctcacagccagagtctggaccgtctcatgaatcctctcatcgaccagtacctgtattacttgagcacaacaaacactccaagtggaaccaccacgcagtcaaggcttcagttttctcaggccggagcgagtgacattcgggaccagtctaggaactggcttcctggaccctgttaccgccagcagcgagtatcaaagacatctgcggataacaacaacagtgaatactcgtggactggagctaccaagtaccacctcaatggcagagactctctggtgaatccgggcccggccatggcaagccacaaggacaatgaagaaaagttttttcctcagagcggggttctcatctttgggaagcaaggctcagagaaaacaaatgtggacattgaaaaggtcatgattacagacgaagaggaaatcaggacaaccaatcccgtggctacggagcagtacggttctgtatctaccaacctccagagaggcaacagacaagcagctaccgcagatgtcaacacacaaggcgttcttccaggcatggtctggcaggacagagatgtgtaccttcaggggcccatctgggcaaagattccacacacggacggacattttcacccctctcccctcatgggtggattcggacttaaacaccctcctccacagattctcatcaagaacaccccggtacctgcgaatccttcgaccaccttcagtgcggcaaagtttgcttccttcatcacacagtactccacgggacaggtcagcgtggagatcgagtgggagctgcagaaggaaaacagcaaacgctggaatcccgaaattcagtacacttccaactacaacaagtctgttaatgtggactttactgtggacactaatggcgtgtattcagagcctcgccccattggcaccagatacctgactcgtaatctgtaa

SEQ ID NO: 287 - protein, 735 aa, Adeno-associated virus
MAADGYLPDWLEDTLSEGIRQWWKLKPGPPPPKPAERHKDDSRGLVLPGYKYLGPFNGLDKGEPVNEADAAALEHDKAYDRQLDSGDNPYLKYNHADAEFQERLKEDTSFGGNLGRAVFQAKKRVLEPLGLVGEPVKTAPGKKRPVEHSPVEPDSSSGTGKAGQQPARKRLNFGQTGDADSVPDPQPLGQPPAAPSGLGTNTMATGSGAPMADNNEGADGVGNSSGNWHCDSTWMGDRVITTSTRTWALPTYNNHLYKQISSQSGASNDNHYFGYSTPWGYFDFNRFHCHFSPRDWQRLINNNWGFRPKRLNFKLFNIQVKEVTQNDGTTTIANNLTSTVQVFTDSEYQLPYVLGSAHQGCLPPFPADVFMVPQYGYLTLNNGSQAVGRSSFYCLEYFPSQMLRTGNNFTFSYTFEDVPFHSGYAHSQSLDRLMNPLIDQYLYYLSTTNTPSGTTTQSRLQFSQAGASDIRDQSRNWLPGPCYRQQRVSKTSADNNNSEYSWTGATKYHLNGRDSLVNPGPAMASHKDNEEKFFPQSGVLIFGKQGSEKTNVDIEKVMITDEEEIRTTNPVATEQYGSVSTNLQRGNRQAATADVNTQGVLPGMVWQDRDVYLQGPIWAKIPHTDGHFHPSPLMGGFGLKHPPPQILIKNTPVPANPSTTFSAAKFASFITQYSTGQVSVEIEWELQKENSKRWNPEIQYTSNYNKSVNVDFTVDTNGVYSEPRPIGTRYLTRNL

SEQ ID NO: 288 - DNA, 2208 bp, Adeno-associated virus
atggctgccgatggttatcttccagattggctcgaggacactctctctgaaggaataagacagtggtggaagctcaaacctggcccaccaccaccaaagcccgcagagcggcataaggacgacagcaggggtcttgtgcttcctgggtacaagtacctcggacccttcaacggactcgacaagggagagccggtcaacgaggcagacgccgcggccctcgagcacgacaaagcctacgaccggcagctcgacagcggagacaacccgtacctcaagtacaaccacgccgacgcggagtttcaggagcgccttaaagaagatacgtcttttgggggcaacctcggacgagcagtcttccaggcgaaaaagagggttcttgaacctctgggcctggttggggaacctgttaagacggctccgggaaaaaagaggccggtagagcactctcctgtggagccagactcctcctcgggaaccggaaaggcgggccagcagcctgcaagaaaaagattgaattttggtcagactggagacgcagactcagtacctgacccccagcctctcggacagccaccagcagccccctctggtctgggaactaatacgatggctacaggcagtggcgcaccaatggcagacaataacgagggcgccgacggagtgggtaattcctcgggaaatcggcattgcgattccacatggatgggcgacagagtcatcaccaccagcacccgaacctgggccctgcccacctacaacaaccacctctacagacaaatttccagccaatcaggagcctcgaacgacaatcactactttggctacagcaccccttgggggtattttgacttcaacagattccactgccacttttcaccacgtgactggcaaagactcatcaacaacaactggggattccgacccaagagactcaacttcaagctctttaacattcaagtcaaagaggtcacgcagaatgacggtacgacgacgattgccaataaccttaccagcacggttcaggtgtttactgactcggagtaccagctcccgtacgtcctcggctcggcgcatcaaggatgcctcccgccgttcccagcagacgtcttcatggtgccacagtatggatacctcaccctgagcaacgggagtcaggcagtaggacgctcttcattttactgcccggagtactttccttctcagatgctgcgtaccggaaacaactttaccttcagctacacttttgaggacgttcctttccacagcagctacgctcacagccagagtctggaccgtctcatgaatcctctcatcgaccagtacctgtattacttgagcacaacaaacactccaagtggaaccaccacgcagtcaaggcttcagttttctcaggccggagcgagtgacattcgggaccagtctaggaactggcttcctggaccctgttaccgccagcagcgagtatcaaagacatctgcggataacaacaacagtgaatactcgtggactggagctaccaagtaccacctcaatggcagagactctctggtgaatccgggcccggccatggcaagccacaaggacaatgaagaaaagttttttcctcagagcggggttctcatctttgggaagcaaggctcagagaaaacaaatgtggacattgaaaaggtcatgattacagacgaagaggaaatcaggacaaccaatcccgtggctacggagcagtatggttctgtatctaccaacctccagagaggcaacagacaagcagctaccgcagatgtcaacacacaaggcgttcttccaggcatggtctggcaggacagagatgtgtaccttcaggggcccatctgggcaaagattccacacacggacggacattttcacccctctcccctcatgggtggattcggacctaaacaccctcctccacagattctcatcaagaacaccccggtacctgcgaatccttcgaccaccttcagtgcggcaaagtttgcttccttcatcacacagtactccacgggacaggtcagcgtggagatcgagtgggagctgcagaaggaaaacagcaaacgctggaatcccgaaattcagtacacttccaactacaacaagtctgttaatgtggactttactgtggacactaatggcgtgtattcagagcctcgccccattggcaccagatacctgactcgtaatttgtaa

SEQ ID NO: 289 - protein, 735 aa, Adeno-associated virus
MAADGYLPDWLEDTLSEGIRQWWKLKPGPPPPKPAERHKDDSRGLVLPGYKYLGPFNGLDKGEPVNEADAAALEHDKAYDRQLDSGDNPYLKYNHADAEFQERLKEDTSFGGNLGRAVFQAKKRVLEPLGLVGEPVKTAPGKKRPVEHSPVEPDSSSGTGKAGQQPARKRLNFGQTGDADSVPDPQPLGQPPAAPSGLGTNTMATGSGAPMADNNEGADGVGNSSGNRHCDSTWMGDRVITTSTRTWALPTYNNHLYRQISSQSGASNDNHYFGYSTPWGYFDFNRFHCHFSPRDWQRLINNNWGFRPKRLNFKLFNIQVKEVTQNDGTTTIANNLTSTVQVFTDSEYQLPYVLGSAHQGCLPPFPADVFMVPQYGYLTLSNGSQAVGRSSFYCPEYFPSQMLRTGNNFTFSYTFEDVPFHSSYAHSQSLDRLMNPLIDQYLYYLSTTNTPSGTTTQSRLQFSQAGASDIRDQSRNWLPGPCYRQQRVSKTSADNNNSEYSWTGATKYHLNGRDSLVNPGPAMASHKDNEEKFFPQSGVLIFGKQGSEKTNVDIEKVMITDEEEIRTTNPVATEQYGSVSTNLQRGNRQAATADVNTQGVLPGMVWQDRDVYLQGPIWAKIPHTDGHFHPSPLMGGFGPKHPPPQILIKNTPVPANPSTTFSAAKFASFITQYSTGQVSVEIEWELQKENSKRWNPEIQYTSNYNKSVNVDFTVDTNGVYSEPRPIGTRYLTRNL

SEQ ID NO: 290 - DNA, 2205 bp, Adeno-associated virus
atggctgccgatggttatcttccagattggctcgaggacactctctctgaaggaataagacagtggtggaagctcaaacctggcccaccaccaccaaagcccgcagagcggcataaggacgacagcaggggtcttgtgcttcctgggtacaagtacctcggacccttcaacggactcgacaagggagagccggtcaacgaggcagacgccgcggccctcgagcacgacaaggcctacgaccggcagctcgacagcggagacaacccgtacctcaagtacaaccacgccgacgcggagtttcaggagcgtcttaaagaagatacgtcttttgggggcaacctcggacgagcagtcttccaggcgaaaaagagggttcttgaacctctgggcctggttgaggaacctgttaagacggctccgggaaaaaagaggccggtagagcactctcctgcggagccagactcctcctcgggaaccggaaaagcgggccagcagcctgcaagaaaaagactgaatttcggtcagactggagacgcagactccgtacctgacccccagcctctcagacagccaccagcagcccccacaagtttgggatctactacaatggctacaggcagtggcgcaccaatggcagacaataacgagggtgccgatggagtgggtaattcctcaggaaattggcattgcgattcccaatggctgggcgacagagtcatcaccaccagcacccgaacctgggccctgcccacctacaacaaccacctttacaagcaaatctccagccaatcaggagcctcaaacgacaaccactactttggctacagcaccccctgggggtattttgacttcaacagattccactgccacttttcaccacgtgactggcaaagactcatcaacaacaactggggattccgacccaagagactcaacttcaagctctttaacattcaagtcaaagaggtcacgcagaatgacggtacgacgacgattgccaataaccttaccagcacggttcaggtgtttactgactcggagtaccagctcccgtacgtcctcggctcggcgcatcaaggatgcctcccgccgtttccagcggacgtcttcatggtcccacagtatggatacctcaccctgaacaacgggagtcaggcggtaggacgctcttccttttactgcctggagtactttccttctcagatgctgcgtactggaaacaactttcagttcagctacacttttgaagacgtgcctttccacagcagctacgctcacagccagagtttggatcggctgatgaatcctctgatcgaccagtacctgtattatctaaacagaacacaaacagctagtggaactcagcagtctcggctactgtttagccaagctggacccacaagcatgtctcttcaagctaaaaactggctgcctggaccgtgttatcgccagcagcgtttgtcaaagcaggcaaacgacaacaacaacagcaactttccctggactggagctaccaagtactacctcaatggcagagactctttggtgaacccgggcccggccatggccagccacaaggacgatgaagaaaagtttttccccatgcatggaaccctaatatttggtaaagaaggaacaaatgctaccaacgcggaattggaaaatgtcatgattacagatgaagaggaaatcaggaccaccaatcccgtggctacagagcagtacggatatgtgtcaaataatttgcaaaactcaaatactgctgcaagtactgaaactgtgaatcaccaaggagcattacctggtatggtgtggcaggatcgagacgtgtacctgcagggacccatttgggccaagattcctcacaccgatggacactttcatccttctccactgatgggaggttttggactcaaacacccgcctcctcagattatgatcaaaaacactcccgttccagccaatcctcccacaaacttcagttctgccaagtttgcttccttcatcacacagtattccacgggacaggtcagcgtggagatcgagtgggagctgcagaaggagaacagcaaacgctggaatcccgaaattcagtacacttccaactacaacaaatctgttaatgtggactttactgtggacactaatggtgtgtattcagagcctcgccccattggcaccagatacctgactcgtaatctgtaa

SEQ ID NO: 291 - protein, 734 aa, Adeno-associated virus
MAADGYLPDWLEDTLSEGIRQWWKLKPGPPPPKPAERHKDDSRGLVLPGYKYLGPFNGLDKGEPVNEADAAALEHDKAYDRQLDSGDNPYLKYNHADAEFQERLKEDTSFGGNLGRAVFQAKKRVLEPLGLVEEPVKTAPGKKRPVEHSPAEPDSSSGTGKAGQQPARKRLNFGQTGDADSVPDPQPLRQPPAAPTSLGSTTMATGSGAPMADNNEGADGVGNSSGNWHCDSQWLGDRVITTSTRTWALPTYNNHLYKQISSQSGASNDNHYFGYSTPWGYFDFNRFHCHFSPRDWQRLINNNWGFRPKRLNFKLFNIQVKEVTQNDGTTTIANNLTSTVQVFTDSEYQLPYVLGSAHQGCLPPFPADVFMVPQYGYLTLNNGSQAVGRSSFYCLEYFPSQMLRTGNNFQFSYTFEDVPFHSSYAHSQSLDRLMNPLIDQYLYYLNRTQTASGTQQSRLLFSQAGPTSMSLQAKNWLPGPCYRQQRLSKQANDNNNSNFPWTGATKYYLNGRDSLVNPGPAMASHKDDEEKFFPMHGTLIFGKEGTNATNAELENVMITDEEEIRTTNPVATEQYGYVSNNLQNSNTAASTETVNHQGALPGMVWQDRDVYLQGPIWAKIPHTDGHFHPSPLMGGFGLKHPPPQIMIKNTPVPANPPTNFSSAKFASFITQYSTGQVSVEIEWELQKENSKRWNPEIQYTSNYNKSVNVDFTVDTNGVYSEPRPIGTRYLTRNL

SEQ ID NO: 292 - DNA, 3160 bp, Adeno-associated virus
acccttcactaaagggactagtcctgcaggtttaaacgaattcgcccttgctgcgtcaactggaccaatgagaactttcccttcaacgactgtgtcgacaagatggtgatttggtgggaggaggggaagatgaccgccaaggtcgtggagtcggccaaagccattctcggaggaagcaaggtgcgcgtggaccagaaatgcaagtcctcggcccagatagatccgactcccgtgatcgtcacctccaacaccaacatgtgcgccgtgattgacgggaactcaacgaccttcgaacaccagcagccgttgcaagaccggatgttcaaatttgaactcacccgccgtctggatcatgactttgggaaggtcaccaagcgggaagtcaaagactttttccggtgggcaaaggatcacgtggttgaggtggagcatgaattctacgtcaaaaagggtggagccaagaaaagacccgcccctagtgacgcagatataagtgagcccaaacgggtgcgcgagtcagttgcgcagccatcgacgtcagacgcggaagcttcgatcaactacgcggacaggtaccaaaacaaatgttctcgtcacgtgggcatgaatctgatgctgtttccctgcagacaatgcgagagaatgaatcaaaattcaaatatctgcttcactcacggacagaaagactgtttagagtgctttcccgtgtcagaatctcaacctgtttctgtcgtcaaaaaggcgtatcagaaactgtgctacattcatcatatcatgggaaaggtgccagacgcttgcactgcctgcgatctggtcaatgtggatttggatgactgcatctctgaacaataaatgatttaaatcaggtatggctgccgatggttatcttccagattggctcgaggacactctctctgaaggaataagacagtggtggaagctcaaacctggcccaccaccaccaaagcccgcagagcggcataaggacgacagcaggggtcttgtgcttcctgggtacaagtacctcggacccttcaacggactcgacaagggagagccggtcaacgaggcagacgccgcggccctcgagcacgacaaggcctacgaccggcagctcgacagcggagacaacccgtacctcaagtacaaccacgccgacgcggagtttcaggagcgtcttaaagaagatacgtcttttgggggcaacctcggacgagcagtcttccaggcgaaaaagagggttcttgaacctctgggcctggttgaggaacctgttaagacggctccgggaaaaaagaggccggtagagcactctcctgcggagccagactcctcctcgggaaccggaaaagcgggccagcagcctgcaagaaaaagactgaatttcggtcagactggagacgcagactccgtacctgacccccagcctctcagacagccaccagcagcccccacaagtttgggatctactacaatggctacaggcagtggcgcaccaatggcagacaataacgagggtgccgatggagtgggtaattcctcaggaaattggcattgcgattcccaatggctgggcgacagagtcatcaccaccagcacccgaacctgggccctgcccacctacaacaaccacctttacaagcaaatctccagccaatcaggagcctcaaacgacaaccactactttggctacagcaccccctgggggtattttgacttcaacagattccactgccacttttcaccacgtgactggcaaagactcatcaacaacaactggggattccgacccaagagactcaacttcaagctctttaacattcaagtcaaagaggtcacgcagaatgacggtacgacgacgattgccaataaccttaccagcacggttcaggtgtttactgactcggagtaccagctcccgtacgtcctcggctcggcgcatcaaggatgcctcccgccgtttccagcggacgtcttcatggtcccacagtatggatacctcaccctgaacaacgggagtcaggcggtaggacgctcttccttttactgcctggagtactttccttctcagatgctgcgtactggaaacaactttcagttcagctacacttttgaagacgtgcctttccacagcagctacgctcacagccagagtttggatcggctgatgaatcctctgatcgaccagtacctgtattatctaaacagaacacaaacagctagtggaactcagcagtctcggctactgtttagccaagctggacccacaagcatgtctcttcaagctaaaaactggctgcctggaccgtgttatcgccagcagcgtttgtcaaagcaggcaaacgacaacaacaacagcaactttccctggactggagctaccaagtactacctcaatggcagagactctttggtgaacccgggcccggccatggccagccacaaggacgatgaagaaaagtttttccccatgcatggaaccctaatatttggtaaagaaggaacaaatgctaccaacgcggaattggaaaatgtcatgattacagatgaagaggaaatcaggaccaccaatcccgtggctacagagcagtacggatatgtgtcaaataatttgcaaaactcaaatactgctgcaagtactgaaactgtgaatcaccaaggagcattacctggtatggtgtggcaggatcgagacgtgtacctgcagggacccatttgggccaagattcctcacaccgatggacactttcatccttctccactgatgggaggttttggactcaaacacccgcctcctcagattatgatcaaaaacactcccgttccagccaatcctcccacaaacttcagttctgccaagtttgcttccttcatcacacagtattccacgggacaggtcagcgtggagatcgagtgggagctgcagaaggagaacagcaaacgctggaatcccgaaattcagtacacttccaactacaacaaatctgttaatgtggactttactgtggacactaatggtgtgtattcagagcctcgccccattggcaccagatacctgactcgtaatctgtaattgcttgttaatcaataaaccgtttaattcgtttcagttgaactttggtctctgcgaagggcgaattcgcggccgctaaatcaatcg

SEQ ID NO: 293 - protein, 734 aa, Adeno-associated virus
MAADGYLPDWLEDTLSEGIRQWWKLKPGPPPPKPAERHKDDSRGLVLPGYKYLGPFNGLDKGEPVNEADAAALEHDKAYDRQLDSGDNPYLKYNHADAEFQERLKEDTSFGGNLGRAVFQAKKRVLEPLGLVEEPVKTAPGKKRPVEHSPAEPDSSSGTGKAGQQPARKRLNFGQTGDADSVPDPQPLGQPPAAPTSLGSTTMATGSGAPMADNNEGADGVGNSSGNWHCDSQWLGDRVITTSTRTWALPTYNNHLYKQISSQSGASNDNHYFGYSTPWGYFDFNRFHCRFSPRDWQRLINNNWGFRPKRLNFKLFNIQVKEVTQNDGTTTIANNLTSTVQVFTDSEYQLPYVLGSAHQGCLPPFPADVFMVPQYGYLTLNNGSQAVGRSSFYCLEYFPSQMLRTGNNFQFSYTFEDVPFHSSYAHSQGLDRLMNPLIDQYLYYLNRTQTASGTQQSRLLFSQAGPTSMSLQAKNWLPGPCYRQQRLSKQANDNNNSNFPWTGATKYHLNGGDSLVNPGPAMASHKDDEEKFFPMHGTLIFGKEGTNATNAELENVMITDEEEIRTTNPVATEQYGYVSNNLQNSNTAASTETVNHQGALPGMVWQDRDVYLRGPIWAKIPHADGHFHPSPLMGGFGLKHPPPQIMIKNTPVPANPPTNFSSAKFASFITQYSTGQVSVEIEWELQKENSKRWNPEIQYTSNYNKSVNVDFTVDTNGVYSEPRPIGTRYLTRNL

SEQ ID NO: 294 - DNA, 3157 bp, Adeno-associated virus
ctcactaagggactagtcctgcaggtttaaacgaattcgcccttgctgcgtcaactggaccaatgagaactttcccttcaacgactgtgtcgacaagatggtgatttggtgggaggaggggaagatgaccgccaaggtcgtggagtcggccaaagccactctcggaggaagcaaggtgcgcgtggaccagaaacgcaagtcctcggcccagatagatccgactcccgtgatcgtcacctccaacaccaacatgtgcgccgtgattgacgggaactcaacgaccttcgaacaccagcagccgttgcaagaccgaatgttcaaatttgaactcacccgccgtctggatcatgacttcgggaaggtcaccaagcaggaagtcaaagactttttccggtgggcaaaggatcacgtggttgaggtggagcatgaattctacgtcaaaaagggtggagccaagaaaagacccgcccctagtgacgcagatataagtgagcccaaacgggtgcgcgagtcagttgcgcagccatcgacgtcagacgcggaagcttcgatcaactacgcggacaggtaccaaaacaaatgttctcgtcacgtgggcatgaatctgatgctgtttccctgcagacaatgcgagagaatgaatcaaaattcaaatatctgcttcactcacggacagaaagactgtttagagtgctttcccgtgtcagaatctcaacctgtttctgtcgtcaaaaaggcgtatcagaaactgtgctacattcatcatatcatgggaaaggtgccagacgcttgcactgcctgcgatctggtcaatgtggatttggatgactgcatctctgaacaataaatgatttaaatcaggtatggctgccgatggttatcttccagattggctcgaggacactctctctgaaggaataagacagtggtggaagctcaaacctggcccaccaccaccaaagcccgcagagcggcataaggacgacagcaggggtcttgtgcttcctgggtacaagtacctcggacccttcaacggactcgacaagggagagccggtcaacgaggcagacgccgcggctctcgagcacgacaaggcctacgaccggcagctcgacagcggagacaacccgtacctcaagtacaaccacgccgacgcggagtttcaggagcgtcttaaagaagatacgtcttttgggggcaacctcggacgagcagtcttccaggcgaaaaagagggttcttgaacctctgggcctggttgaggaacctgttaagacggctccgggaaaaaagaggccggtagagcactctcctgcggagccagactcctcctcgggaaccggaaaagcgggccagcagcctgcaagaaaaagactgaatttcggtcagactggagacgcagactccgtacctgacccccagcctctcggacagccaccagcagcccccacaagtttgggatctactacaatggctacaggcagtggcgcaccaatggcagacaataacgagggtgccgatggagtgggtaattcctcaggaaattggcattgcgattcccaatggctgggcgacagagtcatcaccaccagcacccgaacctgggccctgcccacctacaacaaccacctttacaagcaaatctccagccaatcaggagcctcaaacgacaaccactactttggctacagcaccccctgggggtattttgacttcaacagattccactgccgcttttcaccacgtgactggcaaagactcatcaacaacaactggggattccgacccaagagactcaacttcaagctctttaacattcaagtcaaagaggtcacgcagaatgacggtacgacgacgattgccaataaccttaccagcacggttcaggtgtttactgactcggagtaccagctcccgtacgtcctcggctcggcgcatcaaggatgcctcccgccgtttccagcggacgtcttcatggtcccacagtatggatacctcaccctgaacaacgggagtcaggcggtaggacgctcttccttttactgcctggagtactttccttctcagatgctgcgtactggaaacaactttcagttcagctacacttttgaagacgtgcctttccacagcagctacgctcacagccagggtttggatcggctgatgaatcctctgatcgaccagtacctgtattatctaaacagaacacaaacagctagtggaactcagcagtctcggctactgtttagccaagctggacccacaagcatgtctcttcaagctaaaaactggctgcctggaccgtgttatcgccagcagcgtttgtcaaagcaggcaaacgacaacaacaacagcaactttccctggactggagctaccaagtaccacctcaatggcggagactctttggtgaacccgggcccggccatggccagccacaaggacgatgaagaaaagtttttccccatgcatggaaccctaatatttggtaaagaaggaacaaatgctaccaacgcggaattggaaaatgtcatgattacagatgaagaggaaatcaggaccaccaatcccgtggctacagagcagtacggatatgtgtcaaataatttgcaaaactcaaatactgctgcaagtactgaaactgtgaatcaccaaggagcattacctggtatggtgtggcaggatcgagacgtgtacctgcggggacccatttgggccaagattcctcacgccgatggacactttcatccttctccactgatgggaggttttggactcaaacacccgcctcctcagattatgatcaaaaacactcccgttccagccaatcctcccacaaacttcagttctgccaagtttgcttccttcatcacacagtattccacgggacaggtcagcgtggagatcgagtgggagctgcagaaggagaacagcaaacgctggaatcccgaaattcagtacacttccaactacaacaaatctgttaatgtggactttactgtggacactaatggtgtgtattcagagcctcgccccattggcaccagatacctgactcgtaatctgtaattgcttgttaatcaataaaccgtttaattcgtttcagttgaactttggtctctgcgaagggcgaattcgcggccgctaaattcaattcg

SEQ ID NO: 295 - protein, 734 aa, Adeno-associated virus
MAADGYLPDWLEDTLSEGIRQWWKLKPGPPPPKPAERHKDDSRGLVLPGYKYLGPFNGLDKGEPVNEADAAALEHDKAYDRQLDSGDNPYLKYNHADAEFQERLKEDTSFGGNLGRAVFQAKKRVLEPLGLVEEPVKTAPGKKRPVEHSPAEPDSSSGTGKAGQQPARKRLNFGQTGDADSVPDPQPLGQPPAAPTSLGSTTMATGSGAPMADNNEGADGVGNSSGNWHCDSQWLGDRVITTSTRTWALPTYNNHLYKQISSQSGASNDNHYFGYSTPWGYFDFNRFHCHFSPRDWQRLINNNWGFRPKRLNFKLFNIQVKEVTQNDGTTTIANNLTSTVQVFTDSEYQLPYVLGSAHQGCLPPFPADVFMVPQYGYLTLNNGSQAVGRSSFYCLECFPSQMLRTGNNFQFSYTFEDVPFHSSYAHSQSLDRLMNPLIDQYLYYLNRTQTASGTQQSRLLFSQAGPTSMSLQAKNWLPGPCYRQQRLSKQANDNNNSNFPWTGATKYHLNGRDSLVNPGPAMASHKDDEEKFFPMHGTLIFGKEGTNATNAELENVMITDEEEIRTTNPVATEQYGYVSNNLQNSNTAASTETVNHQGALPGMVWQDRDVYLQGPIWAKIPHTDGHFHPSPLMGGFGLKHPPPQIMIKNTPVPANPPTNFSSAKFASFITQYSTGQVSVEIEWELQKENSKRWNPEIQYTSNYNKSVNVDFTVDTNGVYSEPRPIGTRYLTRNL

SEQ ID NO: 296 - DNA, 2208 bp, Adeno-associated virus
atggctgccgatggttatcttccagattggctcgaggacactctctctgaaggaataagacagtggtggaagctcaaacctggcccaccaccaccaaagcccgcagagcggcataaggacgacagcaggggtcttgtgcttcctggatacaagtacctcggacccttcaacggactcgacaagggagagccggtcaacgaggcagacgccgcggccctcgagcacgacaaggcctacgaccggcagctcgacagcggagacaacccgtacctcaagtacaaccacgccgacgcggagtttcaggagcgccttaaagaagatacgtcttttgggggcaacctcggacgagcagtcttccaggcgaaaaagagggttcttgaacctctgggcctggttgaggaacctgttaagacggctccgggaaaaaagaggccggtagagcactctcctgtggagccagactcctcctcgggaaccggaaaagcgggcaaccagcctgcaagaaaaagattgaatttcggtcagactggagacgcagactccgtacctgacccccagcctctcggacagccaccagcatccccctctggtctgggaactaatacgatggctacaggcagtggcgcaccaatggcagacaataacgagggcgccgacggagtgggtaattcctcgggaaattggcattgcgattccacatggatgggcgacagagtcgtcaccaccagcacccgcacctgggccctgcccacctacaacaaccacctctacaagcagatttccagccaatcaggagccagcaacgacaaccactactttggctacagcaccccttgggggtattttgacttcaacagattccactgccacttttcgccacgcgactggcagagactcatcaacaacaactggggattccggcccaaaagactcaacttcaagctgtttaacattcaagtcaaggaggtcacgcagaatgacggtacgacgacgattgccaataaccttaccagcacggttcaggtgtttactgacttggagtaccagctcccgtacgtcctcggctcggcgcatcaaggatgcctcccgccgttcccagcagacgtcttcatggtgccacagtatggatacctcaccctgaacaacgggagtcaggcggtaggacgctcttccttttactgcctggagtactttccttctcagatgcttcgcaccggaaacaactttaccttcagctacacttttgaagacgttcctttccacagcagctacgctcacagtcaaagtctggaccgtctcatgaatcctctcatcgaccagtacctgtattacttgagcagaacaaacactccaagcggaaccactacgcagtccaggcttcagttttctcaggccggagcgagtgacattcgggaccagtctaggaactggcttcctggaccctgttaccgccagcagcgagtatcaaagacagctgcggataacaacaacagtgaatactcgtggactggagctaccaagtaccacctcaatggcagagactctctggtgaatccgggcccggccatggccagccacaaggacgatgaagaaaagttttttcctcaaagcggggttctcatctttgggaagcaaggctcagagaaaacaaatgtggacattgaaaaggtcatgattacagacgaagaggaaatcaggaccaccaatcccgtggctacggagcagtatggttctgtatctaccaacctccagagcggcaacacacaagcagctacctcagatgtcaacacacaaggcgttcttccaggcatggtctggcaggacagagacgtgtacctgcaggggcccatctgggcaaaaattccacacacggacggacattttcacccctctcccctcatgggcggatttggacttaaacaccctcctccacagattctcattaagaataccccggtacctgcgaatccttcgaccaccttcagcgcggcaaagtttgcttccttcatcacacagtattccacggggcaggtcagcgtggagatcgagtgggagctgcagaaggagaacagcaaacgctggaatcccgaaattcagtacacttccaactacaacaaatctgttaatgtggactttactgtggacactaatggggtgtattcagagcctcgccctattggcaccagatacctgactcgtaatctgtaa

SEQ ID NO: 297 - DNA, 3159 bp, Adeno-associated virus
gattgatttagcggccgcgaattcgcccttgctgcgtcaactggaccaatgagaactttcccttcaacgattgcgtcgacaagatggtgatctggtgggaggagggaaagatgaccgccaaggtcgtggagtcggccaaagccattctcggaggaagcaaggtgcgtgtggaccaaaagtgcaagtcttcggcccagatcgacccgactcccgtgatcgtcacctccaacaccaacatgtgcgccgtgattgatggaaactcaacgaccttcgagcaccagcagccgttgcaagaccggatgttcaaatttgaacttacccgccgtctggatcatgactttggaaaggtcaccaagcaggaagtgaaagactttttccggtgggcaaaggatcacgtggttgaggtggagcatgagttctacgtcaaaaagggtggagccaaaaaaagacccgcccccagtgacgcagatataagtgagcccaaacgggcgcgcgagtcagttgcgcagccatcgacgtcagacgcggaagcttcgatcaactacgcggacaggtaccaaaacaaatgttctcgtcacgtgggcatgaatctgatgctgtttccctgcagacaatgcgagagaatgaatcagaattcaaatatctgcttcactcacggacagaaagactgtccatagtgctttcccgtgtcagaatctcaacccgtttctgtcgtcaaaaaggcgtatcagaaactgtgctacattcatcacatcatgggaaaggtgccagacgcttgcactgcttgcgacctggtcaatgtggatttggatgactgcatctctgaacaataaatgatttaaatcaggtatggctgccgatggttatcttccagattggctcgaggacactctctctgaaggaataagacagtggtggaagctcaaacctggcccaccaccaccaaagcccgcagagcggcataaggacgacagcaggggtcttgtgcttcctggatacaagtacctcggacccttcaacggactcgacaagggagagccggtcaacgaggcagacgccgcggccctcgagcacgacaaggcctacgaccggcagctcgacagcggagacaacccgtacctcaagtacaaccacgccgacgcggagtttcaggagcgccttaaagaagatacgtcttttgggggcaacctcggacgagcagtcttccaggcgaaaaagagggttcttgaacctctgggcctggttgaggaacctgttaagacggctccgggaaaaaagaggccggtagagcactctcctgtggagccagactcctcctcgggaaccggaaaagcgggcaaccagcctgcaagaaaaagattgaatttcggtcagactggagacgcagactccgtacctgacccccagcctctcggacagccaccagcatccccctctggtctgggaactaatacgatggctacaggcagtggcgcaccaatggcagacaataacgagggcgccgacggagtgggtaattcctcgggaaattggcattgcgattccacatggatgggcgacagagtcgtcaccaccagcacccgcacctgggccctgcccacctacaacaaccacctctacaagcagatttccagccaatcaggagccagcaacgacaaccactactttggctacagcaccccttgggggtattttgacttcaacagattccactgccacttttcgccacgcgactggcagagactcatcaacaacaactggggattccggcccaaaagactcaacttcaagctgtttaacattcaagtcaaggaggtcacgcagaatgacggtacgacgacgattgccaataaccttaccagcacggttcaggtgtttactgacttggagtaccagctcccgtacgtcctcggctcggcgcatcaaggatgcctcccgccgttcccagcagacgtcttcatggtgccacagtatggatacctcaccctgaacaacgggagtcaggcggtaggacgctcttccttttactgcctggagtactttccttctcagatgcttcgcaccggaaacaactttaccttcagctacacttttgaagacgttcctttccacagcagctacgctcacagtcaaagtctggaccgtctcatgaatcctctcatcgaccagtacctgtattacttgagcagaacaaacactccaagcggaaccactacgcagtccaggcttcagttttctcaggccggagcgagtgacattcgggaccagtctaggaactggcttcctggaccctgttaccgccagcagcgagtatcaaagacagctgcggataacaacaacagtgaatactcgtggactggagctaccaagtaccacctcaatggcagagactctctggtgaatccgggcccggccatggccagccacaaggacgatgaagaaaagttttttcctcaaagcggggttctcatctttgggaagcaaggctcagagaaaacaaatgtggacattgaaaaggtcatgattacagacgaagaggaaatcaggaccaccaatcccgtggctacggagcagtatggttctgtatctaccaacctccagagcggcaacacacaagcagctacctcagatgtcaacacacaaggcgttcttccaggcatggtctggcaggacagagacgtgtacctgcaggggcccatctgggcaaaaattccacacacggacggacattttcacccctctcccctcatgggcggatttggacttaaacaccctcctccacagattctcattaagaataccccggtacctgcgaatccttcgaccaccttcagcgcggcaaagtttgcttccttcatcacacagtattccacggggcaggtcagcgtggagatcgagtgggagctgcagaaggagaacagcaaacgctggaatcccgaaattcagtacacttccaactacaacaaatctgttaatgtggactttactgtggacactaatggggtgtattcagagcctcgccctattggcaccagatacctgactcgtaatctgtaattgcttgttaatcaataaaccgtttaattcgtttcagttgaactttggtctctgcgaagggcgaattcgtttaaacctgcaggactagtccctttagtgagg

SEQ ID NO: 298 - protein, 735 aa, Adeno-associated virus
MAADGYLPDWLEDTLSEGIRQWWKLKPGPPPPKPAERHKDDSRGLVLPGYKYLGPFNGLDKGEPVNEADAAALEHDKAYDRQLDSGDNPYLKYNHADAEFQERLKEDTSFGGNLGRAVFQAKKRVLEPLGLVEEPVKTAPGKKRPVEHSPVEPDSSSGTGKAGNQPARKRLNFGQTGDADSVPDPQPLGQPPASPSGLGTNTMATGSGAPMADNNEGADGVGNSSGNWHCDSTWMGDRVVTTSTRTWALPTYNNHLYKQISSQSGASNDNHYFGYSTPWGYFDFNRFHCHFSPRDWQRLINNNWGFRPKRLNFKLFNIQVKEVTQNDGTTTIANNLTSTVQVFTDLEYQLPYVLGSAHQGCLPPFPADVFMVPQYGYLTLNNGSQAVGRSSFYCLEYFPSQMLRTGNNFTFSYTFEDVPFHSSYAHSQSLDRLMNPLIDQYLYYLSRTNTPSGTTTQSRLQFSQAGASDIRDQSRNWLPGPCYRQQRVSKTAADNNNSEYSWTGATKYHLNGRDSLVNPGPAMASHKDDEEKFFPQSGVLIFGKQGSEKTNVDIEKVMITDEEEIRTTNPVATEQYGSVSTNLQSGNTQAATSDVNTQGVLPGMVWQDRDVYLQGPIWAKIPHTDGHFHPSPLMGGFGLKHPPPQILIKNTPVPANPSTTFSAAKFASFITQYSTGQVSVEIEWELQKENSKRWNPEIQYTSNYNKSVNVDFTVDTNGVYSEPRPIGTRYLTRNL

SEQ ID NO: 299 - DNA, 2205 bp, Adeno-associated virus
atggctgccgatggttatcttccagattggctcgaggacactctctctgaaggaataagacagtggtggaagctcaaacctggcccaccaccaaagcccgcagagcggcataaggacgacagcaggggtcttgtgcttcctggatacaagtacctcggacccttcaacggactcgacaagggagagccggtcaacgaggcagacgccgcggccctcgagcacgacaaggcctacgaccggcagctcgacagcggagacaacccgtacctcaagtacaaccacgccgacgcggagtttcaggagcgccttaaagaagatacgtcttttgggggcaacctcggacgagcagtcttccaggcgaaaaagagggttcttgaacctctgggcctggttgaggaacctgttaagacggctccgggaaaaaagaggcccgtagagcactctcctgtggagccagactcctcctcgggaaccggaaaagcgggcaaccagcctgcaagaaaaagattgaatttcggtcagactggagacgcagactccgtacctgacccccagcctctcggacagccaccagcagccccctctggtctgggaactaatacgatggctacaggcagtggcgcaccaatggcagacaataacgagggcgccgacggagtgggtaattcctcgggagattggcattgcgattccacatggatgggcgacagagtcatcaccaccagcacccgcacctgggccctgcccacctacaacaaccacctctacaagcagatttccagccaatcaggagccagcaatgacaaccactactttggctacagcaccccttgggggtattttgacttcaacagattccactgccacttttcgccacgcgactggcagagactcatcaacaacaactggggattccggcccaaaagactcaacctcaagctgtttaacattcaagtcaaggaggtcacgcagaatgacggtacgacgacgattgccaataaccttaccagcacggttcaggtgtttactgacttggagtaccagctcccgtacgtcctcggctcggcgcatcaaggatgcctcccgccgttcccagcagacgtcttcatggtgccacagtatggatacctcaccctgaacaacgggagtcaggcggtaggacgctcttccttttactgcctggagtactttccttctcagatgcttcgtaccggaaacaactttaccttcagctacacttttgaagacgttcctttccacagcagctacgctcacagtcaaagtctggaccgtctcatgaatcctctcatcgaccagtacctgtattacttgagcagaacaaacactccaagcggaaccactacgcagtccaggcttcagttttctcaggccggagcgagtgacattcgggaccagtctaggaactggcttcctggaccctgttaccgccagcagcgagtatcaaagacagctgcggataacaacaacggtgaatactcgtggactggagctaccaagtaccacctcaatggcagagactctctggtgaatccgggcccggccatggccagccacaaggacgatgaagaaaagttttttcctcaaagcggggttctcatctttgggaagcaaggctcagagaaaacaaatgtggacattgaaaaggtcatgattacagacgaagaggaaatcaggaccaccaatcccgtggctacggagcagtatggttctgtatctaccaacctccagagcggcaacacacgagcagctacctcagatgtcaacacacaaggcgttcttccaggcatggtctggcaggacagagacgtgtacctgcaggggcccatctgggcaaaaattccacacacggacggacattttcacccctctcccctcatgggcggatttggacttaaacaccctcctccacagattctcattaagaataccccggtacctgcgaatccttcgaccaccttcagcgcggcaaagtttgcttccttcatcacacagtattccacggggcaggtcagcgtggagatcgagtgggagctgcagaaggagaacagcaaacgctggaatcccgaaattcagtacacttccaactacaacaaatctgttaatgtggactttactgtggacactaatggggtgtattcagagcctcgccctattggcaccagatacctgactcgtaatctgtaa

SEQ ID NO: 300 - DNA, 3156 bp, Adeno-associated virus
cgattgaatttagcggccgcgaattcgcccttgctgcgtcaacggaccaatgagaactttcccttcaacgattgcgtcgacaagatggtgatctggtgggaggagggaaagatgaccgccaaggtcgtggagtcggccaaagccattctcggaggaagcaaggtgcgtgtggaccaaaagtgcaagtcttcggcccagatcgacccgactcccgtgatcgtcacctccaacaccaacatgtgcgccgtgattgatggaaactcaacgaccttcgagcaccagcagccgttgcaagaccggatgttcaaatttgaacttacccgccgtctggatcatgactttggaaaggtcaccaagcaggaagtgaaagactttttccggtgggcaaaggatcacgtggttgaggtggagcatgagttctacgtcaaaaagggtggagccaaaaaaagacccgcccccagtgacgcagatataagtgagcccaaacgggcgcgcgagtcagttgcgcagccatcgacgtcagacgcggaagcttcgatcaactacgcggacaggtaccaaaacaaatgttctcgtcacgtgggcatgaatctgatgctgtttccctgcagacaatgcgagcgaatgaatcagaattcaaatatctgcttcactcacggacagaaagactgtttagagtgctttcccgtgtcagaatctcaacccgtttctgtcgtcaaaaaggcgtatcagaaactgtgctacattcatcacatcatgggaaaggtgccagacgcttgcactgcttgcgacctggtcaatgtggatttggatgactgcatctctgaacaataaatgatttaaatcaggtatggctgccgatggttatcttccagattggctcgaggacactctctctgaaggaataagacagtggtggaagctcaaacctggcccaccaccaaagcccgcagagcggcataaggacgacagcaggggtcttgtgcttcctggatacaagtacctcggacccttcaacggactcgacaagggagagccggtcaacgaggcagacgccgcggccctcgagcacgacaaggcctacgaccggcagctcgacagcggagacaacccgtacctcaagtacaaccacgccgacgcggagtttcaggagcgccttaaagaagatacgtcttttgggggcaacctcggacgagcagtcttccaggcgaaaaagagggttcttgaacctctgggcctggttgaggaacctgttaagacggctccgggaaaaaagaggcccgtagagcactctcctgtggagccagactcctcctcgggaaccggaaaagcgggcaaccagcctgcaagaaaaagattgaatttcggtcagactggagacgcagactccgtacctgacccccagcctctcggacagccaccagcagccccctctggtctgggaactaatacgatggctacaggcagtggcgcaccaatggcagacaataacgagggcgccgacggagtgggtaattcctcgggagattggcattgcgattccacatggatgggcgacagagtcatcaccaccagcacccgcacctgggccctgcccacctacaacaaccacctctacaagcagatttccagccaatcaggagccagcaatgacaaccactactttggctacagcaccccttgggggtattttgacttcaacagattccactgccacttttcgccacgcgactggcagagactcatcaacaacaactggggattccggcccaaaagactcaacctcaagctgtttaacattcaagtcaaggaggtcacgcagaatgacggtacgacgacgattgccaataaccttaccagcacggttcaggtgtttactgacttggagtaccagctcccgtacgtcctcggctcggcgcatcaaggatgcctcccgccgttcccagcagacgtcttcatggtgccacagtatggatacctcaccctgaacaacgggagtcaggcggtaggacgctcttccttttactgcctggagtactttccttctcagatgcttcgtaccggaaacaactttaccttcagctacacttttgaagacgttcctttccacagcagctacgctcacagtcaaagtctggaccgtctcatgaatcctctcatcgaccagtacctgtattacttgagcagaacaaacactccaagcggaaccactacgcagtccaggcttcagttttctcaggccggagcgagtgacattcgggaccagtctaggaactggcttcctggaccctgttaccgccagcagcgagtatcaaagacagctgcggataacaacaacggtgaatactcgtggactggagctaccaagtaccacctcaatggcagagactctctggtgaatccgggcccggccatggccagccacaaggacgatgaagaaaagttttttcctcaaagcggggttctcatctttgggaagcaaggctcagagaaaacaaatgtggacattgaaaaggtcatgattacagacgaagaggaaatcaggaccaccaatcccgtggctacggagcagtatggttctgtatctaccaacctccagagcggcaacacacgagcagctacctcagatgtcaacacacaaggcgttcttccaggcatggtctggcaggacagagacgtgtacctgcaggggcccatctgggcaaaaattccacacacggacggacattttcacccctctcccctcatgggcggatttggacttaaacaccctcctccacagattctcattaagaataccccggtacctgcgaatccttcgaccaccttcagcgcggcaaagtttgcttccttcatcacacagtattccacggggcaggtcagcgtggagatcgagtgggagctgcagaaggagaacagcaaacgctggaatcccgaaattcagtacacttccaactacaacaaatctgttaatgtggactttactgtggacactaatggggtgtattcagagcctcgccctattggcaccagatacctgactcgtaatctgtaattgcttgttaatcaataaaccgtttaattcgtttcagttgaactttggtctctgcgaagggcgaattcgtttaaacctgcaggactagtccctttagtgag

SEQ ID NO: 301 - protein, 734 aa, Adeno-associated virus
MAADGYLPDWLEDTLSEGIRQWWKLKPGPPPKPAERHKDDSRGLVLPGYKYLGPFNGLDKGEPVNEADAAALEHDKAYDRQLDSGDNPYLKYNHADAEFQERLKEDTSFGGNLGRAVFQAKKRVLEPLGLVEEPVKTAPGKKRPVEHSPVEPDSSSGTGKAGNQPARKRLNFGQTGDADSVPDPQPLGQPPAAPSGLGTNTMATGSGAPMADNNEGADGVGNSSGDWHCDSTWMGDRVITTSTRTWALPTYNNHLYKQISSQSGASNDNHYFGYSTPWGYFDFNRFHCHFSPRDWQRLINNNWGFRPKRLNLKLFNIQVKEVTQNDGTTTIANNLTSTVQVFTDLEYQLPYVLGSAHQGCLPPFPADVFMVPQYGYLTLNNGSQAVGRSSFYCLEYFPSQMLRTGNNFTFSYTFEDVPFHSSYAHSQSLDRLMNPLIDQYLYYLSRTNTPSGTTTQSRLQFSQAGASDIRDQSRNWLPGPCYRQQRVSKTAADNNNGEYSWTGATKYHLNGRDSLVNPGPAMASHKDDEEKFFPQSGVLIFGKQGSEKTNVDIEKVMITDEEEIRTTNPVATEQYGSVSTNLQSGNTRAATSDVNTQGVLPGMVWQDRDVYLQGPIWAKIPHTDGHFHPSPLMGGFGLKHPPPQILIKNTPVPANPSTTFSAAKFASFITQYSTGQVSVEIEWELQKENSKRWNPEIQYTSNYNKSVNVDFTVDTNGVYSEPRPIGTRYLTRNL

SEQ ID NO: 302 - DNA, 2208 bp, Adeno-associated virus
atggctgccgatggttatcttccagattggctcgaggacactctctctgaaggaataagacagtggtggaagctcaaacctggcccaccaccaccaaagcccgcagagcggcataaggacgacagcaggggtcttgtgcttcctgggtacaagtacctcggacccttcaacggactcgacaagggagagccggtcaacgaggcagacgccgcggccctcgagcacgacaaggcctacgaccggcagctcgacagcggagacaacccgtacctcaagtacgaccacgccgacgcggagtttcaggagcgccttaaagaagatacgtcttttgggggcaacctcggacgagcagtcttccaggcaaaaaagagggttcttgaacctctgggcctggttgaggagcctgttaagacggctccgggaaaaaagaggccggtagagcactctcctgtggagccagactcctcctcgggaaccggaaaagcgggcaaccagcctgcaagaaagagattgaatttcggtcagactggagacgcagactccgtacctgacccccagcctctcggacagccaccagcagccccctctggtctgggaactaatacgatggctacaggcagtggcgcaccaatggcagacaataacgatggcgccgacggagtgggtaattcctcgggaaattggcattgcgattccacatggatgggcgacagagtcatcaccaccagcacccgaacctgggctctgcccacctacaacaaccatctgtacaagcagatttccagccaatcaggagccagcaacgacaaccactactttggctacagcaccccttgggggtattttgacttcaacagattccactgccacttttcaccacgtgactggcaaagactcatcaacaacaactggggattccggcccaagagactcaacttcaagctctttaacattcaagtcagagaggtcacgcagaatgatggtacgacgacgattgccaataaccttaccagcacggttcaggtgtttactgactcggagtaccagctcccgtacgtcctcggctcggcgcatcaaggatgcctcccgccgttcccagcagacgtcttcatggtgccacagtatggatacctcaccctgaacaacgggagtcaggcagtaggacgctcttcattttactgcctggagtacttcccttctcagatgctgcgtaccggaaacaactttaccttcagctacacctttgaggatgttcctttccacagcagctacgctcacagccagagtttggaccgtctcatgaatcctctcatcgaccagtacctgtattacttgagcagaacaaacactccaagcggaaccaccacgcagtccaggcttcagttttctcaggccggagcgagtgacattcgggatcagtctaggaactggcttcctggaccctgttaccgccagcagcgagtatcaaagacatctgcggacaacaacaacagtgaatactcgtggattggagctaccaagtaccacctcaatggcagagactctctggtgaatccgggcccggcaatggccagccacaaggacgatgaagaaaagttttttcctcagagcggggttctcatctttggaaaacaaggatcagagaaaacaaatgtggacattgaaaaggtcatgattacagacgaagaggaaatcagaaccaccaatcccgtggccacggagcagtatggttctgtatctaccaacctccagagcggcaacacacaagcatctactgcagatgtcaacacacaaggcgttcttccaggcatggtctggcaggacagagacgtgtacctgcaggggcctatctgggcaaagattccgcacacggacggacattttcacccctctcccctcatgggcggattcggacttaaacaccctcctccacagattctcatcaaaaacaccccggtacctgcgaatccttcgaccaccttcagtgcggcaaagtttgcttccttcatcacacagtattccacggggcgggtcagcgtggagatcgagtgggagctacagaaggagaacagcaaacgctggaatcccgagatccagtacacttccaactacaacaaatctgttaatgtggactttactgtggacactaatggtgtgtattcagagcctcgccccattggcaccagatacctgactcgtaatctgtaa

SEQ ID NO: 303 - protein, 735 aa, Adeno-associated virus
MAADGYLPDWLEDTLSEGIRQWWKLKPGPPPPKPAERHKDDSRGLVLPGYKYLGPFNGLDKGEPVNEADAAALEHDKAYDRQLDSGDNPYLKYDHADAEFQERLKEDTSFGGNLGRAVFQAKKRVLEPLGLVEEPVKTAPGKKRPVEHSPVEPDSSSGTGKAGNQPARKRLNFGQTGDADSVPDPQPLGQPPAAPSGLGTNTMATGSGAPMADNNDGADGVGNSSGNWHCDSTWMGDRVITTSTRTWALPTYNNHLYKQISSQSGASNDNHYFGYSTPWGYFDFNRFHCHFSPRDWQRLINNNWGFRPKRLNFKLFNIQVREVTQNDGTTTIANNLTSTVQVFTDSEYQLPYVLGSAHQGCLPPFPADVFMVPQYGYLTLNNGSQAVGRSSFYCLEYFPSQMLRTGNNFTFSYTFEDVPFHSSYAHSQSLDRLMNPLIDQYLYYLSRTNTPSGTTTQSRLQFSQAGASDIRDQSRNWLPGPCYRQQRVSKTSADNNNSEYSWIGATKYHLNGRDSLVNPGPAMASHKDDEEKFFPQSGVLIFGKQGSEKTNVDIEKVMITDEEEIRTTNPVATEQYGSVSTNLQSGNTQASTADVNTQGVLPGMVWQDRDVYLQGPIWAKIPHTDGHFHPSPLMGGFGLKHPPPQILIKNTPVPANPSTTFSAAKFASFITQYSTGRVSVEIEWELQKENSKRWNPEIQYTSNYNKSVNVDFTVDTNGVYSEPRPIGTRYLTRNL

SEQ ID NO: 304 - DNA, 2217 bp, Adeno-associated virus
atggctgccgatggttatcttccagattggctcgaggacaacctctctgagggcattcgcgagtggtgggacttgaaacctggagccccgaaacccaaagccaaccagcaaaagcaggacgacggccggggtctggtgcttcctggctacaagtacctcggacccttcaacggactcgacaagggggagcccgtcaacgcggcggacgcagcggccctcgagcacgacaaggcctacgaccagcagctcaaagcgggtgacaatccgtacctgcggtataaccacgccgacgccgagtttcaggagcgtctgcaagaagatacgtcttttgggggcaacctcgggcgagcagtcttccaggccaagaagcgggttctcgaacctctcggtctggttgaggaaggcgctaagacggctcctggaaagaagagaccggtagagccatcaccccagcgttctccagactcctctacgggcatcggcaagacaggccagcagcccgcgaaaaagagactcaactttgggcagactggcgactcagagtcagtgcccgaccctcaaccaatcggagaaccccccgcaggcccctctggtctgggatctggtacaatggctgcaggcggtggcgctccaatggcagacaataacgaaggcgccgacggagtgggtagttcctcaggaaattggcattgcgattccgcatggctgggcgacagagtcatcaccaccagcacccgaccctgggccctccccacctacaacaaccacctctacaagcaaatctccaacgggacatcgggaggaagcaccaacgacaacacctacttcggctacagcaccccctgggggtattttgactttaacagattccactgccacttctcaccacgtgactggcagcgactcatcaacaacaactggggattccggcccaagagactcaacttcaagctcttcaacatccaggtcaaggaggtcacgcagaatgaaggcaccaagaccatcgccaataaccttaccagcacgattcaggtctttacggactcggaataccagctcccgtacgtcctcggctctgcgcaccagggctgcccgcctccgttcccggcggacgtcttcatgattcctcagtacgggtacctgactctgaacaacggcagtcaggccgtgggccgttcctccttctactgcctggagtactttccttctcaaatgcggagaacgggcaacaactttgagttcagctaccagtttgaggacgtgccttttcacagcagctacgcgcatagccaaagcctggaccggctgatgaaccccctcatcgaccagtacctgtactacctgtctcggactcagtccacgggaggtaccgcaggaactcagcagttgctattttctcaggccgggcctaataacatgtcggctcaggccaaaaactggctacccgggccctgctaccggcagcaacgcgtctccacgacactgtcgcaaaataacaacagcaactttgcttggaccggtgccaccaagtatcatctgaatggcagagactctctggtaaatcccggtgtcgctatggcaacgcacaaggacgacgaagagcgattttttccatccagcggagtcttgatgtttgggaaacagggagctggaaaagacaacgtggactatagcagcgttatgctaaccagtgaggaagaaatcaaaaccaccaacccagtggccacagaacagtacggcgtggtggccgataacctgcaacagcaaaacgccgctcctattgtaggggccgtcaacagtcaaggagccttacctggcatggtctggcagaaccgggacgtgtacctgcagggtcctatctgggccaagattcctcacacggacggcaactttcatccttcgccgctgatgggaggctttggactgaaacacccgcctcctcagatcctgattaagaatacacctgttcccgcggatcctccaactaccttcagtcaagccaagctggcgtcgttcatcacgcagtacagcaccggacaggtcagcgtggaaattgaatgggagctgcagaaagagaacagcaagcgctggaacccagagattcagtatacttccaactactacaaatctacaaatgtggactttgctgtcaatactgagggtacttattcagagcctcgccccattggcacccgttacctcacccgtaacctgtaa

SEQ ID NO: 305 - protein, 738 aa, Adeno-associated virus
MAADGYLPDWLEDNLSEGIREWWDLKPGAPKPKANQQKQDDGRGLVLPGYKYLGPFNGLDKGEPVNAADAAALEHDKAYDQQLKAGDNPYLRYNHADAEFQERLQEDTSFGGNLGRAVFQAKKRVLEPLGLVEEGAKTAPGKKRPVEPSPQRSPDSSTGIGKTGQQPAKKRLNFGQTGDSESVPDPQPIGEPPAGPSGLGSGTMAAGGGAPMADNNEGADGVGSSSGNWHCDSAWLGDRVITTSTRPWALPTYNNHLYKQISNGTSGGSTNDNTYFGYSTPWGYFDFNRFHCHFSPRDWQRLINNNWGFRPKRLNFKLFNIQVKEVTQNEGTKTIANNLTSTIQVFTDSEYQLPYVLGSAHQGCPPPFPADVFMIPQYGYLTLNNGSQAVGRSSFYCLEYFPSQMRRTGNNFEFSYQFEDVPFHSSYAHSQSLDRLMNPLIDQYLYYLSRTQSTGGTAGTQQLLFSQAGPNNMSAQAKNWLPGPCYRQQRVSTTLSQNNNSNFAWTGATKYHLNGRDSLVNPGVAMATHKDDEERFFPSSGVLMFGKQGAGKDNVDYSSVMLTSEEEIKTTNPVATEQYGVVADNLQQQNAAPIVGAVNSQGALPGMVWQNRDVYLQGPIWAKIPHTDGNFHPSPLMGGFGLKHPPPQILIKNTPVPADPPTTFSQAKLASFITQYSTGQVSVEIEWELQKENSKRWNPEIQYTSNYYKSTNVDFAVNTEGTYSEPRPIGTRYLTRNL

SEQ ID NO: 306 - protein, 735 aa, Adeno-associated virus
MAADGYLPDWLEDTLSEGIRQWWKLKPGPPPPKPAERHKDDSRGLVLPGYKYLGPFNGLDKGEPVNEADAAALEHDKAYDRQLDSGDNPYLKYNHADAEFQERLKEDTSFGGNLGRAVFQAKKRVLEPLGLVEEPVKTAPGKKRPVEHSPVEPDSSSGTGKAGQQPARKRLNFGQTGDADSVPDPQPLGQPPAAPSGLGSTTMATGSGAPMADNNEGADGVGNSSGNWHCDSQWLGDRVITTSTRTWALPTYNNHLYKQISSQSGASNDNHYFGYSTPWGYFDFNRFHCHFSPRDWQRLINNNWGFRPKRLNFKLFNIQVKEVTQNDGTTTIANNLTSTVQVFTDSEYQLPYVLGSAHQGCLPPFPADVFMVPQYGYLTLNNGSQAVGRSSFYCLEYFPSQMLRTGNNFQFSYTFEDVPFHSSYAHSQSLDRLMNPLVDQYLYYLNKTQTNSGTLQQSRLLFSQAGPTNMSLQAKNWLPGPCYRQQRLSKQANDNNNSNFPWTAATKYHLNGRDSLVNPGPAMASHKDDEEKFFPMHGTLIFGKQGTNANDADLENVMITDEEEIRTTNPVATEQYGTVSNNLQNSNTGPTTGTVNHQGALPGMVWQDRDVYLQGPIWAKIPHTDGHFHPSPLMGGFGLKHPPPQIMIKNTPVPANPPTNFSSAKFASFITQYSTGQVSVEIEWELQKENSKRWNPEIQYTSNYNKSVNVDFTVDTNGVYSEPRPIGTRYLTRNL

SEQ ID NO: 307 - DNA, 3158 bp, Adeno-associated virus
gattgaatttagcggccgcgaattcgcccttgctgcgtcaactggaccaatgagaactttcctttcaatgattgcgtcgacaagatggtgatctggtgggaggagggaaagatgaccgccaaggtcgtggagtcggccaaagccattctcggaggaagcaaggtgcgcgcggaccagaaatgcaagtcctcggcccagatagacccgactcccgtgattgtcacctccaacaccaacatgtgcgccgtgattgacgggaactcaacgaccttcgaacaccagcagccgttgcaagaccggatgttcaaatttgaactcacccgccgtctggatcatgactttgggaaggtcaccaagcaggaagtcaaagactttttccggtgggcaaaggatcacgtggttgaggtggagcatgaattctacgtcaaaaagggtggagctaagaaaagacccgcccccagtgacgcagatataagtgagcccaaacgggcgcgcgagtcagttgcgcagccatcgacgtcagacgcggaagcttcgatcaactacgcgggcaggtaccaaaacaaatgttctcgtcacgtgggcatgaatctgatgctgtttccctgcagacaatgcgagagaatgaatcagaattcaaatatctgcttcactcacggacagaaagactgtttagagtgctttcccgtgtcagaatctcaacccgtttctgtcgtcaaaaaggcgtatcagaaactttgctacattcatcatatcatgggaaaggtgccagacgcttgcactgcctgcgatctggtcaatgtggatttggatgactgcatctctgaacaataaatgatttaaatcaggtatggctgccgatggttatcttccagattggctcgaggacactctctctgaaggaataagacagtggtggaagctcaaacctggcccaccaccaccaaagcccgcagagcggcataaggacgacagcaggggtcttgtgcttcctgggtacaagtacctcggacccttcaacggactcgacaagggggagccggtcaacgaggcagacgccgcggccctcgagcacgacaaggcctacgaccggcagctcgacagcggagacaacccgtacctcaagtacaaccacgccgacgcggagtttcaggagcgccttaaagaagatacgtcttttgggggcaacctcggacgagcagtcttccaggcaaaaaagagggttcttgaacctctgggcctggttgaggaacctgttaaaacggctccgggaaaaaagaggccggtagagcactctcctgtggagccagactcctcctcgggaaccggaaaagcgggccagcagcctgcaagaaaaagattgaatttcggtcagactggagacgcagactccgtacctgacccccagcctctcggacagccaccagcagccccctctggtctgggatctactacaatggctacaggcagtggcgcaccaatggcagacaataacgagggtgccgatggagtgggtaattcctcgggaaattggcattgcgattcccaatggctgggcgacagagtcatcaccaccagcacccgcacctgggccctgcccacctacaacaaccacctctacaagcaaatctccagccaatcaggagcctcaaacgacaaccactactttggctacagcaccccctgggggtattttgacttcaacagattccactgccacttttcaccacgtgactggcaaagactcatcaacaacaactggggattccgacccaagagactcaacttcaagctctttaacattcaagtcaaagaggtcacgcagaatgacggtacgacgacgattgccaataaccttaccagcacggttcaggtgtttactgactcggagtaccagctcccgtacgtcctcggctcggcgcatcaaggatgcctcccgccgtttccagcggacgtcttcatggtcccacagtatggatacctcaccctgaacaacgggagtcaggcagtaggacgctcttcattttactgcctggagtactttccttctcagatgctgcgtaccggaaacaactttcaattcagctacacttttgaagacgtgcctttccacagcagctacgctcacagccagagtctggatcggctgatgaatcctctggtcgaccagtacctgtattatctgaacaagacacaaacaaatagtggaactcttcagcagtctcggctactgtttagccaagctggacccaccaacatgtctcttcaagctaaaaactggctgcctggaccttgctacagacagcagcgtctgtcaaagcaggcaaacgacaacaacaacagcaactttccctggactgcagctacaaagtatcatctaaatggccgggactcgttggttaatccaggaccagctatggccagtcacaaggatgacgaagaaaagtttttccccatgcatggaacccttatatttggtaaacaaggaacaaatgccaacgacgcggatttggaaaatgtcatgattacagatgaagaagaaatcaggaccaccaatcccgtggctacggagcagtacggaactgtatcaaataatttgcaaaactcaaacactggtccaactactggaactgtcaatcaccaaggagcgttacctggtatggtgtggcaggatcgagacgtgtacctgcagggacccatttgggccaagattcctcacaccgatggacactttcatccttctccactgatgggaggttttggactcaaacacccacctcctcaaatcatgatcaaaaacactcccgttccagccaatcctcccacaaacttcagttctgccaagtttgcttctttcatcacacagtattccacggggcaggtcagcgtggagatcgagtgggagctgcagaaggagaacagcaaacgctggaatcccgaaattcagtacacttccaactacaacaaatctgttaatgtggactttactgtggacactaatggtgtgtattcagagcctcgccccattggcaccagatacctgactcgtaatctgtaattgcttgttaatcaataaaccgtttaattcgtttcagttgaactttggtctctgcgaagggcgaattcgtttaaacctgcaggactagtccctttagtga

SEQ ID NO: 308 - protein, 735 aa, Adeno-associated virus
MAADGYLPDWLEDTLSEGIRQWWKLKPGPPPPKPAERHKDDSRGLVLPGYKYLGPFNGLDKGEPVNEADAAALEHDKAYDRQLDSGDNPYLKYNHADAEFQERLKEDTSFGGNLGRAVFQAKKRVLEPLGLVEEPVKTAPGKKRPVEHPPVEPDSSSGTGKAGQQPARKRLNFGQTGDADSVPDPQPLGQPPAAPSGLGSTTMATGSGAPMADNNEGADGVGNSSGNWHCDSQWLGDRVITTSTRTWALPTYNNHLYKQISSQSGASNDNHYFGYSTPWGYFDFNRFHCHFSPRDWQRLINNNWGFRPKRLNFKLFNIQVKEVTQNDGTTTIANNLTSTVQVFTDSEYQLPYVLGSAHQGCLPPFPADVFMVPQYGYLTLNNGSQAVGRSSFYCLEYFPSQMLRTGNNFQFSYTFEDVPFHSSYAHSQSLDRLMNPLIDQYLYYLNKTQTNSGTLQQSRLLFSQAGPTNMSLQAKNRLPGPCYRQQRLSKQANDNNNSNFPWTAATKYHLNGRDSLVNPGPAMASHKDDEEKFFPMHGTLIFGKQGTNANDADLENVMITDEEEIRTTNPVATEQYGTVSNNLQNSNTGPTTGTVNHQGALPGMVWQDRDVYLQGPIWAKIPHTDGHFHPSPLVGGFGLKHPPPQIMIKNTPVPANPPTNFSSAKFASFITQYSTGQVSVEIEWELQKENSKRWNPEIQYTSNYNKSVNVDFTVDTNGVYSEPRPIGTRYLTRNL

SEQ ID NO: 309 - DNA, 3159 bp, Adeno-associated virus
gattgaatttagcggccgcgaattcgcccttgctgcgtcaactggaccaatgagaactttcctttcaatgattgcgtcgacaagatggtgatctggtgggaggagggaaagatgaccgccaaggtcgtggagtcggccaaagccattctcggaggaagcaaggtgcgcgtggaccagaaatgcaagtcctcggcccagatagacccgactcccgtgattgtcacctccaacaccgacatgtgcgccgtgattgacgggaactcaacgaccttcgaacaccagcagccgttgcaagaccggatgttcaaatttgaactcacccgccgtctggatcatgactttgggaaggtcaccaagcaggaagtcaaagactttttccggtgggcaaaggatcacgtggttgaggtggagcatgaattctacgtcaaaaagggtggagctaagaaaagacccgcccccagtgacgcagatataagtgagcccaaacgggcgcgcgagtcagttgcgcagccatcgacgtcagacgcggaagcttcgatcaactacgcggacaggtaccaaaacaaatgttctcgtcacgtgggcatgaatctgatgctgtttccctgcagacaatgcgagagaatgaatcagaattcaaatatctgcttcactcacggacagaaagactgtttagagtgctttcccgtgtcagaatctcaacccgtttctgtcgtcaaaaaggcgtatcagaaactttgctacattcatcatatcatgggaaaggtgccagacgcttgcactgcctgcgatctggtcaatgtggatttggatgactgcatctctgaacaataaatgatttaaatcaggtatggctgccgatggttatcttccagattggctcgaggacactctctctgaaggaataagacagtggtggaagctcaaacctggcccaccaccaccaaagcccgcagagcggcataaggacgacagcaggggtcttgtgcttcctgggtacaagtacctcggacccttcaacggactcgacaagggggagccggtcaacgaggcagacgccgcggccctcgagcacgacaaggcctacgaccggcagctcgacagcggagacaacccgtacctcaagtacaaccacgccgacgcggagtttcaggagcgccttaaagaagatacgtcttttgggggcaacctcggacgagcagtcttccaggcaaaaaagagggttcttgaacctctgggcctggttgaggaacctgttaaaacggctccgggaaaaaagaggccggtagagcaccctcctgtggagccagactcctcctcgggaaccggaaaagcgggccagcagcctgcaagaaaaagattgaatttcggtcagactggagacgcagactccgtacctgacccccagcctctcggacagccaccagcagccccctctggtctgggatctactacaatggctacaggcagtggcgcaccaatggcagacaataacgagggtgccgatggagtgggtaattcctcgggaaattggcattgcgattcccaatggctgggcgacagagtcatcaccaccagcacccgcacctgggccctgcccacctacaacaaccacctctacaagcaaatctccagccaatcaggagcctcaaacgacaaccactactttggctacagcaccccctgggggtattttgacttcaacagattccactgccacttttcaccacgtgactggcaaagactcatcaacaacaactggggattccgacccaagagactcaacttcaagctctttaacattcaagtcaaagaggtcacgcagaatgacggtacgacgacgattgccaataaccttaccagcacggttcaggtgtttactgactcggagtaccagctcccgtacgtcctcggctcggcgcatcaaggatgcctcccgccgtttccagcggacgtcttcatggtcccacagtatggatacctcaccctgaacaacgggagtcaggcagtaggacgctcttcattttactgcctggagtactttccttctcagatgctgcgtaccggaaacaactttcagttcagctacacttttgaagacgtgcctttccacagcagctacgctcacagccagagtctggatcggctgatgaatcctctgatcgaccagtacctgtattatctgaacaagacacaaacaaatagtggaactcttcagcagtctcggctactgtttagccaagctggacccaccaacatgtctcttcaagctaaaaaccggctgcctggaccttgctacagacagcagcgtctgtcaaagcaggcaaacgacaacaacaacagcaactttccctggaccgcagctacaaagtatcatctaaatggccgggactcgttggttaatccaggaccagctatggccagtcacaaggatgacgaagaaaagtttttccccatgcatggaacccttatatttggtaaacaaggaacaaatgccaacgacgcggatttggaaaatgtcatgattacagatgaagaagaaatcaggaccaccaatcccgtggctacggagcagtacggaactgtatcaaataatttgcaaaactcaaacactggtccaactactggaactgtcaatcaccaaggagcgttacctggtatggtgtggcaggatcgagacgtgtacctgcagggacccatttgggccaagattcctcacaccgatggacactttcatccttctccactggtgggaggttttggactcaaacacccacctcctcaaatcatgatcaaaaacactcccgttccagccaatcctcccacaaacttcagttctgccaagtttgcttctttcatcacacagtattccacggggcaggtcagcgtggagatcgagtgggagctgcagaaggagaacagcaaacgctggaatcccgaaattcagtacacttccaactacaacaaatctgttaatgtggactttactgtggacactaatggtgtgtattcagagcctcgccccattggcaccagatacctgactcgtaatctgtaattgcttgttaatcaataaaccgtttaattcgtttcagttgaactttggtctctgcgaagggcgaattcgtttaaacctgcaggactagtccctttagtgag

SEQ ID NO: 310 - DNA, 2208 bp, Adeno-associated virus
atggctgccgatggttatcttccagattggctcgaggacactctctctgaaggaataagacagtggtggaagctcaaacctggcccaccaccaccaaagcccgcagagcggcataaggacgacagcaggggtcttgtgcttcctgggtacaagtaccttggacccttcaacggactcgacaagggagagccggtcaacgaggcagacgccgcggccctcgagcacgacaaggcctacgaccggcagctcgacagcggagacaacccgtaccccaagtacaaccacgccgacgcggagttccaggagcgtcttaaagaagatacgtcttttgggggcaacctcggacgagcagtcttccaggcgaaaaagagggttcttgaacctctgggcctggttgaggaacctgttaagacggctccgggaaaaaagaggccggtagagcactctcctgcggagccagactcctcctcgggaaccggaaaagcgggccagcagcctgcaagaaagagattgaatttcggtcagactggagacgcagactccgtacctgacccccagcctctcggacagccaccagcagccccctctggtctgggaactaatacgatggctacaggcagtggcgcaccaatggcagacaataacgagggcgccgacggagtgggtaattcctcgggaaattggcattgcgattccacatggatgggcgacagagtcatcaccaccagcacccgcacctgggctctgcccacctacaacaaccacctctacaagcagatttccagccaatcaggagcctcaaacgacaaccactactttggctacagcaccccttgggggtattttgacttcaacagattccactgccacttttcgccacgtgactggcaaagactcatcaacaacaattggggattccggcccaaaagactcaacttcaagctctttaacattcaagtcaaggaggtcacgcagaatgacggtacgacgacgattgccaataaccttaccagcacggttcaggtgtttactgactcggagtaccagctcccgtacgtcctcggctcggcgcatcaaggatgcctcccgccgttcccagcagacgtcttcatggtgccacagtatggatacctcaccctgaacaacgggagtcaggcagtaggacgctcttcattttactgcctggagtactttccttctcagatgctgcgtaccggaaacaactttaccttcagctacacctttgaggacgttcctttccacagcagctacgcccacagccagagtttggaccgtctcatgaatcctctcatcgaccagtacctgtattacttgagcagaacaaacactccaagcggaaccaccacgcagtcaaggcttcagttttctcaggccggagcaagtgacattcgggaccagtctaggaactggcttcctggaccctgttaccgccagcagcgagtatcaaagacatctgcggataacaacaacagtgaatactcgtggactggagctaccaagtaccaccttaatggaagagactctctggtgaatccgggcccggccatggccagccacaaggacgatgaagaaaagttttttcctcagagcggggttctcatctttggaaaacaagactcgggaaaaactaatgtggacattgaaaaggtcatgattacagacgaagaggaaatcaggaccaccaatcccgtggctacggagcagtatggttctgtatctaccaacctccagagcggcaacacacaagcagctacctcagatgtcaacacacaaggcgttcttccaggcatggtgtggcaggacagagacgtgtacctgcaggggcccatctgggcaaagattccacacacggacggacattttcacccctctcccctcatgggcggattcggacttaaacaccctcccccgcagattctcatcaagaacaccccggtacctgcgaatccttcgactaccttcagtgcggcaaagtttgcttccttcattacacagtactccacggggcaggtcagcgtggagatcgagtgggagctgcagaaggagaacagcaaacgctggaatcccgagattcagtacacttccaactacaacaaatctgttaatgtggactttactgtggacactaatggtgtgtattcagagcctcgccccattggcaccaggtacctgactcgtaatctgtaa

SEQ ID NO: 311 - protein, 735 aa, Adeno-associated virus
MAADGYLPDWLEDTLSEGIRQWWKLKPGPPPPKPAERHKDDSRGLVLPGYKYLGPFNGLDKGEPVNEADAAALEHDKAYDRQLDSGDNPYPKYNHADAEFQERLKEDTSFGGNLGRAVFQAKKRVLEPLGLVEEPVKTAPGKKRPVEHSPAEPDSSSGTGKAGQQPARKRLNFGQTGDADSVPDPQPLGQPPAAPSGLGTNTMATGSGAPMADNNEGADGVGNSSGNWHCDSTWMGDRVITTSTRTWALPTYNNHLYKQISSQSGASNDNHYFGYSTPWGYFDFNRFHCHFSPRDWQRLINNNWGFRPKRLNFKLFNIQVKEVTQNDGTTTIANNLTSTVQVFTDSEYQLPYVLGSAHQGCLPPFPADVFMVPQYGYLTLNNGSQAVGRSSFYCLEYFPSQMLRTGNNFTFSYTFEDVPFHSSYAHSQSLDRLMNPLIDQYLYYLSRTNTPSGTTTQSRLQFSQAGASDIRDQSRNWLPGPCYRQQRVSKTSADNNNSEYSWTGATKYHLNGRDSLVNPGPAMASHKDDEEKFFPQSGVLIFGKQDSGKTNVDIEKVMITDEEEIRTTNPVATEQYGSVSTNLQSGNTQAATSDVNTQGVLPGMVWQDRDVYLQGPIWAKIPHTDGHFHPSPLMGGFGLKHPPPQILIKNTPVPANPSTTFSAAKFASFITQYSTGQVSVEIEWELQKENSKRWNPEIQYTSNYNKSVNVDFTVDTNGVYSEPRPIGTRYLTRNL

SEQ ID NO: 312 - DNA, 2208 bp, Adeno-associated virus
atggctgccgatggttatcttccagattggctcgaggacactctctctgaaggaataagacagtggtggaagctcaaacctggcccaccaccaccaaagcccgcagagcggcataaggacgacagcaggggtcttgtgcttcctgggtacaagtaccttggacccttcaacggactcgacaagggagagccggtcaacgaggcagacgccgcggccctcgagcacgacaaggcctacgaccggcagctcgacggcggagacaacccgtacctcaagtacaaccacgccgacgcggagttccaggagcgtcttaaagaagatacgtcttttgggggcaacctcggacgagcagtcttccaggcgaaaaagagggttcttgaacctctgggcctggttgaggaacctgttaagacggctccgggaaaaaagaggccggtagagcactctcttgcggagccagactcctcctcgggaaccggaaaagcgggccagcagcctgcaagaaggagattgaatttcggtcagactggagacgcagactccgtacctgacccccagcctctcggacagccaccagcagccccctctggtctgggaactaatacgatggctacaggcagtggcgcaccaatggcagacaataacgagggcgccgacggagtgggtaattcctcgggaaattggcattgcgattccacatggatgggcgacagagtcatcaccaccagcacccgcacctgggctctgcccacctacaacaaccacctctacaggcagatttccagccaatcaggagcctcaaacgacaaccactactttggctacagcaccccttgggggtattttgacttcaacagattccactgccacttttcgccacgtgactggcaaagactcatcaacaacaattggggatcccggcccaaaagactcaacttcaagctctttaacattcaagtcaaggaggtcacgcagaatgacggtacgacgacgattgccaataaccttaccagcacggttcaggtgtttactgactcggagtaccagctcccgtacgtcctcggctcggcgcatcaaggatgcctcccgccgttcccagcagacgtcttcatggtgccacagtatggatacctcaccctgaacaacgggagtcaggcagtaggacgctcttcattttactgcctggagtactttccttctcagatgctgcgtaccggaaacaactttaccttcagctacacctttgaggacgttcctttccacagcagctacgcccacagccagagtttggaccgtctcatgaatcctctcgtcgaccagtacctgtattacttgagcagaacaaacactccaagcggaaccaccacgcagtcaaggcttcagttttctcaggccggagcaagtgacattcgggaccagtctaggaactggcttcctggaccctgttaccgccagcagcgagtatcaaagacatctgcggataacaacaacagtgaatactcgtggactggagctaccaagtaccaccttaatggaagagactctctggtgaatccgggcccggccatggccagccacaaggacgatgaagaaaagttttttcctcagagcggggttctcatctttggaaaacaagactcgggaaaaactaatgtggacattgaaaaggtcatgattacagacgaagaggaaatcaggaccaccaatcccgtggctacggagcagtatggttctgtatctaccaacctccagagcggcaacacacaagcagctacctcagatgtcaacacacaaggcgttcttccaggcatggtgtggcaggacagagacgtgtacctgcaggggcccatctgggcaaagattccacacacggacggacattttcacccctctcccctcatgggcggattcggacttaaacaccctcccccgcagattctcatcaagaacaccccggtacctgcgaatccttcgactaccttcagtgcggcaaagtttgcttccttcattacacagtactccacggggcaggtcagcgtggagatcgagtgggagctgcagaaggagaacagcaaacgctggaatcccgagattcagtacacttccaactacaacaaatctgttaatgtggactttactgtggacactaatggtgtgtattcagagcctcgccccattggcaccagatacctgactcgtaatctgtaa

SEQ ID NO: 313 - protein, 735 aa, Adeno-associated virus
MAADGYLPDWLEDTLSEGIRQWWKLKPGPPPPKPAERHKDDSRGLVLPGYKYLGPFNGLDKGEPVNEADAAALEHDKAYDRQLDGGDNPYLKYNHADAEFQERLKEDTSFGGNLGRAVFQAKKRVLEPLGLVEEPVKTAPGKKRPVEHSLAEPDSSSGTGKAGQQPARRRLNFGQTGDADSVPDPQPLGQPPAAPSGLGTNTMATGSGAPMADNNEGADGVGNSSGNWHCDSTWMGDRVITTSTRTWALPTYNNHLYRQISSQSGASNDNHYFGYSTPWGYFDFNRFHCHFSPRDWQRLINNNWGSRPKRLNFKLFNIQVKEVTQNDGTTTIANNLTSTVQVFTDSEYQLPYVLGSAHQGCLPPFPADVFMVPQYGYLTLNNGSQAVGRSSFYCLEYFPSQMLRTGNNFTFSYTFEDVPFHSSYAHSQSLDRLMNPLVDQYLYYLSRTNTPSGTTTQSRLQFSQAGASDIRDQSRNWLPGPCYRQQRVSKTSADNNNSEYSWTGATKYHLNGRDSLVNPGPAMASHKDDEEKFFPQSGVLIFGKQDSGKTNVDIEKVMITDEEEIRTTNPVATEQYGSVSTNLQSGNTQAATSDVNTQGVLPGMVWQDRDVYLQGPIWAKIPHTDGHFHPSPLMGGFGLKHPPPQILIKNTPVPANPSTTFSAAKFASFITQYSTGQVSVEIEWELQKENSKRWNPEIQYTSNYNKSVNVDFTVDTNGVYSEPRPIGTRYLTRNL

SEQ ID NO: 314 - protein, 738 aa, Adeno-associated virus
MAADGYLPDWLEDNLSEGIREWWDLKPGAPKPKANQQKQDDGRGLVLPGYKYLGPFNGLDKGEPVNAADAAALEHDKAYDQQLKAGDNPYLRYNHADAEFQERLQEDTSFGGNLGRAVFQAKKRVLEPLGLVEEAAKTAPGKKRPVEPSPQRSPDSSAGIGKKGQQPAKKRLNFGQTGDSESVPDPQPIGEPPAGPSGLGSGTMAAGGGAPMADNNEGADGVGSSSGNWHCDSTWLGDRVITTSTRTWALPTYNNHLYKQISNGTSGGSTNDNTYFGYSTPWGYFDFNRFHCHFSPRDWQRLINNNWGFRPKRLSFKLFNIQVKEVTQNEGTETIANNLTSTIQVFTDSEYQLPYVLGSAHQGCLPPFPADVFMIPQYGYLTLNNGSQAVGRSSFYCLEYFPSQMLRTGNNFEFSYTFEDVPFHSSCAHSQSSDRLMNPLIDQYLYYLSRTRSTGGTQGTQQLLFSQAGPANMSAQAKNWLPGPCYRQQRVSTTLSQNNNSNFAWTGATKYHLNGRDSLVNPGVAMATHKDDEERFFPSSGVLMFGKQGAGRDNVDYSSVMLTSEEEIKTTNPVATEQYGVVADNLQQTNTGPIVGNVNSQGALPGMVWQNRDVYLQGPIWAKIPHTDGNFHPSPLMGGFGLKHPPPQILIKNTPVPADPPTTFSQAKLASFITQYSTGQVSVEIEWELQKENSKRWNPEIQYTSNYYKSTNVDFAVNTEGTYSEPRPIGTRYLTRNL

SEQ ID NO: 315 - DNA, 2217 bp, Adeno-associated virus
atggctgctgacggttatcttccagattggctcgaggacaacctctctgagggcattcgcgagtggtgggacctgaaacctggagcccccaagcccaaggccaaccagcagaagcaggacgacggccggggtctggtgcttcttggctacaagtacctcggacccttcaacggactcgacaagggggagcccgtcaatgcggcggacgcagcggccctcgagcacgacaaggcctacgaccagcagctcaaagcgggtgacaatccgtacctgcggtataaccacgccgacgccgagtttcaggagcgtctgcaagaagatacgtcttttgggggcaacctcgggcgagcagtcttccaggccaagaagcgggttctcgaacctctcggtctggttgaggaagctgctaagacggctcctggaaagaagagaccggtagaaccgtcacctcagcgttcccccgactcctccacgggcatcggcaagaaaggccagcagcccgctaaaaagagactgaactttggtcagactggcgactcagagtcagtccccgaccctcaaccaatcggagaaccaccagcaggcccctctggtctgggatctggtacaatggctgcaggcggtggcgctccaatggcagacaataacgaaggcgccgacggagtgggtagttcctcaggaaattggcattgcgattccacatggctgggcgacagagtcatcaccaccagcacccgaacctgggccctgcccacctacaacaaccacctctacaagcaaatatccaatgggacatcgggaggaagcaccaacgacaacacctacttcggctacagcaccccctgggggtattttgacttcaacagattccactgccacttctcaccacgtgactggcagcgactcatcaacaacaactggggattccggccaaaaagactcagcttcaagctcttcaacatccaggtcaaggaggtcacgcagaatgaaggcaccaagaccatcgccaataaccttaccagcacgattcaggtatttacggactcggaataccagctgccgtacgtcctcggctccgcgcaccagggctgcctgcctccgttcccggcggacgtcttcatgattccccagtacggctaccttacactgaacaatggaagtcaagccgtaggccgttcctccttctactgcctggaatattttccatctcaaatgctgcgaactggaaacaattttgaattcagctacaccttcgaggacgtgcctttccacagcggctacgcacacagccagagcttggaccgactgatgaatcctctcatcgaccagtacctgtactacttatccagaactcagtccacaggaggaactcaaggtacccagcaattgttattttctcaagctgggcctgcaaacatgtcggctcaggctaagaactggctacctggaccttgctaccggcagcagcgagtctctacgacactgtcgcaaaacaacaacagcaactttgcttggactggtgccaccaaatatcacctgaacggaagagactctttggtaaatcccggtgtcgccatggcaacccacaaggacgacgaggaacgcttcttcccgtcgagtggagtcctgatgtttggaaaacagggtgctggaagagacaatgtggactacagcagcgttatgctaaccagcgaagaagaaattaaaaccactaaccctgtagccacagaacaatacggtgtggtggctgacaacttgcagcaaaccaatacagggcctattgtgggaaatgtcaacagccaaggagccttacctggcatggtctggcagaaccgagacgtgtacctgcagggtcccatctgggccaagattcctcacacggacggcaacttccacccttcaccgctaatgggaggatttggactgaagcacccacctcctcagatcctgatcaagaacacgccggtacctgcggatcctccaacgacgttcagccaggcgaaattggcttccttcattacgcagtacagcaccggacaggtcagcgtggaaatcgagtgggagctgcagaaggagaacagcaaacgctggaacccagagattcagtacacttcaaactactacaaatctacaaatgtggactttgctgtcaatacagagggaacttattctgagcctcgccccattggtactcgttacctcacccgtaatctgtaa

SEQ ID NO: 316 - protein, 738 aa, Adeno-associated virus
MAADGYLPDWLEDNLSEGIREWWDLKPGAPKPKANQQKQDDGRGLVLLGYKYLGPFNGLDKGEPVNAADAAALEHDKAYDQQLKAGDNPYLRYNHADAEFQERLQEDTSFGGNLGRAVFQAKKRVLEPLGLVEEAAKTAPGKKRPVEPSPQRSPDSSTGIGKKGQQPAKKRLNFGQTGDSESVPDPQPIGEPPAGPSGLGSGTMAAGGGAPMADNNEGADGVGSSSGNWHCDSTWLGDRVITTSTRTWALPTYNNHLYKQISNGTSGGSTNDNTYFGYSTPWGYFDFNRFHCHFSPRDWQRLINNNWGFRPKRLSFKLFNIQVKEVTQNEGTKTIANNLTSTIQVFTDSEYQLPYVLGSAHQGCLPPFPADVFMIPQYGYLTLNNGSQAVGRSSFYCLEYFPSQMLRTGNNFEFSYTFEDVPFHSGYAHSQSLDRLMNPLIDQYLYYLSRTQSTGGTQGTQQLLFSQAGPANMSAQAKNWLPGPCYRQQRVSTTLSQNNNSNFAWTGATKYHLNGRDSLVNPGVAMATHKDDEERFFPSSGVLMFGKQGAGRDNVDYSSVMLTSEEEIKTTNPVATEQYGVVADNLQQTNTGPIVGNVNSQGALPGMVWQNRDVYLQGPIWAKIPHTDGNFHPSPLMGGFGLKHPPPQILIKNTPVPADPPTTFSQAKLASFITQYSTGQVSVEIEWELQKENSKRWNPEIQYTSNYYKSTNVDFAVNTEGTYSEPRPIGTRYLTRNL

SEQ ID NO: 317 - protein, 735 aa, Adeno-associated virus
MAADGYLPDWLEDTLSEGIRQWWKLKPGPPPPKPAERHKDDSRGLVLPGYKYLGPFNGLDKGEPVNEADAAALEHDKAYDRQLDSGDNPYLKYNHADAEFQERLKEDTSFGGNLGRAVFQAKKRVLEPLGLVEPPVKTAPGKKRPVEHSPAEPDSSSGTGKAGQQPARKRLNFGQTGDADSVPDPQPLGQPPAAPSGLGSTTMATGSGAPMADNNEGADGVGNSSGNWHCDSQWLGDRVITTSTRTWALPTYNNHLYKQISSQSGASNDNHYFGYSTPWGYFDFNRFHCHFSPRDWQRLINNNWGFRPKRLNFKLFNIQVKEVTQNDGTTTIANNLTSTVQVFTDSEYQLPYVLGSAHQGCLPPFPADVFMVPQYGYLTLNNGSQAVGRSSFYCLEYFPSQMLRTGNNFQFSYTFEDVPFHSSYAHSQSLDRLMNPLIDQYLYYLNKTQSNSGTLQQSRLLFSQAGPTSMSLQAKNWLPGPCYRQQRLSKQANDNNNSNFPWTAATKYHLNGRDSLVNPGPAMASHKDDEEKFFPMHGTLIFGKQGTNANDADLDNVMITDEEEIRTTNPVATEQYGYVSNNLQNSNTGPTTGTVNHQGALPGMVWQDRDVYLQGPIWAKIPHTDGHFHPSPLMGGFGLKHPPPQIMIKNTPVPANPPTNFSSAKFASFITQYSTGQVSVEIEWELQKENSKRWNPEIQYTSNYNKSVNVDFTVDTNGVYSEPRPIGTRYLTRNL

SEQ ID NO: 318 - protein, 735 aa, Adeno-associated virus
MAADGYLPDWLEDTLSEGIRQWWKLKPGPPPPKPAERHKDDSRGLVLPGYKYLGPFNGLDKGEPVNEADAAALEHDKAYDRQLDSGDNPYLKYNHADAEFQERLKEDTSFGGNLGRAVFQAKKRVLEPLGLVEGPVKTAPGKKRPVEHSPAEPDSSSGTGKAGQQPARKRLNFGQTGDADSVPDPQPLGQPPAAPSGLGSTTMATGSGAPMADNNEGADGVGNSSGNWHCDSQWLGDRVITTSTRTWALPTYNNHLYKQISSQSGASNDNHYFGYSTPWGYFDFNRFHCHFSPRDWQRLINNNWGFRPKRLNFKLFNIQVKEVTQNDGTTTIANNLTSTVQVFTDSEYQLPYVLGSAHQGCLPPFPADVFMVPQYGYLTLNNGSQAVGRSSFYCLEYFPSQMLRTGNNFQFSYTFEDVPFHSSYAHSQSLDRLMNPLIDQYLYYLNKTQSNSGTLQQSRLLFSQAGPTSMSLQAKNWLPGPCYRQQRLSKQANDNNNSNFPWTAATKYHLNGRDSLVNPGPAMASHKDDEEKFFPMHGTLIFGKQGTNANDADLDNVMITDEEEIRTTNPVATEQYGYVSNNLQNSNTGPTTGTVNHQGALPGMVWQDRDVYLQGPIWAKIPHTDGHFHPSPLMGGFGLKHPPPQIMIKNTPVPANPPTNFSSAKFASFITQYSTGQVSVEIEWELQKENSKRWNPEIQYTSNYNKSVNVDFTVDTNGVYSEPRPIGTRYLTRNL

SEQ ID NO: 319 - DNA, 2208 bp, Adeno-associated virus
atggctgccgatggttatcttccagattggctcgaggacactctctctgaaggaataagacagtggtggaagctcaaacctggcccaccaccaccaaagcccgcagagcggcataaggacgacagcaggggtcttgtgcttcctgggtacaagtacctcggacccttcaacggactcgacaagggggagccggtcaacgaggcagacgccgcggccctcgagcacgacaaggcctacgaccggcagctcgacagcggagacaacccgtacctcaagtacaaccacgccgacgcggagtttcaggagcgtcttaaagaagatacgtcttttgggggcaacctcggacgagcagtcttccaggcgaaaaagagggttcttgaacctctgggcctggttgagggacctgttaagacggctccgggaaaaaagaggccggtagagcactctcctgcggagccagactcctcctcgggaaccggaaaagcgggccagcagcctgcaagaaaaagattgaattttggtcagactggagacgcagactccgtacctgacccccagcctctcggacagccaccagcagccccctctggtttgggatctactacaatggctacaggcagtggcgcaccaatggcagacaataacgagggtgccgatggagtgggtaattcctcaggaaattggcattgcgattcccaatggctgggcgacagagtcatcaccaccagcacccgaacctgggccctgcccacctacaacaaccacctctacaagcaaatctcaagccaatcaggagcctcaaacgacaaccactactttggctacagcaccccttgggggtattttgacttcaacagattccactgccacttttcaccacgtgactggcaaagactcatcaacaacaactggggattccgacccaagagactcaacttcaagctctttaacattcaagtcaaagaggtcacgcagaatgacggtacgacgacgattgccaataaccttaccagcacggttcaggtgtttactgactcggagtaccagctcccgtacgtcctcgggtcggcgcatcaaggatgcctcccgccgtttccagcggacgtcttcatggtcccacagtatggatacctcaccctgaacaacgggagtcaggcggtaggacgctcttccttttactgcctggagtactttccttctcagatgcttcgtactggaaacaactttcagttcagctacacctttgaagacgttcctttccacagcagctacgctcacagccagagtctggatcggctgatgaatcctctgatcgaccagtacctgtattatctgaacaaaacacaatcaaatagtggaactcttcagcagtctcggctactgtttagtcaagctggacccaccagcatgtctcttcaagctaaaaactggctacctggaccttgctacagacagcagcgtctgtcaaagcaggcaaacgacaacaacaacagcaactttccctggactgcggctacaaagtatcacctaaatggccgggactcgttggttaatccaggaccagctatggccagtcacaaagacgatgaagaaaagtttttccccatgcatggaaccctgatatttggtaaacaaggaacaaatgctaacgacgcggatttggacaatgtcatgattacagatgaagaagaaatccgcaccaccaatcccgtggctacggagcagtacggatatgtgtcaaataatttgcaaaactcaaatactggtccaactactggaactgtcaatcaccaaggagcgttacctggcatggtgtggcaggatcgagacgtgtacctgcagggacccatttgggccaagattcctcacaccgatggacactttcatccttctccactgatgggaggttttgggctcaaacacccgcctcctcagatcatgatcaaaaacactcccgttccagccaatcctcccacaaacttcagttctgccaagtttgcttctttcatcacacagtattccacggggcaggtcagcgtggagatcgagtgggagctgcagaaagagaacagcaaacgctggaatcccgaaattcagtacacttccaactacaacaaatctgttaatgtggactttactgtggacactaatggcgtgtattcagagcctcgccccattggcaccagatacctgactcgtaatctgtaa

SEQ ID NO: 320 - DNA, 2211 bp, Adeno-associated virus; identical to SEQ ID NO: 1

SEQ ID NO: 321 - DNA, 2208 bp, Adeno-associated virus
atggctgccgatggttatcttccagattggctcgaggacactctctctgaaggaacaagacagtggtggaagctcaaacctggcccaccaccaccaaagcccgcagagcggcataaggacgacagcaggggtcttgtgcttcctgggtacaagtacctcggacccttcaacggactcgacaagggggagccggtcaacgaggcagacgccgcggccctcgagcacgacaaggcctacgaccggcagctcgacagcggagacaacccgtacctcaagtacaaccacgccgacgcggagtttcaggagcgtcttaaagaagatacgtcttttgggggcaacctcggacgagcagtcttccaggcgaaaaagagggttcttgaacctctgggcctggttgaggaacctgttaagacggctccgggaaaaaagaggccggtagagcactctcctgcggagccagactcctcctcgggaaccggaaaagcgggccagcagcctgcaagaaaaagattgaattttggtcagactggagacgcagactccgtacctgacccccagcctctcggacagccaccagcagccccctctggtttgggatctactacaatggctacaggcagtggcgcaccaatggcagacaataacgagggtgccgatggagtgggtaattcctcaggaaattggcattgcgattcccaatggctgggcgacagagtcatcaccaccagcacccgaacctgggccctgcccacctacaacaaccacctctacaagcaaatctcaagccaatcaggagcctcaaacgacaaccactactttggctacagcaccccttgggggtattttgacttcaacagattccactgccacttttcaccacgtgactggcaaagactcatcaacaacaactggggattccgacccaagagactcaacttcaagctctttaacattcaagtcaaagaggtcacgcagaatgacggtacgacgacgattgccaataaccttaccagcacggttcaggtgtttactgactcggagtaccagctcccgtacgtcctcgggtcggcgcatcaaggatgcctcccgccgtttccagcggacgtcttcatggtcccacagtatggatacctcaccctgaacaacgggagtcaggcggtaggacgctcttccttttactgcctggagtactttccttctcagatgcttcgtactggaaacaactttcagttcagctacacctttgaagacgttcctttccacagcagctacgctcacagccagagtctggatcggctgatgaatcctctgatcgaccagtacctgtattatctgaacaaaacacaatcaaatagtggaactcttcagcagtctcggctactgtttagtcaagctggacccaccagcatgtctcttcaagctaaaaactggctacctggaccttgctacagacagcagcgtctgtcaaagcaggcaaacgacaacaacaacagcaactttccctggactgcggctacaaagtaccacctaaatggccgggactcgttggttaatccaggaccagctatggccagtcacaaagacgatgaagaaaagtttttccccatgcatggaaccctgatatttggtaaacaaggaacaaatgctaacgacgcggatttggacaatgtcatgattacagatgaagaagaaatccgcaccaccaatcccgtggctacggagcagtacggatatgtgtcaaataatttgcaaaactcaaatactggtccaactactggaactgtcaatcaccaaggagcgttacctggcatggtgtggcaggatcgagacgtgtacctgcagggacccatttgggccaagattcctcacaccgatggacactttcatccttctccactgatgggaggttttgggctcaaacacccgcctcctcagatcatgatcaaaaacactcccgttccagccaatcctcccacaaacttcagttctgccaagtttgcttctttcatcacacagtattccacggggcaggtcagcgtggagatcgagtgggagctgcagaaagagaacagcaaacgctggaatcccgaaattcagtacacttccaactacaacaaatctgttaatgtggactttactgtggacactaatggcgtgtattcagagcctcgccccattggcaccagatacctgactcgtaatctgtaa

SEQ ID NO: 322 - DNA, 2217 bp, Adeno-associated virus
atggctgctgacggttatcttccagattggctcgaggacaacctctctgagggcattcgcgagtggtgggacctgaaacctggagcccccaagcccaaggccaaccagcagaagcaggacgacggccggggtctggtgcttcctggctacaagtacctcggacccttcaacggactcgacaagggggagcccgtcaacgcggcggacgcagcggccctcgagcacgacaaggcctacgaccagcagctcaaagcgggtgacaatccgtacctgcggtataaccacgccgacgccgagtttcaggagcgtctgcaagaagatacgtcttttgggggcaacctcgggcgagcagtcttccaggccaagaagcgggttctcgaacctctcggtctggttgaggaagctgctaagacggctcctggaaagaagagaccggtagaaccgtcacctcagcgttcccccgactcctccacgggcatcggcaagaaaggccagcagcccgctaaaaagagactgaactttggtcagactggcgactcagagtcagtccccgaccctcaaccaatcggagaaccacctgcaggcccctctggtctgggatctggtacaatggctgcaggcggtggcgctccaatggcagacaataacgaaggcgccgacggagtgggtagttcctcaggaaattggcattgcgattccacatggctgggcgacagagtcatcaccaccagcacccgaacctgggccctgcccacctacaacaaccacctctacaagcaaatatccaatgggacatcgggagggagcaccaacgacaacacctacttcggctacagcaccccctgggggtattttgacttcaacagattccactgccacttctcaccacgtgactggcagcgactcatcaacaacaactggggattccggccaaaaagactcagcttcaagctcttcaacatccaggtcaaggaggtcacgcagaatgaaggcaccaagaccatcgccaataaccttaccagcacgattcaggtatttacggactcggaataccagctgccgtacgtcctcggctccgcgcaccagggctgcctgcctccgttcccggcggacgtcttcatgattccccagtacggctaccttacactgaacaatggaagtcaagccgtaggccgttcctccttctactgcctggaatattttccatctcaaatgctgcgaactggaaacaattttgaattcagctacaccttcgaggacgtgcctttccacagcagctacgcacacagccagagcttggaccgactgatgaatcctctcatcgaccagtacctgtactacttatccagaactcagtccacaggaggaactcaaggtacccagcaattgttattttctcaagctgggcctgcaaacatgtcggctcaggctaagaactggctacctggaccttgctaccggcagcagcgagtctctacgacactgtcgcaaaacaacaacagcaactttgcttggactggtgccaccaaatatcacctgaacggaagagactctttggtaaatcccggtgtcgccatggcaacccacaaggacgacgaggaacgcttcttcccgtcgagtggagtcctgatgtttggaaaacagggtgctggaagagacaatgtggactacagcagcgttatgctaaccagcgaagaagaaattaaaaccactaaccctgtagccacagaacaatacggtgtggtggctgacaacttgcagcaaaccaatacagggcctattgtgggaaatgtcaacagccaaggagccttacctggcatggtctggcagaaccgagacgtgtacctgcagggtcccatctgggccaagattcctcacacggacggcaactgccacccttcaccgctaatgggaggatttggactgaagcacccacctcctcagatcctgatcaagaacacgccggtacctgcggatcctccaacaacgttcagccaggcgaaattggcttccttcattacgcagtacagcaccggacaggtcagcgtggaaatcgagtgggagctgcagaaggagaacagcaaacgctggaacccagagattcagtacacttcaaactactacaaatctacaaatgtggactttgctgtcaatacagagggaacttattctgagcctcgccccattggtactcgttacctcacccgtaatctgtaa

SEQ ID NO: 323 - protein, 735 aa, Adeno-associated virus
MAADGYLPDWLEDTLSEGTRQWWKLKPGPPPPKPAERHKDDSRGLVLPGYKYLGPFNGLDKGEPVNEADAAALEHDKAYDRQLDSGDNPYLKYNHADAEFQERLKEDTSFGGNLGRAVFQAKKRVLEPLGLVEEPVKTAPGKKRPVEHSPAEPDSSSGTGKAGQQPARKRLNFGQTGDADSVPDPQPLGQPPAAPSGLGSTTMATGSGAPMADNNEGADGVGNSSGNWHCDSQWLGDRVITTSTRTWALPTYNNHLYKQISSQSGASNDNHYFGYSTPWGYFDFNRFHCHFSPRDWQRLINNNWGFRPKRLNFKLFNIQVKEVTQNDGTTTIANNLTSTVQVFTDSEYQLPYVLGSAHQGCLPPFPADVFMVPQYGYLTLNNGSQAVGRSSFYCLEYFPSQMLRTGNNFQFSYTFEDVPFHSSYAHSQSLDRLMNPLIDQYLYYLNKTQSNSGTLQQSRLLFSQAGPTSMSLQAKNWLPGPCYRQQRLSKQANDNNNSNFPWTAATKYHLNGRDSLVNPGPAMASHKDDEEKFFPMHGTLIFGKQGTNANDADLDNVMITDEEEIRTTNPVATEQYGYVSNNLQNSNTGPTTGTVNHQGALPGMVWQDRDVYLQGPIWAKIPHTDGHFHPSPLMGGFGLKHPPPQIMIKNTPVPANPPTNFSSAKFASFITQYSTGQVSVEIEWELQKENSKRWNPEIQYTSNYNKSVNVDFTVDTNGVYSEPRPIGTRYLTRNL

SEQ ID NO: 324 - DNA, 2208 bp, Adeno-associated virus
atggctgccgatggttatcttccagattggctcgaggacactctctctgaaggaataagacagtggtggaagctcaaacctggcccaccaccaccaaagcccgcagagcggcatcaggacaacagcaggggtcttgtgcttcctgggtacaagtacctcggaccctccaacggactcgacaaaggagagccggtcaacgaggcagacgccgcggccctcgagcacgacaaggcctacgaccggcagctcgacagcggagacaacccgtacctcaagtacaaccacgccgacgcggagtttcaggagcgtcttaaagaagatacgtcttttgggggcaacctcggacgagcagtcttccaggcgaaaaagagggttcttgaacctctgggcctggttgaggaacctgttaagacggctccgggaaaaaagaggccggtagagcactctcctgtggagccagactcctcctcgggaaccggaaaagcgggccatcagcctgcgagaaagagattgaattttggtcagactggagacgcagactccgtacctgacccccagcctctcggacagccaccagcagcccccacaagtttgggatctactacaatggctacaggcagtggcgcaccaatggcagacaataacgagggtgccgatggagtgggtaattcctcaggaaattggcattgcgattcccaatggctgggcgacagagtcatcaccaccagcacccgaacctgggccctgcccacctacaacaaccacctctacaagcaaatctccagccaatcaggagcctcgaacgacaaccactactttggctgcagcaccccctgggggtattttgacttcaacagattccactgtcacttctccccacgtgattggcaaagactcatcaacaacaactggggattccgacccaagagactcaacttcaagctctttaacattcaagtcaaagaggtcacgcagaatgacggtacgacgacgattgccaataaccttaccagcacggttcaggtgtttactgactcggagtacccgctcccgtacgtcctcggctcggcgcatcaaggatgcctcccgccgtttccagcggacgtcttcatggtcccacagtatggatacctcaccctgaacaacgggagtcaggcggtaggacgctcttccttttactgcctggagtactttccttctcagatgctgcgtaccggaaacaactttaccttcagctacacctttgaggacgttcctttccacagcagctacgctcacagccagagtttggaccggctgatgaatcctctgatcgaccagtatctatattatctgaacaggacacaatcaaatagtggaactcttcagcagtctaggctactgtttagccaagctggacccaccagcatgtctcttcaagctaaaaactggctgcctggaccttgctacagacagcagcgtctttcaaagcaggcaaacgacaacaacaacagcaactttccctggactgcggctacaaagtatcatctaaatggccgggactcgttggttaatccaggaccagctatggccagccacaaagacgatgaagaaaagtttttccccatgcatggaaccctgatatttggtaaacaaggaacaaatgctaacgacgcggatttggagcatgttatgattacagatgaagaagaaatcaggaccaccaatcctgtggctacagagcagtacggaaacgtgtcaaataatttgcaaaactcaaatactggtccaactacagaaaatgtcaatcaccagggagcgttacctggtatggtgtggcaggatcgagacgtgtacctgcagggacccatttgggccaagattcctcacaccgacggacactttcacccttctccactgatgggaggttttggactcaaacacccgcctcctcaaatcatgatcaaaaacactcccgttccagccaatcctcccacaaacttcagttctgccaagtttgcttctttcatcacacagtattccacgggccaggtcagcgtggagattgagtgggagctgcagaaggagaacagcaaacgctggaaccccgagatccagtatacttccaactacaacaaatctgttaatgtggactttactgtggacactaatggtgtgtattcagagccttgccccattggcaccagatacctgactcgtaatctgtaa

SEQ ID NO: 325 - protein, 735 aa, Adeno-associated virus
MAADGYLPDWLEDTLSEGIRQWWKLKPGPPPPKPAERHQDNSRGLVLPGYKYLGPSNGLDKGEPVNEADAAALEHDKAYDRQLDSGDNPYLKYNHADAEFQERLKEDTSFGGNLGRAVFQAKKRVLEPLGLVEEPVKTAPGKKRPVEHSPVEPDSSSGTGKAGHQPARKRLNFGQTGDADSVPDPQPLGQPPAAPTSLGSTTMATGSGAPMADNNEGADGVGNSSGNWHCDSQWLGDRVITTSTRTWALPTYNNHLYKQISSQSGASNDNHYFGCSTPWGYFDFNRFHCHFSPRDWQRLINNNWGFRPKRLNFKLFNIQVKEVTQNDGTTTIANNLTSTVQVFTDSEYPLPYVLGSAHQGCLPPFPADVFMVPQYGYLTLNNGSQAVGRSSFYCLEYFPSQMLRTGNNFTFSYTFEDVPFHSSYAHSQSLDRLMNPLIDQYLYYLNRTQSNSGTLQQSRLLFSQAGPTSMSLQAKNWLPGPCYRQQRLSKQANDNNNSNFPWTAATKYHLNGRDSLVNPGPAMASHKDDEEKFFPMHGTLIFGKQGTNANDADLEHVMITDEEEIRTTNPVATEQYGNVSNNLQNSNTGPTTENVNHQGALPGMVWQDRDVYLQGPIWAKIPHTDGHFHPSPLMGGFGLKHPPPQIMIKNTPVPANPPTNFSSAKFASFITQYSTGQVSVEIEWELQKENSKRWNPEIQYTSNYNKSVNVDFTVDTNGVYSEPCPIGTRYLTRNL

SEQ ID NO: 326 - DNA, 2214 bp, Artificial Sequence
  Description of Artificial Sequence: Synthetic polynucleotide
atggctgccgatggttatcttccagattggctcgaggacaaccttagtgaaggaattcgcgagtggtgggctttgaaacctggagcccctcaacccaaggcaaatcaacaacatcaagacaacgctcgaggtcttgtgcttccgggttacaaataccttggacccggcaacggactcgacaagggggagccggtcaacgcagcagacgcggcggccctcgagcacgacaaggcctacgaccagcagctgcaggcgggtgacaatccgtacctgcggtataaccacgccgacgccgagtttcaggagcgtctgcaagaagatacgtcttttgggggcaaccttggcagagcagtcttccaggccaaaaagaggatccttgagcctcttggtctggttgaggaagcagctaaaacggctcctggaaagaagaggcctgtagatcagtctcctcaggaaccggactcatcatctggtgttggcaaatcgggcaaacagcctgccagaaaaagactaaatttcggtcagactggcgactcagagtcagtcccagaccctcaacctctcggagaaccaccagcagcccccacaagtttgggatctaatacaatggcttcaggcggtggcgcaccaatggcagacaataacgagggtgccgatggggtgggtagttcctcgggaaattggcattgcgattcccaatggctgggggacagagtcatcaccaccagcacccgaacctgggccctgcccacctacaacaatcacctctacaagcaaatctccaacgggacatcgggaggagccaccaacgacaacacctacttcggctacagcaccccctgggggtattttgactttaacagattccactgccacttttcaccacgtgactggcagcgactcatcaacaacaactggggattccggcccaagagactcagcttcaagctcttcaacatccaggtcaaggaggtcacgcagaatgaaggcaccaagaccatcgccaataacctcaccagcaccatccaggtgtttacggactcggagtaccagctgccgtacgttctcggctctgcgcaccagggctgcctccctccgttcccggcggacgtgttcatgattccgcaatacggctacctgacgctcaacaatggcagccaagccgtgggacgttcatccttttactgcctggaatatttcccttctcagatgctgagaacgggcaacaactttaccttcagctacacctttgaggaagtgcctttccacagcagctacgcgcacagccagagcttggaccggctgatgaatcctctgattgaccagtacctgtactacttgtctcggactcaaacaacaggaggcacggcaaatacgcagactctgggcttcagccaaggtgggcctaatacaatggccaatcaggcaaagaactggctgccaggaccctgttaccgccaacaacgcgtctcaacgacaaccgggcaaaacaacaatagcaactttgcctggactgctgggaccaaataccatctgaatggaagaaattcattggctaatcctggcatcgctatggcaacacacaaagacgacgaggagcgtttttttcccagtaacgggatcctgatttttggcaaacaaaatgctgccagagacaatgcggattacagcgatgtcatgctcaccagcgaggaagaaatcaaaaccactaaccctgtggctacagaggaatacggtatcgtggcagataacttgcagcagcaaaacacggctcctcaaattggaactgtcaacagccagggggccttacccggtatggtctggcagaaccgggacgtgtacctgcagggtcccatctgggccaagattcctcacacggacggcaacttccacccgtctccgctgatgggcggctttggcctgaaacatcctccgcctcagatcctgatcaagaacacgcctgtacctgcggatcctccgaccaccttcaaccagtcaaagctgaactctttcatcacgcaatacagcaccggacaggtcagcgtggagatcgagtgggagctgcagaaggaaaacagcaagcgctggaacccggagatccagtacacttccaactattacaagtctaataatgttgaatttgctgttaatactgaaggtgtatatagtgaaccccgccccattggcaccagatacctgactcgtaatctgtaa

SEQ ID NO: 327 - protein, 737 aa, Artificial Sequence
  Description of Artificial Sequence: Synthetic polypeptide
MAADGYLPDWLEDNLSEGIREWWALKPGAPQPKANQQHQDNARGLVLPGYKYLGPGNGLDKGEPVNAADAAALEHDKAYDQQLQAGDNPYLRYNHADAEFQERLQEDTSFGGNLGRAVFQAKKRILEPLGLVEEAAKTAPGKKRPVDQSPQEPDSSSGVGKSGKQPARKRLNFGQTGDSESVPDPQPLGEPPAAPTSLGSNTMASGGGAPMADNNEGADGVGSSSGNWHCDSQWLGDRVITTSTRTWALPTYNNHLYKQISNGTSGGATNDNTYFGYSTPWGYFDFNRFHCHFSPRDWQRLINNNWGFRPKRLSFKLFNIQVKEVTQNEGTKTIANNLTSTIQVFTDSEYQLPYVLGSAHQGCLPPFPADVFMIPQYGYLTLNNGSQAVGRSSFYCLEYFPSQMLRTGNNFTFSYTFEEVPFHSSYAHSQSLDRLMNPLIDQYLYYLSRTQTTGGTANTQTLGFSQGGPNTMANQAKNWLPGPCYRQQRVSTTTGQNNNSNFAWTAGTKYHLNGRNSLANPGIAMATHKDDEERFFPSNGILIFGKQNAARDNADYSDVMLTSEEEIKTTNPVATEEYGIVADNLQQQNTAPQIGTVNSQGALPGMVWQNRDVYLQGPIWAKIPHTDGNFHPSPLMGGFGLKHPPPQILIKNTPVPADPPTTFNQSKLNSFITQYSTGQVSVEIEWELQKENSKRWNPEIQYTSNYYKSNNVEFAVNTEGVYSEPRPIGTRYLTRNL

SEQ ID NO: 328 - DNA, 2211 bp, Artificial Sequence
  Description of Artificial Sequence: Synthetic polynucleotide
atggctgccgatggttatcttccagattggctcgaggacaacctctctgagggcattcgcgagtggtgggacttgaaacctggagccccgaagcccaaagccaaccagcaaaagcaggacgacggccggggtctggtgcttcctggctacaagtacctcggacccttcaacggactcgacaagggggagcccgtcaacgcggcggacgcagcggccctcgagcacgacaaggcctacgaccagcagctcaaagcgggtgacaatccgtacctgcggtataaccacgccgacgccgagtttcaggagcgtctgcaagaagatacgtcttttgggggcaacctcgggcgagcagtcttccaggccaagaagcgggttctcgaacctctcggtctggttgaggaaggcgctaagacggctcctggaaagaaacgtccggtagagcagtcgccacaagagccagactcctcctcgggcatcggcaagacaggccagcagcccgctaaaaagagactcaattttggtcagactggcgactcagagtcagtccccgacccacaacctctcggagaacctccagcaacccccgctgctgtgggacctactacaatggcttcaggcggtggcgcaccaatggcagacaataacgaaggcgccgacggagtgggtaatgcctcaggaaattggcattgcgattccacatggctgggcgacagagtcatcaccaccagcacccgaacatgggccttgcccacctataacaaccacctctacaagcaaatctccagtgcttcaacgggggccagcaacgacaaccactacttcggctacagcaccccctgggggtattttgatttcaacagattccactgccatttctcaccacgtgactggcagcgactcatcaacaacaattggggattccggcccaagagactcaacttcaagctcttcaacatccaagtcaaggaggtcacgacgaatgatggcgtcacgaccatcgctaataaccttaccagcacggttcaagtcttctcggactcggagtaccagctgccgtacgttctcggctctgcccaccagggctgcctgcctccgttcccggcggacgtgttcatgattccccagtacggctacctaacactcaacaacggtagtcaggccgtgggacgctcctccttctactgcctggaatactttccttcgcagatgctgagaaccggcaacaacttccagtttacttacaccttcgaggacgtgcctttccacagcagctacgcccacagccagagcttggaccggctgatgaatcctctgattgaccagtacctgtactacttgtctcggactcaaacaacaggaggcacggcaaatacgcagactctgggcttcagccaaggtgggcctaatacaatggccaatcaggcaaagaactggctgccaggaccctgttaccgccaacaacgcgtctcaacgacaaccgggcaaaacaacaatagcaattttacctggactggtgcttcaaaatataacctcaatgggcgtgaatccatcatcaaccctggcactgctatggcctcacacaaagacgacgaagacaagttctttcccatgagcggtgtcatgatttttggaaaagagagcgccggagcttcaaacactgcattggacaatgtcatgattacagacgaagaggaaattaaagccactaaccctgtggccaccgaaagatttgggaccgtggcagtcaatttccagagcagcagcacagaccctgcgaccggagatgtgcatgctatgggagcattacctggcatggtgtggcaagatagagacgtgtacctgcagggtcccatttgggccaaaattcctcacacagatggacactttcacccgtctcctcttatgggcggctttggactcaagaacccgcctcctcagatcctcatcaaaaacacgcctgttcctgcgaatcctccggcggagttttcagctacaaagtttgcttcattcatcacccaatactccacaggacaagtgagtgtggaaattgaatgggagctgcagaaagaaaacagcaagcgctggaatcccgaagtgcagtacacatccaattatgcaaaatctgccaacgttgattttactgtggacaacaatggactttatactgagcctcgccccattggcacccgttacctcacccgtcccctgtaa

SEQ ID NO: 329 - protein, 736 aa, Artificial Sequence
  Description of Artificial Sequence: Synthetic polypeptide
MAADGYLPDWLEDNLSEGIREWWDLKPGAPKPKANQQKQDDGRGLVLPGYKYLGPFNGLDKGEPVNAADAAALEHDKAYDQQLKAGDNPYLRYNHADAEFQERLQEDTSFGGNLGRAVFQAKKRVLEPLGLVEEGAKTAPGKKRPVEQSPQEPDSSSGIGKTGQQPAKKRLNFGQTGDSESVPDPQPLGEPPATPAAVGPTTMASGGGAPMADNNEGADGVGNASGNWHCDSTWLGDRVITTSTRTWALPTYNNHLYKQISSASTGASNDNHYFGYSTPWGYFDFNRFHCHFSPRDWQRLINNNWGFRPKRLNFKLFNIQVKEVTTNDGVTTIANNLTSTVQVFSDSEYQLPYVLGSAHQGCLPPFPADVFMIPQYGYLTLNNGSQAVGRSSFYCLEYFPSQMLRTGNNFQFTYTFEDVPFHSSYAHSQSLDRLMNPLIDQYLYYLSRTQTTGGTANTQTLGFSQGGPNTMANQAKNWLPGPCYRQQRVSTTTGQNNNSNFTWTGASKYNLNGRESIINPGTAMASHKDDEDKFFPMSGVMIFGKESAGASNTALDNVMITDEEEIKATNPVATERFGTVAVNFQSSSTDPATGDVHAMGALPGMVWQDRDVYLQGPIWAKIPHTDGHFHPSPLMGGFGLKNPPPQILIKNTPVPANPPAEFSATKFASFITQYSTGQVSVEIEWELQKENSKRWNPEVQYTSNYAKSANVDFTVDNNGLYTEPRPIGTRYLTRPL

SEQ ID NO: 330 - DNA, 2211 bp, Artificial Sequence
  Description of Artificial Sequence: Synthetic polynucleotide
atggctgctgacggttatcttccagattggctcgaggacaacctttctgaaggcattcgagagtggtgggcgctgcaacctggagcccctaaacccaaggcaaatcaacaacatcaggacaacgctcggggtcttgtgcttccgggttacaaatacctcggacccggcaacggactcgacaagggggaacccgtcaacgcagcggacgcggcagccctcgagcacgacaaggcctacgaccagcagctcaaggccggtgacaacccctacctcaagtacaaccacgccgacgccgagttccaggagcggctcaaagaagatacgtcttttgggggcaacctcgggcgagcagtcttccaggccaaaaagaggcttcttgaacctcttggtctggttgaggaagcggctaagacggctcctggaaagaagaggcctgtagatcagtctcctcaggaaccggactcatcatctggtgttggcaaatcgggcaaacagcctgccagaaaaagactaaatttcggtcagactggcgactcagagtcagtcccagaccctcaacctctcggagaaccaccagcagcccccacaagtttgggatctaatacaatggcttcaggcggtggcgcaccaatggcagacaataacgagggtgccgatggagtgggtaattcctcaggaaattggcattgcgattcccaatggctgggcgacagagtcatcaccaccagcaccagaacctgggccctgcccacttacaacaaccatctctacaagcaaatctccagccaatcaggagcttcaaacgacaaccactactttggctacagcaccccttgggggtattttgactttaacagattccactgccacttctcaccacgtgactggcagcgactcattaacaacaactggggattccggcccaagaaactcagcttcaagctcttcaacatccaagttaaagaggtcacgcagaacgatggcacgacgactattgccaataaccttaccagcacggttcaagtgtttacggactcggagtatcagctcccgtacgtgctcgggtcggcgcaccaaggctgtctcccgccgtttccagcggacgtcttcatggtccctcagtatggatacctcaccctgaacaacggaagtcaagcggtgggacgctcatccttttactgcctggagtacttcccttcgcagatgctaaggactggaaataacttccaattcagctataccttcgaggatgtaccttttcacagcagctacgctcacagccagagtttggatcgcttgatgaatcctcttattgatcagtatctgtactacctgaacagaacgcaaggaacaacctctggaacaaccaaccaatcacggctgctttttagccaggctgggcctcagtctatgtctttgcaggccagaaattggctacctgggccctgctaccggcaacagagactttcaaagactgctaacgacaacaacaacagtaactttccttggacagcggccagcaaatatcatctcaatggccgcgactcgctggtgaatccaggaccagctatggccagtcacaaggacgatgaagaaaaatttttccctatgcacggcaatctaatatttggcaaagaagggacaacggcaagtaacgcagaattagataatgtaatgattacggatgaagaagagattcgtaccaccaatcctgtggcaacagagcagtatggaactgtggcaaataacttgcagagctcaaatacagctcccacgactagaactgtcaatgatcagggggccttacctggcatggtgtggcaagatcgtgacgtgtaccttcaaggacctatctgggcaaagattcctcacacggatggacactttcatccttctcctctgatgggaggctttggactgaaacatccgcctcctcaaatcatgatcaaaaatactccggtaccggcaaatcctccgacgactttcagcccggccaagtttgcttcatttatcactcagtactccactggacaggtcagcgtggaaattgagtgggagctacagaaagaaaacagcaaacgttggaatccagagattcagtacacttccaactacaacaagtctgttaatgtggactttactgtagacactaatggtgtttatagtgaacctcgccccattggcacccgttaccttacccgtcccctgtaa

SEQ ID NO: 331 - protein, 736 aa, Artificial Sequence
  Description of Artificial Sequence: Synthetic polypeptide
MAADGYLPDWLEDNLSEGIREWWALQPGAPKPKANQQHQDNARGLVLPGYKYLGPGNGLDKGEPVNAADAAALEHDKAYDQQLKAGDNPYLKYNHADAEFQERLKEDTSFGGNLGRAVFQAKKRLLEPLGLVEEAAKTAPGKKRPVDQSPQEPDSSSGVGKSGKQPARKRLNFGQTGDSESVPDPQPLGEPPAAPTSLGSNTMASGGGAPMADNNEGADGVGNSSGNWHCDSQWLGDRVITTSTRTWALPTYNNHLYKQISSQSGASNDNHYFGYSTPWGYFDFNRFHCHFSPRDWQRLINNNWGFRPKKLSFKLFNIQVKEVTQNDGTTTIANNLTSTVQVFTDSEYQLPYVLGSAHQGCLPPFPADVFMVPQYGYLTLNNGSQAVGRSSFYCLEYFPSQMLRTGNNFQFSYTFEDVPFHSSYAHSQSLDRLMNPLIDQYLYYLNRTQGTTSGTTNQSRLLFSQAGPQSMSLQARNWLPGPCYRQQRLSKTANDNNNSNFPWTAASKYHLNGRDSLVNPGPAMASHKDDEEKFFPMHGNLIFGKEGTTASNAELDNVMITDEEEIRTTNPVATEQYGTVANNLQSSNTAPTTRTVNDQGALPGMVWQDRDVYLQGPIWAKIPHTDGHFHPSPLMGGFGLKHPPPQIMIKNTPVPANPPTTFSPAKFASFITQYSTGQVSVEIEWELQKENSKRWNPEIQYTSNYNKSVNVDFTVDTNGVYSEPRPIGTRYLTRPL

SEQ ID NO: 332 - DNA, 2211 bp, Artificial Sequence
  Description of Artificial Sequence: Synthetic polynucleotide
atggctgccgatggttatcttccagattggctcgaggacaaccttagtgaaggaattcgcgagtggtgggctttgaaacctggagcccctcaacccaaggcaaatcaacaacatcaagacaacgctcgaggtcttgtgcttccgggttacaaataccttggacccggcaacggactcgacaagggggagccggtcaacgcagcagacgcggcggccctcgagcacgacaaggcctacgaccagcagctcaaggccggagacaacccgtacctcaagtacaaccacgccgacgccgagttccaggagcggctcaaagaagatacgtcttttgggggcaacctcgggcgagcagtcttccaggccaaaaagaggcttcttgaacctcttggtctggttgaggaagcggctaagacggctcctggaaagaagagaccggtagagccatcaccccagcgttctccagactcctctacgggcatcggcaagaaaggccaacagcccgctaaaaagagactcaattttggtcagactggcgactcagagtcagtccccgacccacaacctctcggagaacctccagcaacccccgctgctgtgggacctactacaatggcttcaggcggtggcgcaccaatggcagacaataacgagggtgccgatggagtgggtaattcctcaggaaattggcattgcgattcccaatggctgggcgacagagtcatcaccaccagcaccagaacctgggccctgcccacttacaacaaccatctctacaagcaaatctccagccaatcaggagcttcaaacgacaaccactactttggctacagcaccccttgggggtattttgactttaacagattccactgccacttttcaccacgtgactggcaaagactcatcaacaacaactggggattccgacccaagagactcaacttcaagctcttcaacatccaagtcaaggaggtcacgacgaatgatggcgtcacgaccatcgctaataaccttaccagcacggttcaagtcttctcggactcggagtaccagttgccgtacgtcctcggctctgcgcaccagggctgcctccctccgttcccggcggacgtgttcatgattccgcagtacggctacctaacgctcaacaatggcagccaagccgtgggacgttcatccttttactgcctggaatatttcccttctcagatgctgagaacgggcaacaactttaccttcagctacacttttgaggacgttcctttccacagcagctacgctcacagccagagtctggaccgtctcatgaatcctctcatcgaccagtacctgtattacttgagcagaacaaacactccaagtggaaccaccacgcagtcaaggcttcagttttctcaggccggagcgagtgacattcgggaccagtctaggaactggcttcctggaccctgttaccgccagcagcgcgtttctaaaacaaaaacagacaacaacaacagcaattttacctggactggtgcttcaaaatataaccttaatgggcgtgaatctataatcaaccctggcactgctatggcctcacacaaagacgacgaagacaagttctttcccatgagcggtgtcatgatttttggaaaagagagcgccggagcttcaaacactgcattggacaatgtcatgattacagacgaagaggaaattaaagccactaaccctgtggccaccgaaagatttgggaccgtggcagtcaatttccagagcagcagcacagaccctgcgaccggagatgtgcatgttatgggagccttacctggaatggtgtggcaagacagagacgtatacctgcagggtcctatttgggccaaaattcctcacacggatggacactttcacccgtctcctcttatgggcggctttggactcaagaacccgcctcctcagatcctcatcaaaaacacgcctgttcctgcgaatcctccggcggagttttcagctacaaagtttgcttcattcatcacccaatactccacaggacaagtgagtgtggaaattgaatgggagctgcagaaagaaaacagcaagcgctggaatcccgaagtgcagtacacatccaattatgcaaaatctgccaacgttgattttactgtggacaacaatggactttatactgagcctcgccccattggcacccgttaccttacccgtcccctgtaa

SEQ ID NO: 333 - protein, 736 aa, Artificial Sequence
  Description of Artificial Sequence: Synthetic polypeptide
MAADGYLPDWLEDNLSEGIREWWALKPGAPQPKANQQHQDNARGLVLPGYKYLGPGNGLDKGEPVNAADAAALEHDKAYDQQLKAGDNPYLKYNHADAEFQERLKEDTSFGGNLGRAVFQAKKRLLEPLGLVEEAAKTAPGKKRPVEPSPQRSPDSSTGIGKKGQQPAKKRLNFGQTGDSESVPDPQPLGEPPATPAAVGPTTMASGGGAPMADNNEGADGVGNSSGNWHCDSQWLGDRVITTSTRTWALPTYNNHLYKQISSQSGASNDNHYFGYSTPWGYFDFNRFHCHFSPRDWQRLINNNWGFRPKRLNFKLFNIQVKEVTTNDGVTTIANNLTSTVQVFSDSEYQLPYVLGSAHQGCLPPFPADVFMIPQYGYLTLNNGSQAVGRSSFYCLEYFPSQMLRTGNNFTFSYTFEDVPFHSSYAHSQSLDRLMNPLIDQYLYYLSRTNTPSGTTTQSRLQFSQAGASDIRDQSRNWLPGPCYRQQRVSKTKTDNNNSNFTWTGASKYNLNGRESIINPGTAMASHKDDEDKFFPMSGVMIFGKESAGASNTALDNVMITDEEEIKATNPVATERFGTVAVNFQSSSTDPATGDVHVMGALPGMVWQDRDVYLQGPIWAKIPHTDGHFHPSPLMGGFGLKNPPPQILIKNTPVPANPPAEFSATKFASFITQYSTGQVSVEIEWELQKENSKRWNPEVQYTSNYAKSANVDFTVDNNGLYTEPRPIGTRYLTRPL

SEQ ID NO: 334 - DNA, 2211 bp, Artificial Sequence
  Description of Artificial Sequence: Synthetic polynucleotide
atggctgccgatggttatcttccagattggctcgaggacaacctctctgagggcattcgcgagtggtgggacttgaaacctggagcccctaaacccaaggcaaatcaacaacatcaggacaacgctcgaggtcttgtgcttccgggttacaaataccttggacccggcaacggactcgacaagggggagccggtcaacgcagcagacgcggcggccctcgagcacgacaaggcctacgaccagcagctcaaggccggagacaacccgtacctcaagtacaaccacgccgacgccgagttccaggagcggctcaaagaagatacgtcttttgggggcaacctcgggcgagcagtcttccaggccaaaaagaggcttcttgaacctcttggtctggttgaggaagcggctaagacggctcctggaaagaagagaccggtagagccatcaccccagcgttctccagactcctctacgggcatcggcaagaaaggccaacagcccgctaaaaagagactcaattttggtcagactggcgactcagagtcagtccccgacccacaacctctcggagaacctccagcaacccccgctgctgtgggacctactacaatggcttcaggcggtggcgcaccaatggcagacaataacgagggtgccgatggagtgggtaattcctcaggaaattggcattgcgattcccaatggctgggcgacagagtcatcaccaccagcaccagaacctgggccctgcccacttacaacaaccatctctacaagcaaatctccagccaatcaggagcttcaaacgacaaccactactttggctacagcaccccttgggggtattttgactttaacagattccactgccacttttcaccacgtgactggcaaagactcatcaacaacaactggggattccgacccaagagactcaacttcaagctcttcaacatccaagtcaaggaggtcacgacgaatgatggcgtcacgaccatcgctaataaccttaccagcacggttcaagtcttctcggactcggagtaccagttgccgtacgtcctcggctctgcgcaccagggctgcctccctccgttcccggcggacgtgttcatgattccgcagtacggctacctaacgctcaacaatggcagccaagccgtgggacgttcatccttttactgcctggaatatttcccttctcagatgctgagaacgggcaacaactttaccttcagctacacttttgaggacgttcctttccacagcagctacgctcacagccagagtctggaccgtctcatgaatcccctcatcgaccagtacctgtattacttgagcagaacaaacactccaagtggaaccaccacgcagtcaaggcttcagttttctcaggccggagcgagtgacattcgggaccagtctaggaactggcttcctggaccctgttaccggcagcagcgcgtttctaaaacaaaaacagacaacaacaacagcaactttacctggactggtgcttcaaaatataaccttaatgggcgtgaatctataatcaaccctggcactgctatggcctcacacaaagacgacgaagacaagttctttcccatgagcggtgtcatgatttttggaaaggagagcgccggagcttcaaacactgcattggacaatgtcatgatcacagacgaagaggaaatcaaagccactaaccccgtggccaccgaaagatttgggactgtggcagtcaatctccagagcagcagcacagaccctgcgaccggagatgtgcatgttatgggagccttacctggaatggtgtggcaagacagagacgtgtacctgcagggtcctatttgggccaaaattcctcacacggatggacactttcacccgtctcctctcatgggcggctttggacttaagcacccgcctcctcagatcctcatcaaaaacacgcctgttcctgcgaatcctccggcagagttttcggctacaaagtttgcttcattcatcacccagtattccacaggacaagtgagtgtggaaattgaatgggagctgcagaaagaaaacagcaagcgctggaatcccgaagtgcagtacacatccaattatgcaaaatctgccaacgttgattttactgtggacaacaatggactttatactgagcctcgccccattggcacccgttacctcacccgtcccctgtaa

SEQ ID NO: 335 - protein, 736 aa, Artificial Sequence
  Description of Artificial Sequence: Synthetic polypeptide
MAADGYLPDWLEDNLSEGIREWWDLKPGAPKPKANQQHQDNARGLVLPGYKYLGPGNGLDKGEPVNAADAAALEHDKAYDQQLKAGDNPYLKYNHADAEFQERLKEDTSFGGNLGRAVFQAKKRLLEPLGLVEEAAKTAPGKKRPVEPSPQRSPDSSTGIGKKGQQPAKKRLNFGQTGDSESVPDPQPLGEPPATPAAVGPTTMASGGGAPMADNNEGADGVGNSSGNWHCDSQWLGDRVITTSTRTWALPTYNNHLYKQISSQSGASNDNHYFGYSTPWGYFDFNRFHCHFSPRDWQRLINNNWGFRPKRLNFKLFNIQVKEVTTNDGVTTIANNLTSTVQVFSDSEYQLPYVLGSAHQGCLPPFPADVFMIPQYGYLTLNNGSQAVGRSSFYCLEYFPSQMLRTGNNFTFSYTFEDVPFHSSYAHSQSLDRLMNPLIDQYLYYLSRTNTPSGTTTQSRLQFSQAGASDIRDQSRNWLPGPCYRQQRVSKTKTDNNNSNFTWTGASKYNLNGRESIINPGTAMASHKDDEDKFFPMSGVMIFGKESAGASNTALDNVMITDEEEIKATNPVATERFGTVAVNLQSSSTDPATGDVHVMGALPGMVWQDRDVYLQGPIWAKIPHTDGHFHPSPLMGGFGLKHPPPQILIKNTPVPANPPAEFSATKFASFITQYSTGQVSVEIEWELQKENSKRWNPEVQYTSNYAKSANVDFTVDNNGLYTEPRPIGTRYLTRPL

SEQ ID NO: 336 - DNA, 2214 bp, Artificial Sequence
  Description of Artificial Sequence: Synthetic polynucleotide
atggctgccgatggttatcttccagattggctcgaggacaaccttagtgaaggaattcgcgagtggtgggctttgaaacctggagcccctcaacccaaggcaaatcaacaacatcaagacaacgctcgaggtcttgtgcttccgggttacaaataccttggacccggcaacggactcgacaagggggagccggtcaacgcagcagacgcggcggccctcgagcacgacaaggcctacgaccagcagctgcaggcgggtgacaatccgtacctgcggtataaccacgccgacgccgagtttcaggagcgtctgcaagaagatacgtcttttgggggcaaccttggcagagcagtcttccaggccaaaaagaggatccttgagcctcttggtctggttgaggaagcagctaaaacggctcctggaaagaagaggcctgtagatcagtctcctcaggaaccggactcatcatctggtgttggcaaatcgggcaaacagcctgccagaaaaagactaaatttcggtcagactggcgactcagagtcagtcccagaccctcaacctctcggagaaccaccagcagcccccacaagtttgggatctaatacaatggcttcaggcggtggcgcaccaatggcagacaataacgagggtgccgatggggtgggtagttcctcgggaaattggcattgcgattcccaatgactgggggacagagtcatcaccaccagcacccgaacctgggccctgcccacctacaacaatcacctctacaagcaaatctccaacgggacatcgggaggagccaccaacgacaacacctacttcggctacagcaccccctgggggtattttgactttaacagattccactgccacttttcaccacgtgactggcagcgactcatcaacaacaactggggattccggcccaagagactcagcttcaagctcttcaacatccaggtcaaggaggtcacgcagaatgaaggcaccaagaccatcgccaataacctcaccagcaccatccaggtgtttacggactcggagtaccagctgccgtacgttctcggctctgcgcaccagggctgcctccctccgttcccggcggacgtgttcatgattccgcaatacggctacctgacgctcaacaatggcagccaagccgtgggacgttcatccttttactgcctggaatatttcccttctcagatgctgagaacgggcaacaactttaccttcagctacacctttgaggaagtgcctttccacagcagctacgcgcacagccagagcttggaccggctgatgaatcctctgattgaccagtacctgtactacttgtctcggactcaaacaacaggaggcacggcaaatacgcagactctgggcttcagccaaggtgggcctaatacaatggccaatcaggcaaagaactggctgccaggaccctgttaccgccaacaacgcgtctcaacgacaaccgggcaaaacaacaatagcaactttgcctggactgctgggaccaaataccatctgaatggaagaaattcattggctaatcctggcatcgctatggcaacacacaaagacgacgaggagcgtttttttcccagtaacgggatcctgatttttggcaaacaaaatgctgccagagacaatgcggattacagcgatgtcatgctcaccagcgaggaagaaatcaaaaccactaaccctgtggctacagaggaatacggtatcgtggcagataacttgcagcagcaaaacacggctcctcaaattggaactgtcaacagccagggggccttacccggtatggtctggcagaaccgggacgtgtacctgcagggtcccatctgggccaagattcctcacacggacggcaacttccacccgtctccgctgatgggcggctttggcctgaaacatcctccgcctcagatcctgatcaagaacacgcctgtacctgcggatcctccgaccaccttcaaccagtcaaagctgaactctttcatcacgcaatacagcaccggacaggtcagcgtggagatcgagtgggagctgcagaaggaaaacagcaagcgctggaacccggagatccagtacacttccaactattacaagtctaataatgttgaatttgctgttaatactgaaggtgtatatagtgaaccccgccccattggcaccagatacctgactcgtaatctgtaa

SEQ ID NO: 337 - protein, 736 aa, Artificial Sequence
  Description of Artificial Sequence: Synthetic polypeptide
MAADGYLPDWLEDNLSEGIREWWALKPGAPQPKANQQHQDNARGLVLPGYKYLGPGNGLDKGEPVNAADAAALEHDKAYDQQLQAGDNPYLRYNHADAEFQERLQEDTSFGGNLGRAVFQAKKRILEPLGLVEEAAKTAPGKKRPVDQSPQEPDSSSGVGKSGKQPARKRLNFGQTGDSESVPDPQPLGEPPAAPTSLGSNTMASGGGAPMADNNEGADGVGSSSGNWHCDSQLGDRVITTSTRTWALPTYNNHLYKQISNGTSGGATNDNTYFGYSTPWGYFDFNRFHCHFSPRDWQRLINNNWGFRPKRLSFKLFNIQVKEVTQNEGTKTIANNLTSTIQVFTDSEYQLPYVLGSAHQGCLPPFPADVFMIPQYGYLTLNNGSQAVGRSSFYCLEYFPSQMLRTGNNFTFSYTFEEVPFHSSYAHSQSLDRLMNPLIDQYLYYLSRTQTTGGTANTQTLGFSQGGPNTMANQAKNWLPGPCYRQQRVSTTTGQNNNSNFAWTAGTKYHLNGRNSLANPGIAMATHKDDEERFFPSNGILIFGKQNAARDNADYSDVMLTSEEEIKTTNPVATEEYGIVADNLQQQNTAPQIGTVNSQGALPGMVWQNRDVYLQGPIWAKIPHTDGNFHPSPLMGGFGLKHPPPQILIKNTPVPADPPTTFNQSKLNSFITQYSTGQVSVEIEWELQKENSKRWNPEIQYTSNYYKSNNVEFAVNTEGVYSEPRPIGTRYLTRNL

SEQ ID NO: 338 - DNA, 2214 bp, Artificial Sequence
  Description of Artificial Sequence: Synthetic polynucleotide
atggctgccgatggttatcttccagattggctcgaggacaaccttagtgaaggaattcgcgagtggtgggctttgaaacctggagcccctcaacccaaggcaaatcaacaacatcaagacaacgctcgaggtcttgtgcttccgggttacaaataccttggacccggcaacggactcgacaagggggagccggtcaacgcagcagacgcggcggccctcgagcacgacaaggcctacgaccagcagctgcaggcgggtgacaatccgtacctgcggtataaccacgccgacgccgagtttcaggagcgtctgcaagaagatacgtcttttgggggcaaccttggcagagcagtcttccaggccaaaaagaggatccttgagcctcttggtctggttgaggaagcagctaaaacggctcctggaaagaagaggcctgtagatcagtctcctcaggaaccggactcatcatctggtgttggcaaatcgggcaaacagcctgccagaaaaagactaaatttcggtcagactggcgactcagagtcagtcccagaccctcaacctctcggagaaccaccagcagcccccacaagtttgggatctaatacaatggcttcaggcggtggcgcaccaatggcagacaataacgagggtgccgatggggtgggtagttcctcgggaaattggcattgcgattcccaatggctgggggacagagtcatcaccaccagcacccgaacctgggccctgcccacctacaacaatcacctctacaagcaaatctccaacgggacatcgggaggagccaccaacgacaacacctacttcggctacagcaccccctgggggtattttgactttaacagattccactgccacttttcaccacgtgactggcagcgactcatcaacaacaactggggattccggcccaagagactcagcttcaagctcttcaacatccaggtcaaggaggtcacgcagaatgaaggcaccaagaccatcgccaataacctcaccagcaccatccaggtgtttacggactcggagtaccagctgccgtacgttctcggctctgcgcaccagggctgcctccctccgttcccggcggacgtgttcatgattccgcaatacggctacctgacgctcaacaatggcagccaagccgtgggacgttcatccttttactgcctggaatatttcccttctcagatgctgagaacgggcaacaactttaccttcagctacacctttgaggaagtgccttttcacagcagctacgcgcacagccagagcttggaccggctgatgaatcctctgattgaccagtacctgtactacttgtctcggactcaaacaacaggaggcacggcaaatacgcagactctgggcttcagccaaggtgggcctaatacaatggccaatcaggcaaagaactggctgccaggaccctgttaccgccaacaacgcgtctcaacgacaaccgggcaaaacaacaatagcaactttgcctggactgctgggaccaaataccatctgaatggaagaaattcattggctaatcctggcatcgctatggcaacacacaaagacgacgaggagcgtttttttcccagtaacgggatcctgatttttggcaaacaaaatgctgccagagacaatgcggattacagcgatgtcatgctcaccagcgaggaagaaatcaaaaccactaaccctgtggctacagaggaatacggtatcgtggcagataacttgcagcagcaaaacacggctcctcaaattggaactgtcaacagccagggggccttacccggtatggtctggcagaaccgggacgtgtacctgcagggtcccatctgggccaagattcctcacacggacggcaacttccacccgtctccgctgatgggcggctttggcctgaaacatcctccgcctcagatcctgatcaagaacacgcctgtacctgcggatcctccgaccaccttcaaccagtcaaagctgaactctttcatcacgcaatacagcaccggacaggtcagcgtggagatcgagtgggagctgcagaaggaaaacagcaagcgctggaacccggagatccagtacacttccaactattacaagtctaataatgttgaatttgctgttaatactgaaggtgtatatagtgaaccccgccccattggcaccagatacctgactcgtaatctgtaa

SEQ ID NO: 339 - protein, 737 aa, Artificial Sequence; identical to SEQ ID NO: 327
  Description of Artificial Sequence: Synthetic polypeptide

SEQ ID NO: 340 - DNA, 2211 bp, Artificial Sequence
  Description of Artificial Sequence: Synthetic polynucleotide
atggctgccgatggttatcttccagattggctcgaggacaacctctctgagggcattcgcgagtggtgggacttgaaacctggagcccctaaacccaaggcaaatcaacaacatcaggacaacgctcgaggtcttgtgcttccgggttacaaataccttggacccggcaacggactcgacaagggggagccggtcaacgcagcagacgcggcggccctcgagcacgacaaggcctacgaccagcagctcaaggccggagacaacccgtacctcaagtacaaccacgccgacgccgagttccaggagcggctcaaagaagatacgtcttttgggggcaacctcgggcgagcagtcttccaggccaaaaagaggcttcttgaacctcttggtctggttgaggaagcggctaagacggctcctggaaagaagagaccggtagagccatcaccccagcgttctccagactcctctacgggcatcggcaagaaaggccaacagcccgctaaaaagagactcaattttggtcagactggcgactcagagtcagtccccgacccacaacctctcggagaacctccagcaacccccgctgctgtgggacctactacaatggcttcaggcggtggcgcaccaatggcagacaataacgagggtgccgatggagtgggtaattcctcaggaaattggcattgcgattcccaatggctgggcgacagagtcatcaccaccagcaccagaacctgggccctgcccacttacaacaaccatctctacaagcaaatctccagccaatcaggagcttcaaacgacaaccactactttggctacagcaccccttgggggtattttgactttaacagattccactgccacttttcaccacgtgactggcaaagactcatcaacaacaactggggattccgacccaagagactcaacttcaagctcttcaacatccaagtcaaggaggtcacgacgaatgatggcgtcacgaccatcgctaataaccttaccagcacggttcaagtcttctcggactcggagtaccagttgccgtacgtcctcggctctgcgcaccagggctgcctccctccgttcccggcggacgtgttcatgattccgcagtacggctacctaacgctcaacaatggcagccaagccgtgggacgttcatccttttactgcctggaatatttcccttctcagatgctgagaacgggcaacaactttaccttcagctacacttttgaggacgttcctttccacagcagctacgctcacagccagagtctggaccgtctcatgaatcctctcatcgaccagtacctgtattacttgagcagaacaaacactccaagtggaaccaccacgcagtcaaggcttcagttttctcaggccggagcgagtgacattcgggaccagtctaggaactggcttcctggaccctgttaccgccagcagcgcgtttctaaaacaaaaacagacaacaacaacagcaattttacctggactggtgcttcaaaatataaccttaatgggcgtgaatctataatcaaccctggcactgctatggcctcacacaaagacgacgaagacaagttctttcccatgagcggtgtcatgatttttggaaaagagagcgccggagcttcaaacactgcattggacaatgtcatgattacagacgaagaggaaattaaagccactaaccctgtggccaccgaaagatttgggaccgtggcagtcaatttccagagcagcagcacagaccctgcgaccggagatgtgcatgctatgggagcattacctggcatggtgtggcaagatagagacgtgtacctgcagggtcccatttgggccaaaattcctcacacagatggacactttcacccgtctcctcttatgggcggctttggactcaagaacccgcctcctcagatcctcatcaaaaacacgcctgttcctgcgaatcctccggcggagttttcagctacaaagtttgcttcattcatcacccaatactccacaggacaagtgagtgtggaaattgaatgggagctgcagaaagaaaacagcaagcgctggaatcccgaagtgcagtacacatccaattatgcaaaatctgccaacgttgattttactgtggacaacaatggactttatactgagcctcgccccattggcacccgttaccttacccgtcccctgtaa

SEQ ID NO: 341 - protein, 736 aa, Artificial Sequence
  Description of Artificial Sequence: Synthetic polypeptide
MAADGYLPDWLEDNLSEGIREWWDLKPGAPKPKANQQHQDNARGLVLPGYKYLGPGNGLDKGEPVNAADAAALEHDKAYDQQLKAGDNPYLKYNHADAEFQERLKEDTSFGGNLGRAVFQAKKRLLEPLGLVEEAAKTAPGKKRPVEPSPQRSPDSSTGIGKKGQQPAKKRLNFGQTGDSESVPDPQPLGEPPATPAAVGPTTMASGGGAPMADNNEGADGVGNSSGNWHCDSQWLGDRVITTSTRTWALPTYNNHLYKQISSQSGASNDNHYFGYSTPWGYFDFNRFHCHFSPRDWQRLINNNWGFRPKRLNFKLFNIQVKEVTTNDGVTTIANNLTSTVQVFSDSEYQLPYVLGSAHQGCLPPFPADVFMIPQYGYLTLNNGSQAVGRSSFYCLEYFPSQMLRTGNNFTFSYTFEDVPFHSSYAHSQSLDRLMNPLIDQYLYYLSRTNTPSGTTTQSRLQFSQAGASDIRDQSRNWLPGPCYRQQRVSKTKTDNNNSNFTWTGASKYNLNGRESIINPGTAMASHKDDEDKFFPMSGVMIFGKESAGASNTALDNVMITDEEEIKATNPVATERFGTVAVNFQSSSTDPATGDVHAMGALPGMVWQDRDVYLQGPIWAKIPHTDGHFHPSPLMGGFGLKNPPPQILIKNTPVPANPPAEFSATKFASFITQYSTGQVSVEIEWELQKENSKRWNPEVQYTSNYAKSANVDFTVDNNGLYTEPRPIGTRYLTRPL

SEQ ID NO: 342 - DNA, 2211 bp, Artificial Sequence
  Description of Artificial Sequence: Synthetic polynucleotide
atggctgccgatggttatcttccagattggctcgaggacaaccttagtgaaggaattcgcgagtggtgggcgctgaaacctggagccccgaagcccaaagccaaccagcaaaagcaggacgacggccggggtctggtgcttccgggttacaaatacctcggacccggtaacggactcgacaaaggagagccggtcaacgaggcggacgcggcagccctcgagcacgacaaggcctacgaccagcagctcaaagcgggtgacaatccgtacctgcggtataaccacgccgacgccgagtttcaggagcgtctgcaagaagatacgtcttttgggggcaacctcgggcgagcagtcttccaggccaagaagcgggttctcgaacctctcggtctggttgaggaaggcgctaagacggctcccggaaagaaacgtccggtagagcagtcgccacaagagccagactcctctacgggcatcggcaagaaaggccaacagcccgccagaaaaagactcaatttcggtcagactggcgactcagagtcagttccagaccctcaacctctcggagaacctccagcagcgccctctggtgtgggacctactacaatggcttcaggcggtggcgcaccaatggcagacaataacgaaggcgccgacggagtgggtaatgcctcaggaaattggcattgcgattccacatggctgggcgacagagtcatcaccaccagcacccgaacatgggccttgcccacctataacaaccacctctacaagcaaatctccagtgcttcaacgggggccagcaacgacaacacctacttcggctacagcaccccctgggggtattttgatttcaacagattccactgccatttctcaccacgtgactggcagcgactcatcaacaacaattggggattccggcccaagagactcaacttcaaactcttcaacatccaagtcaaggaggtcacgacgaatgatggcgtcacgaccatcgctaataaccttaccagcacggttcaagtcttctcggactcggagtaccagttgccgtacgtcctcggctctgcgcaccagggctgcctccctccgttcccggcggacgtgttcatgattccgcagtacggctacctaacgctcaacaatggcagccaggcagtgggacggtcatccttttactgcctggaatatttcccatcgcagatgctgagaacgggcaataactttaccttcagctacaccttcgaggacgtgcctttccacagcagctacgcgcacagccagagcctggaccggctgatgaatcctctcatcgaccagtacctgtattacctgaacagaactcagaatcagtccggaagtgcccaaaacaaggacttgctgtttagccgggggtctccagctggcatgtctgttcagcccaaaaactggctacctggaccctgttatcggcagcagcgcgtttctaaaacaaaaacagacaacaacaacagcaattttacctggactggtgcttcaaaatataacctcaatgggcgtgaatccatcatcaaccctggcactgctatggcctcacacaaagacgacgaagacaagttctttcccatgagcggtgtcatgatttttggaaaagagagcgccggagcttcaaacactgcattggacaatgtcatgattacagacgaagaggaaattaaagccactaaccctgtggccaccgaaagatttgggaccgtggcagtcaatttccagagcagcagcacagaccctgcgaccggagatgtgcatgttatgggagccttacctggaatggtgtggcaagacagagacgtatacctgcagggtcctatttgggccaaaattcctcacacagatggacactttcacccgtctcctcttatgggcggctttggactcaagaacccgcctcctcagatcctcatcaaaaacacgcctgttcctgcgaatcctccggcagagttttcggctacaaagtttgcttcattcatcacccagtattccacaggacaagtgagcgtggagattgaatgggagctgcagaaagaaaacagcaaacgctggaatcccgaagtgcagtatacatctaactatgcaaaatctgccaacgttgatttcactgtggacaacaatggactttatactgagcctcgccccattggcacccgttacctcacccgtcccctgtaa

SEQ ID NO: 343 - protein, 736 aa, Artificial Sequence
  Description of Artificial Sequence: Synthetic polypeptide
MAADGYLPDWLEDNLSEGIREWWALKPGAPKPKANQQKQDDGRGLVLPGYKYLGPGNGLDKGEPVNEADAAALEHDKAYDQQLKAGDNPYLRYNHADAEFQERLQEDTSFGGNLGRAVFQAKKRVLEPLGLVEEGAKTAPGKKRPVEQSPQEPDSSTGIGKKGQQPARKRLNFGQTGDSESVPDPQPLGEPPAAPSGVGPTTMASGGGAPMADNNEGADGVGNASGNWHCDSTWLGDRVITTSTRTWALPTYNNHLYKQISSASTGASNDNTYFGYSTPWGYFDFNRFHCHFSPRDWQRLINNNWGFRPKRLNFKLFNIQVKEVTTNDGVTTIANNLTSTVQVFSDSEYQLPYVLGSAHQGCLPPFPADVFMIPQYGYLTLNNGSQAVGRSSFYCLEYFPSQMLRTGNNFTFSYTFEDVPFHSSYAHSQSLDRLMNPLIDQYLYYLNRTQNQSGSAQNKDLLFSRGSPAGMSVQPKNWLPGPCYRQQRVSKTKTDNNNSNFTWTGASKYNLNGRESIINPGTAMASHKDDEDKFFPMSGVMIFGKESAGASNTALDNVMITDEEEIKATNPVATERFGTVAVNFQSSSTDPATGDVHVMGALPGMVWQDRDVYLQGPIWAKIPHTDGHFHPSPLMGGFGLKNPPPQILIKNTPVPANPPAEFSATKFASFITQYSTGQVSVEIEWELQKENSKRWNPEVQYTSNYAKSANVDFTVDNNGLYTEPRPIGTRYLTRPL

SEQ ID NO: 344 - DNA, 2205 bp, Artificial Sequence
  Description of Artificial Sequence: Synthetic polynucleotide
atggctgctgacggttatcttccagattggctcgaggacaacctttctgaaggcattcgtgagtggtgggctctgaaacctggagtccctcaacccaaagcgaaccaacaacaccaggacaaccgtcggggtcttgtgcttccgggttacaaatacctcggacccggtaacggactcgacaaaggagagccggtcaacgaggcggacgcggcagccctcgaacacgacaaggcctacgaccagcagctcaaggccggagacaacccgtacctcaagtacaaccacgccgacgccgagttccaggagcggctcaaagaagatacgtcttttgggggcaacctcgggcgagcagtcttccaggccaaaaagaggcttcttgaacctcttggtctggttgaggaagcggctaagacggctcctggaaagaagaggcctgtagagcagtctcctcaggaaccggactcctccgcgggtattggcaaatcgggtgcacagcccgctaaaaagagactcaatttcggtcagactggcgacacagagtcagtcccagaccctcaaccaatcggagaacctcccgcagccccctcaggtgtgggatctcttacaatggcttcaggtggtggcgcaccagtggcagacaataacgaaggtgccgatggagtgggtagttcctcgggaaattggcattgcgattcccaatggctgggggacagagtcatcaccaccagcacccgaacctgggccctgcccacctacaacaaccacctctacaaacaaatttccagccaatcaggagcctcgaacgacaatcactactttggctacagcaccccttgggggtattttgacttcaacagattccactgccacttttcaccacgtgactggcagcgactcatcaacaacaactggggattccggcccaagagactcagcttcaagctcttcaacatccaggtcaaagaggttacggacaacaatggagtcaagaccatcgccaataaccttaccagcacggtccaggtcttcacggactcagactatcagctcccgtacgtgctcgggtcggctcacgagggctgcctcccgccgttcccagcggacgttttcatgattcctcagtacgggtatctgacgcttaatgatggaagccaggccgtgggtcgttcgtccttttactgcctggaatatttcccgtcgcaaatgctaagaacgggtaacaacttccagttcagctacgagtttgagaacgtacctttccatagcagctacgctcacagccaaagcctggaccgactaatgaatccactcatcgaccaatacttgtactatctctcaaagactattaacggttctggacagaatcaacaaacgctaaaattcagtgtggccggacccagcaacatggctgtccagggaagaaactacatacctggacccagctaccgacaacaacgtgtctcaaccactgtgactcaaaacaacaacagcgaatttgcttggcctggagcttcttcttgggctctcaatggacgtaatagcttgatgaatcctggacctgctatggccagccacaaagaaggagaggaccgtttctttcctttgtctggatctttaatttttggcaaacaaggaactggaagagacaacgtggatgcggacaaagtcatgataaccaacgaagaagaaattaaaactactaacccggtagcaacggagtcctatggacaagtggccacaaaccaccagagtgcccaagcacaggcgcagaccggctgggttcaaaaccaaggaatacttccgggtatggtttggcaggacagagatgtgtacctgcaaggacccatctgggccaagattcctcacacggacggcaacttccacccgtctccgctgatgggcggctttggcctgaaacatcctccgcctcagatcctgatcaagaacacgcctgtacctgcggatcctccgaccaccttcaaccagtcaaagctgaactctttcatcacgcaatacagcaccggacaggtcagcgtggaaattgaatgggagctgcagaaggaaaacagcaagcgctggaatcccgaagtgcagtatacatctaactatgcaaaatctgccaacgttgatttcactgtggacaacaatggactttatactgagcctcgccccattggcacccgttacctcacccgtcccctgtaa

SEQ ID NO: 345 - protein, 734 aa, Artificial Sequence
  Description of Artificial Sequence: Synthetic polypeptide
MAADGYLPDWLEDNLSEGIREWWALKPGVPQPKANQQHQDNRRGLVLPGYKYLGPGNGLDKGEPVNEADAAALEHDKAYDQQLKAGDNPYLKYNHADAEFQERLKEDTSFGGNLGRAVFQAKKRLLEPLGLVEEAAKTAPGKKRPVEQSPQEPDSSAGIGKSGAQPAKKRLNFGQTGDTESVPDPQPIGEPPAAPSGVGSLTMASGGGAPVADNNEGADGVGSSSGNWHCDSQWLGDRVITTSTRTWALPTYNNHLYKQISSQSGASNDNHYFGYSTPWGYFDFNRFHCHFSPRDWQRLINNNWGFRPKRLSFKLFNIQVKEVTDNNGVKTIANNLTSTVQVFTDSDYQLPYVLGSAHEGCLPPFPADVFMIPQYGYLTLNDGSQAVGRSSFYCLEYFPSQMLRTGNNFQFSYEFENVPFHSSYAHSQSLDRLMNPLIDQYLYYLSKTINGSGQNQQTLKFSVAGPSNMAVQGRNYIPGPSYRQQRVSTTVTQNNNSEFAWPGASSWALNGRNSLMNPGPAMASHKEGEDRFFPLSGSLIFGKQGTGRDNVDADKVMITNEEEIKTTNPVATESYGQVATNHQSAQAQAQTGWVQNQGILPGMVWQDRDVYLQGPIWAKIPHTDGNFHPSPLMGGFGLKHPPPQILIKNTPVPADPPTTFNQSKLNSFITQYSTGQVSVEIEWELQKENSKRWNPEVQYTSNYAKSANVDFTVDNNGLYTEPRPIGTRYLTRPL

SEQ ID NO: 346 - DNA, 2211 bp, Artificial Sequence
  Description of Artificial Sequence: Synthetic polynucleotide
atggctgccgatggttatcttccagattggctcgaggacaacctctctgagggcattcgcgagtggtgggcgctgaaacctggagccccgaagcccaaagccaaccagcaaaagcaggacgacggccggggtctggtgcttcctggctacaagtacctcggacccttcaacggactcgacaagggggagcccgtcaacgcggcggacgcagcggccctcgagcacgacaaggcctacgaccagcagctgcaggcgggtgacaatccgtacctgcggtataaccacgccgacgccgagtttcaggagcgtctgcaagaagatacgtcttttgggggcaacctcgggcgagcagtcttccaggccaagaagtgggttctcgaacctctcggtctggttgaggaaggcgctaagacggctcctggaaagaaacgtccggtagagcagtcgccacaagagccagactcctcctcgggcatcggcaagacaggccagcagcccgctaaaaagagactcaattttggtcagactggcgactcagagtcagtccccgacccacaacctctcggagaacctccagcaacccccgctgctgtgggacctactacaatggcttcaggcggtggcgcaccaatggcagacaataacgaaggcgccgacggagtgggtaatgcctcaggaaattggcattgcgattccacatggctgggcgacagagtcatcaccaccagcacccgcacctgggccttgcccacctacaataaccacctctacaagcaaatctccagtgcttcaacgggggccagcaacgacaaccactacttcggctacagcaccccctgggggtattttgatttcaacagattccactgccatttctcaccacgtgactggcagcgactcatcaacaacaattggggattccggcccaagagactcaacttcaagctcttcaacatccaagtcaaggaggtcacgacgaatgatggcgtcacaaccatcgctaataaccttaccagcacggttcaagtcttctcggactcggagtaccagcttccgtacgtcctcggctctgcgcaccagggctgcctccctccgttcccggcggacgtgttcatgattccgcaatacggctacctgacgctcaacaatggcagccaagccgtgggacgttcatccttttactgcctggaatatttcccttctcagatgctgagaacgggcaacaactttaccttcagctacacctttgaggaagtgcctttccacagcagctacgcgcacagccagagcctggaccggctgatgaatcctctcatcgaccaatacctgtattacctgaacagaactcaaaatcagtccggaagtgcccaaaacaaggacttgctgtttagccgtgggtctccagctggcatgtctgttcagcccaaaaactggctacctggaccctgttatcggcagcagcgcgtttctaaaacaaaaacagacaacaacaacagcaattttacctggactggtgcttcaaaatataacctcaatgggcgtgaatccatcatcaaccctggcactgctatggcctcacacaaagacgacgaagacaagttctttcccatgagcggtgtcatgatttttggaaaggagagcgccggagcttcaaacactgcattggacaatgtcatgatcaccgacgaagaggaaatcaaagccactaaccccgtggccaccgaaagatttgggactgtggcagtcaatctccagagcagcagcacagaccctgcgaccggagatgtgcatgttatgggagccttacctggcatggtgtggcaagatagagacgtgtacctgcagggtcccatttgggccaaaattcctcacacagatggacactttcacccgtctcctcttatgggcggctttggactcaagaacccgcctcctcagatcctcatcaaaaacacgcctgttcctgcgaatcctccggcggagttttcagctacaaagtttgcttcattcatcacccaatactccacaggacaagtgagtgtggaaattgaatgggagctgcagaaagaaaacagcaagcgctggaatcccgaagtgcagtacacatccaattatgcaaaatctgccaacgttgattttactgtggacaacaatggactttatactgagcctcgccccattggcacccgttacctcacccgtcccctgtaa

SEQ ID NO: 347 - protein, 736 aa, Artificial Sequence
  Description of Artificial Sequence: Synthetic polypeptide
MAADGYLPDWLEDNLSEGIREWWALKPGAPKPKANQQKQDDGRGLVLPGYKYLGPFNGLDKGEPVNAADAAALEHDKAYDQQLQAGDNPYLRYNHADAEFQERLQEDTSFGGNLGRAVFQAKKWVLEPLGLVEEGAKTAPGKKRPVEQSPQEPDSSSGIGKTGQQPAKKRLNFGQTGDSESVPDPQPLGEPPATPAAVGPTTMASGGGAPMADNNEGADGVGNASGNWHCDSTWLGDRVITTSTRTWALPTYNNHLYKQISSASTGASNDNHYFGYSTPWGYFDFNRFHCHFSPRDWQRLINNNWGFRPKRLNFKLFNIQVKEVTTNDGVTTIANNLTSTVQVFSDSEYQLPYVLGSAHQGCLPPFPADVFMIPQYGYLTLNNGSQAVGRSSFYCLEYFPSQMLRTGNNFTFSYTFEEVPFHSSYAHSQSLDRLMNPLIDQYLYYLNRTQNQSGSAQNKDLLFSRGSPAGMSVQPKNWLPGPCYRQQRVSKTKTDNNNSNFTWTGASKYNLNGRESIINPGTAMASHKDDEDKFFPMSGVMIFGKESAGASNTALDNVMITDEEEIKATNPVATERFGTVAVNLQSSSTDPATGDVHVMGALPGMVWQDRDVYLQGPIWAKIPHTDGHFHPSPLMGGFGLKNPPPQILIKNTPVPANPPAEFSATKFASFITQYSTGQVSVEIEWELQKENSKRWNPEVQYTSNYAKSANVDFTVDNNGLYTEPRPIGTRYLTRPL

SEQ ID NO: 348 - DNA, 2214 bp, Artificial Sequence
  Description of Artificial Sequence: Synthetic polynucleotide
atggctgccgatggttatcttccagattggctcgaggacaaccttagtgaaggaattcgcgagtggtgggctttgaaacctggagcccctcaacccaaggcaaatcaacaacatcaagacaacgctcgaggtcttgtgcttccgggttacaaataccttggacccggcaacggactcgacaagggggagccggtcaacgcagcagacgcggcggccctcgagcacgacaaggcctacgaccagcagctgcaggcgggtgacaatccgtacctgcggtataaccacgccgacgccgagtttcaggagcgtctgcaagaagatacgtcttttgggggcaaccttggcagagcagtcttccaggccaaaaagaggatccttgagcctcttggtctggttgaggaagcagctaaaacggctcctggaaagaagaggcctgtagatcagtctcctcaggaaccggactcatcatctggtgttggcaaatcgggcaaacagcctgccagaaaaagactaaatttcggtcagactggcgactcagagtcagtcccagaccctcaacctctcggagaaccaccagcagcccccacaagtttgggatctaatacaatggcttcaggcggtggcgcaccaatggcagacaataacgagggtgccgatggggtgggtagttcctcgggaaattggcattgcgattcccaatggctgggggacagagtcatcaccaccagcacccgaacctgggccctgcccacctacaacaatcacctctacaagcaaatctccaacgggacatcgggaggagccaccaacgacaacacctacttcggctacagcaccccctgggggtattttgactttaacagattccactgccacttttcaccacgtgactggcagcgactcatcaacaacaactggggattccggcccaagagactcagcttcaagctcttcaacatccaggtcaaggaggtcacgcagaatgaaggcaccaagaccatcgccaataacctcaccagcaccatccaggtgtttacggactcggagtaccagctgccgtacgttctcggctcggcgcaccagggctgcctccctccgttcccggcggacgtcttcatggtgccacagtatggatacctgacgctcaacaatggcagccaagccgtgggacgttcatccttttactgcctggaatatttcccttctcagatgctgagaacgggcaacaactttaccttcagctacacctttgaggaagtgcctttccacagcagctacgcgcacagccagagcttggaccggctgatgaatcctctgattgaccagtacctgtactacttgtctcggactcaaacaacaggaggcacggcaaatacgcagactctgggcttcagccaaggtgggcctaatacaatggccaatcaggcaaagaactggctgccaggaccctgttaccgccaacaacgcgtctcaacgacaaccgggcaaaacaacaatagcaactttgcctggactgctgggaccaaataccatctgaatggaagaaattcattggctaatcctggcatcgctatggcaacacacaaagacgacgaggagcgtttttttcccagtaacgggatcctgatttttggcaaacaaaatgctgccagagacaatgcggattacagcgatgtcatgctcaccagcgaggaagaaatcaaaaccactaaccctgtggctacagaggaatacggtatcgtggcagataacttgcagcagcaaaacacggctcctcaaattggaactgtcaacagccagggggacttacccggtatggtctggcagaaccgggacgtgtacctgcagggtcccatctgggccaagattcctcacacggacggcaacttccacccgtctccgctgatgggcggctttggcctgaaacatcctccgcctcagatcctgatcaagaacacgcctgtacctgcggatcctccgaccaccttcaaccagtcaaagctgaactctttcatcacgcaatacagcaccggacaggtcagcgtggagatcgagtgggagctgcagaaggaaaacagcaagcgctggaacccggagatccagtacacttccaactattacaagtctaataatgttgaatttgctgttaatactgaaggtgtatatagtgaaccccgccccattggcaccagatacctgactcgtaatctgtaa

SEQ ID NO: 349 - protein, 737 aa, Artificial Sequence
  Description of Artificial Sequence: Synthetic polypeptide
MAADGYLPDWLEDNLSEGIREWWALKPGAPQPKANQQHQDNARGLVLPGYKYLGPGNGLDKGEPVNAADAAALEHDKAYDQQLQAGDNPYLRYNHADAEFQERLQEDTSFGGNLGRAVFQAKKRILEPLGLVEEAAKTAPGKKRPVDQSPQEPDSSSGVGKSGKQPARKRLNFGQTGDSESVPDPQPLGEPPAAPTSLGSNTMASGGGAPMADNNEGADGVGSSSGNWHCDSQWLGDRVITTSTRTWALPTYNNHLYKQISNGTSGGATNDNTYFGYSTPWGYFDFNRFHCHFSPRDWQRLINNNWGFRPKRLSFKLFNIQVKEVTQNEGTKTIANNLTSTIQVFTDSEYQLPYVLGSAHQGCLPPFPADVFMVPQYGYLTLNNGSQAVGRSSFYCLEYFPSQMLRTGNNFTFSYTFEEVPFHSSYAHSQSLDRLMNPLIDQYLYYLSRTQTTGGTANTQTLGFSQGGPNTMANQAKNWLPGPCYRQQRVSTTTGQNNNSNFAWTAGTKYHLNGRNSLANPGIAMATHKDDEERFFPSNGILIFGKQNAARDNADYSDVMLTSEEEIKTTNPVATEEYGIVADNLQQQNTAPQIGTVNSQGDLPGMVWQNRDVYLQGPIWAKIPHTDGNFHPSPLMGGFGLKHPPPQILIKNTPVPADPPTTFNQSKLNSFITQYSTGQVSVEIEWELQKENSKRWNPEIQYTSNYYKSNNVEFAVNTEGVYSEPRPIGTRYLTRNL

SEQ ID NO: 350 - DNA, 2205 bp, Artificial Sequence
  Description of Artificial Sequence: Synthetic polynucleotide
atggctgctgacggttatcttccagattggctcgaggacaacctttctgaaggcattcgtgagtggtgggctctgaaacctggagtccctcaacccaaagcgaaccaacaacaccaggacaactgtcggggtcttgtgcttccgggttacaaatacctcggacccggtaacggactcgacaaaggagagccggtcaacgaggcggacgcggcagccctcgaacacgacaaggcctacgaccagcagctcaaggccggagacaacccgtacctcaagtacaaccacgccgacgccgagttccaggagcggctcaaagaagatacgtcttttgggggcaacctcgggcgagcagtcttccagaccaaaaagaggcttcttgaacctcttggtctggttgaggaagcggctaagacggctcctggaaagaagaggcctgtagagcagtctcctcaggaaccggactcctccgcgggtattggcaaatcgggtgcacagcccgctaaaaagagactcaatttcggtcagactggcgacacagagtcagtcccagaccctcaaccaatcggagaacctcccgcagccccctcaggtgtgggatctcttacaatggcttcaggtggtggcgcaccagtggcagacaataacgaaggtgccgatggagtgggtagttcctcgggaaattggcattgcgattcccaatggctgggggacagagtcatcaccaccagcacccgaacctgggccctgcccacctacaacaaccacctctacaaacaaatttccagccaatcaggagcctcgaacgacaatcactactttggctacagcaccccttgggggtattttgacttcaacagattccactgccacttttcaccacgtgactggcagcgactcatcaacaacaactggggattccggcccaagagactcagcttcaagctcttcaacatccaggtcaaagaggttacggacaacaatggagtcaagaccatcgccaataaccttaccagcacggtccaggtcttcacggactcagactatcagctcccgtacgtgctcgggtcggctcacgagggctgcctcccgccgttcccagcggacgttttcatgattcctcagtacgggtatctgacgcttaatgatggaagccaggccgtgggtcgttcgtccttttactgcctggaatatttcccgtcgcaaatgctaagaacgggtaacaacttccagttcagctacgagtttgagaacgtacctttccatagcagctacgctcacagccaaagcctggaccgactaatgaatccactcatcgaccaatacttgtactatctctcaaagactattaacggttctggacagaatcaacaaacgctaaaattcagtgtggccggacccagcaacatggctgtccagggaagaaactacatacctggacccagctaccgacaacaacgtgtctcaaccactgtgactcaaaacaacaacagcgaatttgcttggcctggagcttcttcttgggctctcaatggacgtaatagcttgatgaatcctggacctgctatggccagccacaaagaaggagaggaccgtttctttcctttgtctggatctttaatttttggcaaacaaggaactggaagagacaacgtggatgcggacaaagtcatgataaccaacgaagaagaaattaaaactactaacccggtagcaacggagtcctatggacaagtggccacaaaccaccagagtgcccaagcacaggcgcagaccggctgggttcaaaaccaaggaatacttccgggtatggtttggcaggacagagatgtgtacctgcaaggacccatctgggccaagattcctcacacggacggcaacttccacccgtctccgctgatgggcggctttggcctgaaacatcctccgcctcagatcctgatcaagaacacgcctgttcctgcgaatcctccggcggagttttcagctacaaagtttgcttcattcatcacccagtactccacaggacaagtgagtgtggaaattgaatgggagctgcagaaagaaaacagcaagcgctggaatcccgaagtgcagtacacatccaattatgcaaaatctgccaacgttgattttactgtggacaacaatggactttatactgagcctcgccccattggcacccgttaccttaccaaacctctgtaa

SEQ ID NO: 351 - protein, 734 aa, Artificial Sequence
  Description of Artificial Sequence: Synthetic polypeptide
MAADGYLPDWLEDNLSEGIREWWALKPGVPQPKANQQHQDNCRGLVLPGYKYLGPGNGLDKGEPVNEADAAALEHDKAYDQQLKAGDNPYLKYNHADAEFQERLKEDTSFGGNLGRAVFQTKKRLLEPLGLVEEAAKTAPGKKRPVEQSPQEPDSSAGIGKSGAQPAKKRLNFGQTGDTESVPDPQPIGEPPAAPSGVGSLTMASGGGAPVADNNEGADGVGSSSGNWHCDSQWLGDRVITTSTRTWALPTYNNHLYKQISSQSGASNDNHYFGYSTPWGYFDFNRFHCHFSPRDWQRLINNNWGFRPKRLSFKLFNIQVKEVTDNNGVKTIANNLTSTVQVFTDSDYQLPYVLGSAHEGCLPPFPADVFMIPQYGYLTLNDGSQAVGRSSFYCLEYFPSQMLRTGNNFQFSYEFENVPFHSSYAHSQSLDRLMNPLIDQYLYYLSKTINGSGQNQQTLKFSVAGPSNMAVQGRNYIPGPSYRQQRVSTTVTQNNNSEFAWPGASSWALNGRNSLMNPGPAMASHKEGEDRFFPLSGSLIFGKQGTGRDNVDADKVMITNEEEIKTTNPVATESYGQVATNHQSAQAQAQTGWVQNQGILPGMVWQDRDVYLQGPIWAKIPHTDGNFHPSPLMGGFGLKHPPPQILIKNTPVPANPPAEFSATKFASFITQYSTGQVSVEIEWELQKENSKRWNPEVQYTSNYAKSANVDFTVDNNGLYTEPRPIGTRYLTKPL

SEQ ID NO: 352 - DNA, 2211 bp, Artificial Sequence
  Description of Artificial Sequence: Synthetic polynucleotide
atggctgccgatggttatcttccagattggctcgaggacaacctctctgagggcattcgcgagtggtgggacttgaaacctggagcccctaaacccaaggcaaatcaacaacatcaggacaacgctcgaggtcttgtgcttccgggttacaaataccttggacccggcaacggactcgacaagggggagccggtcaacgcagcagacgcggcggccctcgagcacgacaaggcctacgaccagcagctcaaggccggagacaacccgtacctcaagtacaaccacgccgacgccgagttccaggagcggctcaaagaagatacgtcttttgggggcaacctcgggcgagcagtcttccaggccaaaaagaggcttcttgaacctcttggtctggttgaggaagcggctaagacggctcctggaaagaagagaccggtagagccatcaccccagcgttctccagactcctctacgggcatcggcaagaaaggccaacagcccgctaaaaagagactcaattttggtcagactggcgactcagagtcagtccccgacccacaacctctcggagaacctccagcaacccccgctgctgtgggacctactacaatggcttcaggcggtggcgcaccaatggcagacaataacgagggtgccgatggagtgggtaattcctcaggaaattggcattgcgattcccaatggctgggcgacagagtcatcaccaccagcaccagaacctgggccctgcccacttacaacaaccatctctacaagcaaatctccagccaatcaggagcttcaaacgacaaccactactttggctacagcaccccttgggggtattttgactttaacagattccactgccacttttcaccacgtgactggcaaagactcatcaacaacaactggggattccgacccaagagactcaacttcaagctcttcaacatccaagtcaaggaggtcacgacgaatgatggcgtcacgaccatcgctaataaccttaccagcacggttcaagtcttctcggactcggagtaccagttgccgtacgtcctcggctctgcgcaccagggctgcctccctccgttcccggcggacgtgttcatgattccgcagtacggctacctaacgctcaacaatggcagccaagccgtgggacgttcatccttttactgcctggaatatttcccttctcagatgctgagaacgggcaacaactttaccttcagctacacttttgaggacgttcctttccacagcagctacgctcacagccagagtctggaccgtctcatgaatcctctcatcgaccagtacctgtattacttgagcagaacaaacactccaagtggaaccaccacgcagtcaaggcttcagttttctcaggccggagcgagtgacattcgggaccagtctaggaactggcttcctggaccctgttaccgccagcagcgcgtttctaaaacaaaaacagacaacaacaacagcaattttacctggactggtgcttcaaaatataaccttaatgggcgtgaatctataatcaaccctggcactgctatggcctcacacaaagacgacgaagacaagttctttcccatgagcggtgtcatgatttttggaaaagagagcgccggagcttcaaacactgcattggacaatgtcatgatcacagacgaagaggaaatcaaagccactaaccccgtggccaccgaaagatttgggactgtggcagtcaatctccagagcagcagcacagaccctgcgaccggagatgtgcatgttatgggagcattacctggcatggtgtggcaagatagagacgtgtacctgcagggtcccatttgggccaaaattcctcacacagatggacactttcacccgtctcctcttatgggcggctttggactcaagaacccgcctcctcagatcctcatcaaaaacacgcctgttcctgcgaatcctccggcggagttttcagctacaaagtttgcttcattcatcacccaatactccacaggacaagtgagtgtggaaattgaatgggagctgcagaaagaaaacagcaagcgctggaatcccgaagtgcagtacacatccaattatgcaaaatctgccaacgttgattttactgtggacaacaatggactttatactgagcctcgccccattggcacccgttaccttacccgtcccctgtaa

SEQ ID NO: 353 - protein, 736 aa, Artificial Sequence
  Description of Artificial Sequence: Synthetic polypeptide
MAADGYLPDWLEDNLSEGIREWWDLKPGAPKPKANQQHQDNARGLVLPGYKYLGPGNGLDKGEPVNAADAAALEHDKAYDQQLKAGDNPYLKYNHADAEFQERLKEDTSFGGNLGRAVFQAKKRLLEPLGLVEEAAKTAPGKKRPVEPSPQRSPDSSTGIGKKGQQPAKKRLNFGQTGDSESVPDPQPLGEPPATPAAVGPTTMASGGGAPMADNNEGADGVGNSSGNWHCDSQWLGDRVITTSTRTWALPTYNNHLYKQISSQSGASNDNHYFGYSTPWGYFDFNRFHCHFSPRDWQRLINNNWGFRPKRLNFKLFNIQVKEVTTNDGVTTIANNLTSTVQVFSDSEYQLPYVLGSAHQGCLPPFPADVFMIPQYGYLTLNNGSQAVGRSSFYCLEYFPSQMLRTGNNFTFSYTFEDVPFHSSYAHSQSLDRLMNPLIDQYLYYLSRTNTPSGTTTQSRLQFSQAGASDIRDQSRNWLPGPCYRQQRVSKTKTDNNNSNFTWTGASKYNLNGRESIINPGTAMASHKDDEDKFFPMSGVMIFGKESAGASNTALDNVMITDEEEIKATNPVATERFGTVAVNLQSSSTDPATGDVHVMGALPGMVWQDRDVYLQGPIWAKIPHTDGHFHPSPLMGGFGLKNPPPQILIKNTPVPANPPAEFSATKFASFITQYSTGQVSVEIEWELQKENSKRWNPEVQYTSNYAKSANVDFTVDNNGLYTEPRPIGTRYLTRPL

SEQ ID NO: 354 - DNA, 2214 bp, Artificial Sequence; identical to SEQ ID NO: 326
  Description of Artificial Sequence: Synthetic polynucleotide

SEQ ID NO: 355 - protein, 737 aa, Artificial Sequence; identical to SEQ ID NO: 327
  Description of Artificial Sequence: Synthetic polypeptide

SEQ ID NO: 356 - DNA, 2205 bp, Artificial Sequence
  Description of Artificial Sequence: Synthetic polynucleotide
atggctgctgacggttatcttccagattggctcgaggacaacctttctgaaggcattcgtgagtggtgggctctgaaacctggagtccctcaacccaaagcgaaccaacaacaccaggacaaccgtcggggtcttgtgcttccgggttacaaatacctcggacccggtaacggactcgacaaaggagagccggtcaacgaggcggacgcggcagccctcgaacacgacaaggcctacgaccagcagctcaaggccggagacaacccgtacctcaagtacaaccacgccgacgccgagttccaggagcggctcaaagaagatacgtcttttgggggcaacctcgggcgagcagtcttccaggccaaaaagaggcttcttgaacctcttggtctggttgaggaagcggctaagacggctcctggaaagaagaggcctgtagagcagtctcctcaggaaccggactcctccgcgggtattggcaaatcgggtgcacagcccgctaaaaagagactcaatttcggtcagactggcgacacagagtcagtcccagaccctcaaccaatcggagaacctcccgcagccccctcaggtgtgggatctcttacaatggcttcaggtggtggcgcaccagtggcagacaataacgaaggtgccgatggagtgggtagttcctcgggaaattggcattgcgattcccaatggctgggggacagagtcatcaccaccagcacccgaacctgggccctgcccacctacaacaaccacctctacaaacaaatttccagccaatcaggagcctcgaacgacaatcactactttggctacagcaccccttgggggtattttgacttcaacagattccactgccacttttcaccacgtgactggcagcgactcatcaacaacaactggggattccggcccaagagactcagcttcaagctcttcaacatccaggtcaaagaggttacggacaacaatggagtcaagaccatcgccaataaccttaccagcacggtccaggtcttcacggactcagactatcagctcccgtacgtgctcgggtcggctcacgagggctgcctcccgccgttcccagcggacgttttcatgattcctcagtacgggtatctgacgcttaatgatggaagccaggccgtgggtcgttcgtccttttactgcctggaatatttcccgtcgcaaatgctaagaacgggtaacaacttccagttcagctacgagtttgagaacgtacctttccatagcagctacgctcacagccaaagcctggaccgactaatgaatccactcatcgaccaatacttgtactatctctcaaagactattaacggttctggacagaatcaacaaacgctaaaattcagtgtggccggacccagcaacatggctgtccagggaagaaactacatacctggacccagctaccgacaacaacgtgtctcaaccactgtgactcaaaacaacaacagcgaatttgcttggcctggagcttcttcttgggctctcaatggacgtaatagcttgatgaatcctggacctgctatggccagccacaaagaaggagaggaccgtttctttcctttgtctggatctttaatttttggcaaacaaggaactggaagagacaacgtggatgcggacaaagtcatgataaccaacgaagaagaaattaaaactactaacccggtagcaacggagtcctatggacaagtggccacaaaccaccagagtgcccaagcacaggcgcagaccggctgggttcaaaaccaaggaatacttccgggtatggtttggcaggacagagatgtgtacctgcaaggacccatttgggccaaaattcctcacacggacggcaactttcacccttctccgctgatgggagggtttggaatgaaacacccgcctcctcagatcctcatcaaaaacacacctgtacctgcggatcctccaacggccttcaacaaggacaagctgaactctttcatcacccagtattctactggccaagtcagcgtggagatcgagtgggagctgcagaaggaaaacagcaagcgctggaaccccgagatccagtacacctccaactactacaaatctacaagtgtggactttgctgttaatacagaaggcgtgtactctgaaccccgccccattggcacccgttacctcacccgtaatctgtaa

SEQ ID NO: 357 - protein, 734 aa, Artificial Sequence
  Description of Artificial Sequence: Synthetic polypeptide
MAADGYLPDWLEDNLSEGIREWWALKPGVPQPKANQQHQDNRRGLVLPGYKYLGPGNGLDKGEPVNEADAAALEHDKAYDQQLKAGDNPYLKYNHADAEFQERLKEDTSFGGNLGRAVFQAKKRLLEPLGLVEEAAKTAPGKKRPVEQSPQEPDSSAGIGKSGAQPAKKRLNFGQTGDTESVPDPQPIGEPPAAPSGVGSLTMASGGGAPVADNNEGADGVGSSSGNWHCDSQWLGDRVITTSTRTWALPTYNNHLYKQISSQSGASNDNHYFGYSTPWGYFDFNRFHCHFSPRDWQRLINNNWGFRPKRLSFKLFNIQVKEVTDNNGVKTIANNLTSTVQVFTDSDYQLPYVLGSAHEGCLPPFPADVFMIPQYGYLTLNDGSQAVGRSSFYCLEYFPSQMLRTGNNFQFSYEFENVPFHSSYAHSQSLDRLMNPLIDQYLYYLSKTINGSGQNQQTLKFSVAGPSNMAVQGRNYIPGPSYRQQRVSTTVTQNNNSEFAWPGASSWALNGRNSLMNPGPAMASHKEGEDRFFPLSGSLIFGKQGTGRDNVDADKVMITNEEEIKTTNPVATESYGQVATNHQSAQAQAQTGWVQNQGILPGMVWQDRDVYLQGPIWAKIPHTDGNFHPSPLMGGFGMKHPPPQILIKNTPVPADPPTAFNKDKLNSFITQYSTGQVSVEIEWELQKENSKRWNPEIQYTSNYYKSTSVDFAVNTEGVYSEPRPIGTRYLTRNL

SEQ ID NO: 358 - DNA, 2217 bp, Artificial Sequence
  Description of Artificial Sequence: Synthetic polynucleotide
atggctgccgatggttatcttccagattggctcgaggacaacctctctgagggcattcgcgagtggtgggcgctgaaacctggagccccgaagcccaaagccaaccagcaaaagcaggacgacggccggggtctggtgcttcctggctacaagtacctcggacccttcaacggactcgacaagggggagcccgtcaacgcggcggacgcagcggccctcgagcacgacaaggcctacgaccagcagctgcaggcgggtgacaatccgtacctgcggtataaccacgccgacgccgagtttcaggagcgtctgcaagaagatacgtcttttgggggcaacctcgggcgagcagtcttccaggccaagaagcgggttctcgaacctctcggtctggttgaggaaggcgctaagacggctcctggaaagaagagaccggtagagccatcaccccagcgttctccagactcctctacgggcatcggcaagaaaggccaacagcccgccagaaaaagactcaattttggtcagactggcgactcagagtcagttccagaccctcaacctctcggagaacctccagcagcgccctctggtgtgggacctaatacaatggctgcaggcggtggcgcaccaatggcagacaataacgaaggcgccgacggagtgggtagttcctcgggaaattggcattgcgattccacatggctgggcgacagagtcatcaccaccagcacccgaacctgggccctgcccacctacaacaaccacctctacaagcaaatctccaacgggacatcgggaggagccaccaacgacaacacctacttcggctacagcaccccctgggggtattttgactttaacagattccactgccacttttcaccacgtgactggcagcgactcatcaacaacaactggggattccggcccaagagactcagcttcaagctcttcaacatccaggtcaaggaggtcacgcagaatgaaggcaccaagaccatcgccaataacctcaccagcaccatccaggtgtttacggactcggagtaccagctgccgtacgttctcggctctgcccaccagggctgcctgcctccgttcccggcggacgtgttcatgattccccagtacggctacctaacactcaacaacggtagtcaggccgtgggacgctcctccttctactgcctggaatactttccttcgcagatgctgagaaccggcaacaacttccagtttacttacaccttcgaggacgtgcctttccacagcagctacgcccacagccagagcttggaccggctgatgaatcctctgattgaccagtacctgtactacttgtctcggactcaaacaacaggaggcacggcaaatacgcagactctgggcttcagccaaggtgggcctaatacaatggccaatcaggcaaagaactggctgccaggaccctgttaccgccaacaacgcgtctcaacgacaaccgggcaaaacaacaatagcaactttgcctggactgctgggaccaaataccatctgaatggaagaaattcattggctaatcctggcatcgctatggcaacacacaaagacgacgaggagcgtttttttcccagtaacgggatcctgatttttggcaaacaaaatgctgccagagacaatgcggattacagcgatgtcatgctcaccagcgaggaagaaatcaaaaccactaaccctgtggctacagaggaatacggtatcgtggcagataacttgcagcagcaaaacacggctcctcaaattggaactgtcaacagccagggggccttacccggtatggtctggcagaaccgggacgtgtacctgcagggtcccatctgggccaagattcctcacacggacggcaacttccacccctctcccctcatgggtggattcggacttaaacatcctccgcctcagatcctgatcaagaacacgcctgtacctgcggatcctccgaccaccttcaaccagtcaaagctgaactctttcatcacgcaatacagcaccggacaggtcagcgtggaaattgaatgggagctgcagaaggaaaacagcaagcgctggaaccccgagatccagtacacctccaactactacaaatctacaagtgtggactttgctgttaatacagaaggcgtgtactctgaaccccgccccattggcacccgttacctcacccgtaatctgtaa

SEQ ID NO: 359 - protein, 738 aa, Artificial Sequence; identical to SEQ ID NO: 105
  Description of Artificial Sequence: Synthetic polypeptide

SEQ ID NO: 360 - DNA, 2211 bp, Artificial Sequence
  Description of Artificial Sequence: Synthetic polynucleotide
atggctgctgacggttatcttccagattggctcgaggacaacctttctgaaggcattcgagagtggtgggcgctgcaacctggagcccctaaacccaaggcaaatcaacaacatcaggacaacgctcggggtcttgtgcttccgggttacaaatacctcggacccggcaacggactcgacaagggggaacccgtcaacgcagcggacgcggcagccctcgagcacgacaaggcctacgaccagcagctcaaggccggtgacaacccctacctcaagtacaaccacgccgacgccgagttccaggagcggctcaaagaagatacgtcttttgggggcaacctcgggcgagcagtcttccaggccaaaaagaggcttcttgaacctcttggtctggttgaggaagcggctaagacggctcctggaaagaagaggcctgtagatcagtctcctcaggaaccggactcatcatctggtgttggcaaatcgggcaaacagcctgccagaaaaagactaaatttcggtcagactggcgactcagagtcagtcccagaccctcaacctctcggagaaccaccagcagcccccacaagtttgggatctaatacaatggcttcaggcggtggcgcaccaatggcagacaataacgagggtgccgatggagtgggtaattcctcaggaaattggcattgcgattcccaatggctgggcgacagagtcatcaccaccagcaccagaacctgggccctgcccacttacaacaaccatctctacaagcaaatctccagccaatcaggagcttcaaacgacaaccactactttggctacagcaccccttgggggtattttgactttaacagattccactgccacttctcaccacgtgactggcagcgactcattaacaacaactggggattccggcccaagaaactcagcttcaagctcttcaacatccaagttaaagaggtcacgcagaacgatggcacgacgactattgccaataaccttaccagcacggttcaggtgtttacggactcggagtatcagctcccgtacgtgctcgggtcggcgcaccaaggctgtctcccgccgtttccagcggacgtcttcatggtccctcagtatggatacctcaccctgaacaacggaagtcaagcggtgggacgctcatccttttactgcctggagtacttcccttcgcagatgctaaggactggaaataacttccaattcagctataccttcgaggatgtaccttttcacagcagctacgctcacagccagagtttggatcgcttgatgaatcctcttattgatcagtatctgtactacctgaacagaacgcaaggaacaacctctggaacaaccaaccaatcacggctgctttttagccaggctgggcctcagtctatgtctttgcaggccagaaattggctacctgggccctgctaccggcaacagagactttcaaagactgctaacgacaacaacaacagtaactttccttggacagcggccagcaaatatcatctcaatggccgcgactcgctggtgaatccaggaccagctatggccagtcacaaggacgatgaagaaaaatttttccctatgcacggcaatctaatatttggcaaagaagggacaacggcaagtaacgcagaattagataatgtaatgattacggatgaagaagagattcgtaccaccaatcctgtggcaacagagcagtatggaactgtggcaaataacttgcagagctcaaatacagctcccacgactagaactgtcaatgatcagggggccttacctggcatggtgtggcaagatcgtgacgtgtaccttcaaggacctatctgggcaaagattcctcacacggatggacactttcatccttctcctctgatgggaggctttggactgaaacatccgcctcctcaaatcatgatcaaaaatactccggtaccggcaaatcctccgacgactttcagcccggccaagtttgcttcatttatcactcagtactccactggacaggtcagcgtggaaattgagtgggagctacagaaagaaaacagcaaacgttggaatccagagattcagtacacttccaactacaacaagtctgttaatgtggactttactgtagacactaatggtgtttatagtgaacctcgccccattggcacccgttaccttacccgtcccctgtaa

SEQ ID NO: 361 - protein, 736 aa, Artificial Sequence; identical to SEQ ID NO: 331
  Description of Artificial Sequence: Synthetic polypeptide

SEQ ID NO: 362 - DNA, 2211 bp, Artificial Sequence; identical to SEQ ID NO: 330
  Description of Artificial Sequence: Synthetic polynucleotide

SEQ ID NO: 363 - protein, 736 aa, Artificial Sequence; identical to SEQ ID NO: 331
  Description of Artificial Sequence: Synthetic polypeptide

SEQ ID NO: 364 - DNA, 2211 bp, Artificial Sequence
  Description of Artificial Sequence: Synthetic polynucleotide
atggctgctgacggttatcttccagattggctcgaggacaacctttctgaaggcattcgtgagtggtgggctctgaaacctggagtccctcaacccaaagcgaaccaacaacaccaggacaaccgtcggggtcttgtgcttccgggttacaaatacctcggacccggtaacggactcgacaaaggagagcccgtcaacgcggcggatgcagcggccctcgagcacgacaaggcctacgaccagcagctcaaagcgggtgacaatccgtacctgcggtataaccacgccgacgccgagtttcaggagcgtctgcaagaagatacgtcttttgggggcaacctcgggcgagcagtcttccaggccaagaagagggttctcgaaccttttggtctggttgaggaaggtgctaagacggctcctggaaagaaacgtccggtagagcagtcgccacaagagccagactcctcctcgggcatcggcaagacaggccagcagcccgctaaaaagagactcaattttggtcagactggcgactcagagtcagtccccgacccacaacctctcggagaacctccagcaacccccgctgctgtgggacctactacaatggcttcaggcggtggcgcaccaatggcagacaataacgaaggcgccgacggagtgggtaatgcctcaggaaattggcattgcgattccacatggctgggcgacagagtcatcaccaccagcacccgcacctgggccttgcccacctacaataaccacctctacaagcaaatctccagtgcttcaacgggggccagcaacgacaaccactacttcggctacagcaccccctgggggtattttgatttcaacagattccactgccatttctcaccacgtgactggcagcgactcatcaacaacaattggggattccggcccaagagactcaacttcaagctcttcaacatccaagtcaaggaggtcacgacgaatgatggcgtcacgaccatcgctaataaccttaccagcacggttcaagtcttctcggactcggagtaccagcttccgtacgtcctcggctctgcgcaccagggctgcctccctccgttcccggcggacgtgttcatgattccgcaatacggctacctgacgctcaacaatggcagccaagccgtgggacgttcatccttttactgcctggaatatttcccttctcagatgctgagaacgggcaacaactttaccttcagctacacctttgaggaagtgcctttccacagcagctacgcgcacagccagagcctggaccggctgatgaatcctctcatcgaccaatacctgtattacctgaacagaactcaaaatcagtccggaagtgcccaaaacaaggacttgctgtttagccgtgggtctccagctggcatgtctgttcagcccaaaaactggctacctggaccctgttatcggcagcagcgcgtttctaaaacaaaaacagacaacaacaacagcaattttacctggactggtgcttcaaaatataacctcaatgggcgtgaatccatcatcaaccctggcactgctatggcctcacacaaagacgacgaagacaagttctttcccatgagcggtgtcatgatttttggaaaagagagcgccggagcttcaaacactgcattggacaatgtcatgattacagacgaagaggaaattaaagccactaaccctgtggccaccgaaagatttgggaccgtggcagtcaatttccagagcagcagcacagaccctgcgaccggagatgtgcatgttatgggagccttacctggaatggtgtggcaagacagagacgtatacctgcagggtcctatttgggccaaaattcctcacacggatggacactttcacccgtctcctctcatgggcggctttggacttaagcacccgcctcctcagatcctcatcaaaaacacgcctgttcctgcgaatcctccggcagagttttcggctacaaagtttgcttcattcatcacccagtattccacaggacaagtgagcgtggagattgaatgggagctgcagaaagaaaacagcaaacgctggaatcccgaagtgcagtatacatctaactatgcaaaatctgccaacgttgatttcactgtggacaacaatggactttatactgagcctcgccccattggcacccgttacctcacccgtcccctgtaa

SEQ ID NO: 365 - protein, 736 aa, Artificial Sequence
  Description of Artificial Sequence: Synthetic polypeptide
MAADGYLPDWLEDNLSEGIREWWALKPGVPQPKANQQHQDNRRGLVLPGYKYLGPGNGLDKGEPVNAADAAALEHDKAYDQQLKAGDNPYLRYNHADAEFQERLQEDTSFGGNLGRAVFQAKKRVLEPFGLVEEGAKTAPGKKRPVEQSPQEPDSSSGIGKTGQQPAKKRLNFGQTGDSESVPDPQPLGEPPATPAAVGPTTMASGGGAPMADNNEGADGVGNASGNWHCDSTWLGDRVITTSTRTWALPTYNNHLYKQISSASTGASNDNHYFGYSTPWGYFDFNRFHCHFSPRDWQRLINNNWGFRPKRLNFKLFNIQVKEVTTNDGVTTIANNLTSTVQVFSDSEYQLPYVLGSAHQGCLPPFPADVFMIPQYGYLTLNNGSQAVGRSSFYCLEYFPSQMLRTGNNFTFSYTFEEVPFHSSYAHSQSLDRLMNPLIDQYLYYLNRTQNQSGSAQNKDLLFSRGSPAGMSVQPKNWLPGPCYRQQRVSKTKTDNNNSNFTWTGASKYNLNGRESIINPGTAMASHKDDEDKFFPMSGVMIFGKESAGASNTALDNVMITDEEEIKATNPVATERFGTVAVNFQSSSTDPATGDVHVMGALPGMVWQDRDVYLQGPIWAKIPHTDGHFHPSPLMGGFGLKHPPPQILIKNTPVPANPPAEFSATKFASFITQYSTGQVSVEIEWELQKENSKRWNPEVQYTSNYAKSANVDFTVDNNGLYTEPRPIGTRYLTRPL

SEQ ID NO: 366 - DNA, 2217 bp, Artificial Sequence
  Description of Artificial Sequence: Synthetic polynucleotide
atggctgccgatggttatcttccagattggctcgaggacaacctctctgagggcattcgcgagtggtgggacttgaaacctggagccccgaaacccaaagccaaccagcaaaagcaggacgacggccggggtctggtgcttcctggctacaagtacctcggacccttcaacggactcgacaagggggagcccgtcaacgcggcggatgcaacggccctcgagcacgacaaggcctacgaccagcagctgcaggcgggtgacaatccgtacctgcggtataaccacgccgacgccgagtttcaggagcgtctgcaagaagatacgtcttttgggggcaacctcgggcgagcagtcttccaggccaagaagcgggttctcgaacctctcggtctggttgaggaaggcgctaagacggctcctggaaagaagagaccggtagagccatcaccccagcgttctccagactcctctacgggcatcggcaagaaaggccaacagcccgccagaaaaagactcaattttggtcagactggcgactcagagtcagttccagaccctcaacctctcggagaaccaccagcagcccccacaagtttgggatctaatacaatggcttcaggcggtggcgcaccaatggcagacaataacgagggtgccgatggagtgggtaattcctcaggaaattggcattgcgattcccaatggctgggcgacagagtcatcaccaccagcacccgcacctgggccttgcccacctacaataaccacctctacaagcaaatctccagtgcttcaacgggggccagcaacgacaaccactacttcggctacagcaccccctgggggtattttgactttaaccgcttccactgccacttctcgccaagagactggcaaagactcatcaacaacaattggggattccggcccaagagactcaacttcaaactcttcaacatccaagtcaaggaggtcacgacgaatgatggcgtcacgaccatcgccaataacctcaccagcaccatccaggtgtttacggactcggagtaccagctgccgtacgttctcggctctgcccaccagggctgcctgcctccgttcccggcggacgtgttcatgattccccagtatggatacctcaccctgaacaacggaagtcaagcggtgggacgctcatccttttactgcctggagtacttcccttcgcagatgctaaggactggaaataacttccaattcagctataccttcgaggatgtaccttttcacagcagctacgctcacagccagagtttggatcgcttgatgaatcctcttattgatcagtatctgtactacctgaacagaacgcaaggaacaacctctggaacaaccaaccaatcacggctgctttttagccaggctgggcctcagtctatgtctttgcaggccagaaattggctacctgggccctgctaccggcaacagagactttcaaagactgctaacgacaacaacaacagtaactttccttggacagcagccagcaaatatcatctcaatggccgcgactcgctggtgaatccaggaccagctatggccagtcacaaggacgatgaagaaaaatttttccctatgcacggcaatctaatatttggcaaagaagggacaacggcaagtaacgcagaattagataatgtaatgattacggatgaagaagagattcgtaccaccaatcctgtggcaacagagcagtatggaactgtggcaaataacttgcagagctcaaatacagctcccacgactagaactgtcaatgatcagggggccttacctggcatggtgtggcaagatcgtgacgtgtaccttcaggggcccatctgggcaaagattccacacacggacggacattttcacccctctcccctcatgggtggattcggacttaaacaccctcctccgcagattctcatcaagaacaccccggtacctgcgaatccttcgaccaccttcagtgcggcaaagtttgcttccttcatcacacagtactccacgggacaggtcagcgtggagatcgagtgggagctgcagaaggaaaacagcaagcgctggaacccggagatccagtacacttccaactattacaagtctaataatgttgaatttgctgttaatactgaaggtgtatatagtgaaccccgccccattggcaccagatacctgactcgtaatctgtaa

SEQ ID NO: 367 - protein, 738 aa, Artificial Sequence
  Description of Artificial Sequence: Synthetic polypeptide
MAADGYLPDWLEDNLSEGIREWWDLKPGAPKPKANQQKQDDGRGLVLPGYKYLGPFNGLDKGEPVNAADATALEHDKAYDQQLQAGDNPYLRYNHADAEFQERLQEDTSFGGNLGRAVFQAKKRVLEPLGLVEEGAKTAPGKKRPVEPSPQRSPDSSTGIGKKGQQPARKRLNFGQTGDSESVPDPQPLGEPPAAPTSLGSNTMASGGGAPMADNNEGADGVGNSSGNWHCDSQWLGDRVITTSTRTWALPTYNNHLYKQISSASTGASNDNHYFGYSTPWGYFDFNRFHCHFSPRDWQRLINNNWGFRPKRLNFKLFNIQVKEVTTNDGVTTIANNLTSTIQVFTDSEYQLPYVLGSAHQGCLPPFPADVFMIPQYGYLTLNNGSQAVGRSSFYCLEYFPSQMLRTGNNFQFSYTFEDVPFHSSYAHSQSLDRLMNPLIDQYLYYLNRTQGTTSGTTNQSRLLFSQAGPQSMSLQARNWLPGPCYRQQRLSKTANDNNNSNFPWTAASKYHLNGRDSLVNPGPAMASHKDDEEKFFPMHGNLIFGKEGTTASNAELDNVMITDEEEIRTTNPVATEQYGTVANNLQSSNTAPTTRTVNDQGALPGMVWQDRDVYLQGPIWAKIPHTDGHFHPSPLMGGFGLKHPPPQILIKNTPVPANPSTTFSAAKFASFITQYSTGQVSVEIEWELQKENSKRWNPEIQYTSNYYKSNNVEFAVNTEGVYSEPRPIGTRYLTRNL

SEQ ID NO: 368 - DNA, 2208 bp, Artificial Sequence
  Description of Artificial Sequence: Synthetic polynucleotide
atggctgccgatggttatcttccagattggctcgaggacaaccttagtgaaggaattcgcgagtggtgggacttgaaacctggagccccgaagcccaaagccaaccagcaaaagcaggacgacggccggggtctggtgcttcctggctacaagtacctcggacccttcaacggactcgacaagggggagcccgtcaacgcggcggacgcagcggccctcgagcacgacaaggcctacgaccagcagctcaaagcgggtgacaatccgtacctgcggtataaccacgccgacgccgagtttcaggagcgtctgcaagaagatacgtcttttgggggcaacctcgggcgagcagtcttccaggccaagaagcgggttctcgaacctctcggtctggttgaggaaggtgctaagacggctcctggaaagaaacgtccggtagagcagtcgccacaagagccagactcctcctcgggcattggcaagacaggccagcagcccgctaaaaagagactcaattttggtcagactggcgactcagagtcagtccccgacccacaacctctcggagaacctccagcaacccccgctgctgtgggacctactacaatggcttcaggcggtggcgcaccaatggcagacaataacgaaggcgccgacggagtgggtaatgcctcaggaaattggcattgcgattccacatggctgggcgacagagtcatcaccaccagcacccgaacctgggccctgcccacctacaacaaccacctctacaaacaaatttccagccaatcaggagcctcgaacgacaatcactactttggctacagcaccccttgggggtattttgatttcaacagattccactgccacttttcaccacgtgactggcagcgactcatcaacaacaattggggattccggcccaagagactcagcttcaagctcttcaacatccaggtcaaggaggtcacgcagaatgaaggcaccaagaccatcgccaataaccttaccagcacggttcaagtgtttacggactcggagtatcagctcccgtacgtgctcggctcggcgcatcaaggatgcctcccgccgttcccagcagacgtcttcatggtgccacagtatggatacctcaccctgaacaacgggagtcaggcagtaggacgctcttcattttactgcctggagtactttccttctcagatgctgcgtaccggaaacaactttaccttcagctacacttttgaggacgttcctttccacagcagctacgctcacagccagagtctggaccgtctcatgaatcctctgattgaccagtacctgtattacttgagcagaacaaacactccaagtggaaccaccacgcagtcaaggcttcagttttctcaggccggagcgagtgacattcgggaccagtctaggaactggcttcctggaccctgttaccgccagcagcgagtatcaaagacatctgcggataacaacaacagtgaatactcgtggactggagctaccaagtaccacctcaatggcagagactctctggtgaatccgggcccggccatggcaagccacaaggactatgaagaaaagttttttcctcagagcggggttctcatctttgggaagcaaggctcagagaaaacaaatgtggacattgaaaaggtcatgattacagacgaagaggaaatcaggacaaccaatcccgtggctacggagcagtatggttctgtatctaccaacctccagagaggcaacagacaagcagctaccgcagatgtcaacacacaaggcgttcttccaggcatggtctggcaggacagagatgtgtaccttcaggggcccatctgggcaaagattccacacacggacggacattttcacccgtctccgctgatgggcggctttggcctgaaacatcctccgcctcagatcctgatcaagaacacgcctgtacctgcggatcctccgaccaccttcaaccagtcaaagctgaactctttcatcactcagtattctactggccaagtcagcgtggagatcgagtgggagctgcagaaggaaaacagcaagcgctggaaccccgagatccagtacacctccaactactacaaatctacaagtgtggactttgctgttaatacagaaggcgtgtactctgaaccccgccccattggcacccgttacctcacccgtaatctgtaa

SEQ ID NO: 369 - protein, 735 aa, Artificial Sequence
  Description of Artificial Sequence: Synthetic polypeptide
MAADGYLPDWLEDNLSEGIREWWDLKPGAPKPKANQQKQDDGRGLVLPGYKYLGPFNGLDKGEPVNAADAAALEHDKAYDQQLKAGDNPYLRYNHADAEFQERLQEDTSFGGNLGRAVFQAKKRVLEPLGLVEEGAKTAPGKKRPVEQSPQEPDSSSGIGKTGQQPAKKRLNFGQTGDSESVPDPQPLGEPPATPAAVGPTTMASGGGAPMADNNEGADGVGNASGNWHCDSTWLGDRVITTSTRTWALPTYNNHLYKQISSQSGASNDNHYFGYSTPWGYFDFNRFHCHFSPRDWQRLINNNWGFRPKRLSFKLFNIQVKEVTQNEGTKTIANNLTSTVQVFTDSEYQLPYVLGSAHQGCLPPFPADVFMVPQYGYLTLNNGSQAVGRSSFYCLEYFPSQMLRTGNNFTFSYTFEDVPFHSSYAHSQSLDRLMNPLIDQYLYYLSRTNTPSGTTTQSRLQFSQAGASDIRDQSRNWLPGPCYRQQRVSKTSADNNNSEYSWTGATKYHLNGRDSLVNPGPAMASHKDYEEKFFPQSGVLIFGKQGSEKTNVDIEKVMITDEEEIRTTNPVATEQYGSVSTNLQRGNRQAATADVNTQGVLPGMVWQDRDVYLQGPIWAKIPHTDGHFHPSPLMGGFGLKHPPPQILIKNTPVPADPPTTFNQSKLNSFITQYSTGQVSVEIEWELQKENSKRWNPEIQYTSNYYKSTSVDFAVNTEGVYSEPRPIGTRYLTRNL

SEQ ID NO: 370 - DNA, 2214 bp, Artificial Sequence
  Description of Artificial Sequence: Synthetic polynucleotide
atggctgccgatggttatcttccagattggctcgaggacaacctctctgagggcattcgcgagtggtgggacttgaaacctggagccccgaaacccaaagccaaccagcaaaagcaggacgacggccggggtctggtgcttcctggctacaagtacctcggacccttcaacggactcgacaagggggagcccgtcaacgcggcggatgcagcggccctcgagcacgacaaggcctacgaccagcagctcaaagcgggtgacaatccgtacctgcggtataaccacgccgacgccgagtttcaggagcgtctgcaagaagatacgtcttttgggggcaacctcgggcgagcagtcttccaggccaagaagagggttctcgaaccttttggtctggttgaggaaggtgctaagacggctcctggaaagaaacgtccggtagagcagtcgccacaagagccagactcctcctcgggcattggcaagacaggccagcagcctgcaagaaaaagattgaattttggtcagactggagacgcagactcagtacctgacccccagcctctcggacagccaccagcagccccctctggtctgggaactaatacgatggctacaggcagtggcgcaccaatggcagacaataacgagggcgccgacggagtgggtaattcctcgggaaattggcattgcgattcccaatggctgggggacagagtcatcaccaccagcacccgaacctgggccctgcccacctacaacaatcacctctacaagcaaatctccaacagcacatctggaggatcttcaaatgacaacgcctacttcggctacagcaccccctgggggtattttgatttcaacagattccactgccatttctcaccacgtgactggcagcgactcatcaacaacaattggggattccggcccaagagactcaacttcaagctcttcaacatccaggtcaaggaggtcacgcagaatgaaggcaccaagaccatcgccaataacctcaccagcaccatccaggtgtttacggactcggagtaccagctgccgtacgttctcggctctgcccaccagggctgcctgcctccgttcccggcggacgtgttcatgattccccagtacggctacctaacactcaacaacggtagtcaggccgtgggacgctcctccttctactgcctggaatactttccttcgcagatgctgagaaccggcaacaacttccagtttacttacaccttcgaggacgtgcctttccacagcagctacgcccacagccagagcttggaccggctgatgaatcctctgattgaccagtacctgtactacttgtctcggactcaaacaacaggaggcacgacaaatacgcagactctgggcttcagccaaggtgggcctaatacaatggccaatcaggcaaagaactggctgccaggaccctgttaccgccagcagcgagtatcaaagacatttgcggataacaacaacagtgaatactcgtggactggagctaccaagtaccacctcaatggcagagactctctggtgaatccgggcccggccatggcaagccacaaggacgatgaagaaaagttttttcctcagagcggggttctcatctttgggaagcaaggctcagagaaaacaaatgtggacattgaaaaggtcatgattacagacgaagaggaaatcaggacaaccaatcccgtggctacggagcagtatggttctgtatctaccaacctccagagaggcaacagacaagcagctaccgcagatgtcaacacacaaggcgttcttccaggcatggtctggcaggacagagatgtgtaccttcaggggcccatctgggcaaagattccacacacggacggacattttcacccctctcccctcatgggtggattcggacttaaacaccctccgcctcagatcctgatcaagaacacgcctgtacccgcggatcctccgaccaccttcaaccagtcaaagctgaactctttcatcacccagtattctactggccaagtcagcgtggagatcgagtgggagctgcagaaggaaaacagcaagcgctggaaccccgagatccagtacacctccaactactacaaatctacaagtgtggactttgctgttaatacagaaggcgtgtactctgaaccccgccccattggcacccgttacctcacccgtaatctgtaa

SEQ ID NO: 371 - protein, 737 aa, Artificial Sequence
  Description of Artificial Sequence: Synthetic polypeptide
MAADGYLPDWLEDNLSEGIREWWDLKPGAPKPKANQQKQDDGRGLVLPGYKYLGPFNGLDKGEPVNAADAAALEHDKAYDQQLKAGDNPYLRYNHADAEFQERLQEDTSFGGNLGRAVFQAKKRVLEPFGLVEEGAKTAPGKKRPVEQSPQEPDSSSGIGKTGQQPARKRLNFGQTGDADSVPDPQPLGQPPAAPSGLGTNTMATGSGAPMADNNEGADGVGNSSGNWHCDSQWLGDRVITTSTRTWALPTYNNHLYKQISNSTSGGSSNDNAYFGYSTPWGYFDFNRFHCHFSPRDWQRLINNNWGFRPKRLNFKLFNIQVKEVTQNEGTKTIANNLTSTIQVFTDSEYQLPYVLGSAHQGCLPPFPADVFMIPQYGYLTLNNGSQAVGRSSFYCLEYFPSQMLRTGNNFQFTYTFEDVPFHSSYAHSQSLDRLMNPLIDQYLYYLSRTQTTGGTTNTQTLGFSQGGPNTMANQAKNWLPGPCYRQQRVSKTFADNNNSEYSWTGATKYHLNGRDSLVNPGPAMASHKDDEEKFFPQSGVLIFGKQGSEKTNVDIEKVMITDEEEIRTTNPVATEQYGSVSTNLQRGNRQAATADVNTQGVLPGMVWQDRDVYLQGPIWAKIPHTDGHFHPSPLMGGFGLKHPPPQILIKNTPVPADPPTTFNQSKLNSFITQYSTGQVSVEIEWELQKENSKRWNPEIQYTSNYYKSTSVDFAVNTEGVYSEPRPIGTRYLTRNL

SEQ ID NO: 372 - DNA, 2217 bp, Artificial Sequence
  Description of Artificial Sequence: Synthetic polynucleotide
atggctgccgatggttatcttccagattggctcgaggacactctctctgaaggaataagacagtggtgggcgctgaaacctggagccccgaagcccaaagccaaccagcaaaagcaggacgacggccggggtctggtgcttcctggctacaagtacctcggacccttcaacggactcgacaagggggagcccgtcaacgcggcggatgcagcggccctcgagcacgacaaggcctacgaccagcagctcaaagcgggtgacaatccgtacctgcggtataaccacgccgacgccgagtttcaggagcgtctgcaagaagatacgtcttttgggggcaacctcgggcgagcagtcttccaggccaagaagcgggttctcgaacctctcggtctggttgaggaaggcgctaagacggctcctggaaagaagagaccggtagagccatcaccccagcgttctccagactcctctacgggcatcggcaagaaaggccaacagcccgccagaaaaagactcaattttggtcagactggcgactcagagtcagttccagaccctcaacctctcggagaaccaccagcagcccccacaagtttgggatctaatacaatggcttcaggcggtggcgcaccaatggcagacaataacgagggtgccgatggagtgggtaattcctcaggaaattggcattgcgattcccaatggctgggcgacagagtcatcaccaccagcacccgcacctgggccttgcccacctacaataaccacctctacaagcaaatctccagtgcttcaacgggggccagcaacgacaaccactacttcggctacagcaccccctgggggtattttgactttaaccgcttccactgccacttctcgccaagagactggcaaagactcatcaacaacaattggggattccggcccaagagactcaacttcaaactcttcaacatccaagtcaaggaggtcacgacgaatgatggcgtcacgaccatcgccaataacctcaccagcaccatccaggtgtttacggactcggagtaccagctgccgtacgttctcggctctgcccaccagggctgcctgcctccgttcccggcggacgtgttcatgattccccagtatggatacctcaccctgaacaacggaagtcaagcggtgggacgctcatccttttactgcctggagtacttcccttcgcagatgctaaggactggaaataacttccaattcagctataccttcgaggatgtaccttttcacagcagctacgctcacagccagagtttggatcgcttgatgaatcctcttattgatcagtatctgtactacctgaacagaacgcaaggaacaacctctggaacaaccaaccaatcacggctgctttttagccaggctgggcctcagtctatgtctttgcaggccagaaattggctacctgggccctgctaccggcaacagagactttcaaagactgctaacgacaacaacaacagtaactttccttggacagcagccagcaaatatcatctcaatggccgcgactcgctggtgaatccaggaccagctatggccagtcacaaggacgatgaagaaaaatttttccctatgcacggcaatctaatatttggcaaagaagggacaacggcaagtaacgcagaattagataatgtaatgattacggatgaagaagagattcgtaccaccaatcctgtggcaacagagcagtatggaactgtggcaaataacttgcagagctcaaatacagctcccacgactagaactgtcaatgatcagggggccttacctggcatggtgtggcaagatcgtgacgtgtaccttcaggggcccatctgggcaaagattccacacacggacggacattttcacccctctcccctcatgggtggattcggacttaaacaccctcctccgcagattctcatcaagaacaccccggtacctgcgaatccttcgaccaccttcagtgcggcaaagtttgcttccttcatcacacagtactccacgggacaggtcagcgtggagatcgagtgggagctgcagaaggaaaacagcaagcgctggaacccggagatccagtacacttccaactattacaagtctaataatgttgaatttgctgttaatactgaaggtgtatatagtgaaccccgccccattggcaccagatacctgactcgtaatctgtaa

SEQ ID NO: 373 - protein, 738 aa, Artificial Sequence
  Description of Artificial Sequence: Synthetic polypeptide
MAADGYLPDWLEDTLSEGIRQWWALKPGAPKPKANQQKQDDGRGLVLPGYKYLGPFNGLDKGEPVNAADAAALEHDKAYDQQLKAGDNPYLRYNHADAEFQERLQEDTSFGGNLGRAVFQAKKRVLEPLGLVEEGAKTAPGKKRPVEPSPQRSPDSSTGIGKKGQQPARKRLNFGQTGDSESVPDPQPLGEPPAAPTSLGSNTMASGGGAPMADNNEGADGVGNSSGNWHCDSQWLGDRVITTSTRTWALPTYNNHLYKQISSASTGASNDNHYFGYSTPWGYFDFNRFHCHFSPRDWQRLINNNWGFRPKRLNFKLFNIQVKEVTTNDGVTTIANNLTSTIQVFTDSEYQLPYVLGSAHQGCLPPFPADVFMIPQYGYLTLNNGSQAVGRSSFYCLEYFPSQMLRTGNNFQFSYTFEDVPFHSSYAHSQSLDRLMNPLIDQYLYYLNRTQGTTSGTTNQSRLLFSQAGPQSMSLQARNWLPGPCYRQQRLSKTANDNNNSNFPWTAASKYHLNGRDSLVNPGPAMASHKDDEEKFFPMHGNLIFGKEGTTASNAELDNVMITDEEEIRTTNPVATEQYGTVANNLQSSNTAPTTRTVNDQGALPGMVWQDRDVYLQGPIWAKIPHTDGHFHPSPLMGGFGLKHPPPQILIKNTPVPANPSTTFSAAKFASFITQYSTGQVSVEIEWELQKENSKRWNPEIQYTSNYYKSNNVEFAVNTEGVYSEPRPIGTRYLTRNL

SEQ ID NO: 374 - DNA, 2208 bp, Artificial Sequence; identical to SEQ ID NO: 10
  Description of Artificial Sequence: Synthetic polynucleotide

SEQ ID NO: 375 - protein, 735 aa, Artificial Sequence [sequence omitted]

SEQ ID NO: 376 - DNA, 2208 bp, Artificial Sequence
  Description of Artificial Sequence: Synthetic polynucleotide
atggctgccgatggttatcttccagattggctcgaggacaacctctctgagggcattcgcgagtggtgggcgctgaaacctggagccccgaagcccaaagccaaccagcaaaagcaggacgacggccggggtctggtgcttcctggctacaagtacctcggacccttcaacggactcgacaagggggagcccgtcaacgcggcggacgccgcggccctcgagcacgacaaggcctacgaccagcagctgcaggcgggtgacaatccgtacctgcggtataaccacgccgacgccgagtttcaggagcgtctgcaagaagatacgtcttttgggggcaacctcgggcgagcagtcttccaggccaaaaagaggcttcttgaacctcttggtctggttgaggaagcagctaaaacggctcctggaaagaagaggcctgtagagcagtctcctcaggaaccggactcctccgcgggtattggcaaatcgggtgcacagcccgccaaaaagagactcaatttcggtcagactggcgactcagagtcagtcccagaccctcaacctctcggagaaccaccagcagcccccacaagtttgggatctaatacaatggcttcaggcggtggcgcaccaatggcagacaataacgaaggcgccgacggagtgggtaatgcctcaggaaattggcattgcgattccacatggctgggcgacagagtcatcaccaccagcacccgcacctgggccttgcccacctacagcaaccatctctacaagcaaatctccagccaatcaggagcttcaaacgacaacgactactttggctacagcaccccttgggggtattttgatttcaacagattccactgccacttttcaccacgtgactggcaaagactcatcaacaacaactggggattccgacccaagagactcaacttcaagctctttaacattcaagtcaaagaggtcacgcagaatgacggtacgacgacgattgccaataaccttaccagcacggttcaggtgtttactgactcggagtaccagctcccgtacgtcctcggctcggcgcatcaaggatgcctcccgccgttcccagcagacgtcttcatggtgccacagtatggatacctcaccctgaacaacgggagtcaggcagtaggacgctcttcattttactgcctggagtactttccttctcagatgctgcgtaccggaaacaactttaccttcagctacacttttgaggacgttcctttccacagcagctacgctcacagccagagtctggaccgtctcatgaatcctctcatcgaccagtacctgtattacttgagcagaacaaacactccaagtggaaccaccacgcagtcaaggcttcagttttctcaggccggagcgagtgacattcgggaccagtctaggaactggcttcctggaccctgttaccgccagcagcgagtatcaaagacatctgaggataacaacaacagtgaatactcgtggactggagctaccaagtaccacctcaatggcagagactctctggtgaatccgggcccggccatggcaagccacaaggacgatgaagaaaagttttttcctcagagcggggttctcatctttgggaagcaaggctcagagaaaacaaatgtggacattgaaaaggtcatgattacagacgaagaggaaatcaggacaaccaatcccgtggctacggagcagtatggttctgtatctaccaacctccagagaggcaacagacaagcagctaccgcagatgtcaacacacaaggcgttcttccaggcatggtctggcaggacagagatgtgtaccttcaggggcccatctgggcaaagattccacacacggacggacattttcacccctctcccctcatgggtggattcggacttaaacaccctcctccacagattctcatcaagaacaccccggtacctgcgaatccttcgaccaccttcagtgcggcaaagtttgcttccttcatcacacagtactccacgggacaggtcagcgtggagatcgagtgggagctgcagaaggaaaacagcaaacgctggaatcccgaaattcagtacacttccaactacaacaagtctgttaatgtggactttactgtggacactaatggcgtgtattcagagcctcgccccattggcaccagatacctgactcgtaatctgtaa

SEQ ID NO: 377 - protein, 735 aa, Artificial Sequence
  Description of Artificial Sequence: Synthetic polypeptide
MAADGYLPDWLEDNLSEGIREWWALKPGAPKPKANQQKQDDGRGLVLPGYKYLGPFNGLDKGEPVNAADAAALEHDKAYDQQLQAGDNPYLRYNHADAEFQERLQEDTSFGGNLGRAVFQAKKRLLEPLGLVEEAAKTAPGKKRPVEQSPQEPDSSAGIGKSGAQPAKKRLNFGQTGDSESVPDPQPLGEPPAAPTSLGSNTMASGGGAPMADNNEGADGVGNASGNWHCDSTWLGDRVITTSTRTWALPTYSNHLYKQISSQSGASNDNDYFGYSTPWGYFDFNRFHCHFSPRDWQRLINNNWGFRPKRLNFKLFNIQVKEVTQNDGTTTIANNLTSTVQVFTDSEYQLPYVLGSAHQGCLPPFPADVFMVPQYGYLTLNNGSQAVGRSSFYCLEYFPSQMLRTGNNFTFSYTFEDVPFHSSYAHSQSLDRLMNPLIDQYLYYLSRTNTPSGTTTQSRLQFSQAGASDIRDQSRNWLPGPCYRQQRVSKTSEDNNNSEYSWTGATKYHLNGRDSLVNPGPAMASHKDDEEKFFPQSGVLIFGKQGSEKTNVDIEKVMITDEEEIRTTNPVATEQYGSVSTNLQRGNRQAATADVNTQGVLPGMVWQDRDVYLQGPIWAKIPHTDGHFHPSPLMGGFGLKHPPPQILIKNTPVPANPSTTFSAAKFASFITQYSTGQVSVEIEWELQKENSKRWNPEIQYTSNYNKSVNVDFTVDTNGVYSEPRPIGTRYLTRNL

SEQ ID NO: 378 - DNA, 2208 bp, Artificial Sequence
  Description of Artificial Sequence: Synthetic polynucleotide
atggctgccgatggttatcttccagattggctcgaggacaacctctctgagggcattcgcgagtggtgggcgctgaaacctggagccccgaagcccaaagccaaccagcaaaagcaggacgacggccggggtctggtgcttcctggctacaagtacctcggacccttcaacggactcgacaagggggagcccgtcaacgcggcggacgcagcggccctcgagcacgacaaggcctacgaccagcagctgcaggcgggtgacaatccgtacctgcggtataaccacgccgacgccgagttccaggagcgtctgcaagaagatacgtcttttgggggcaacctcgggcgagcagtcttccaggccaagaagagggttctcgaaccttttggtctggttgaggaaggtgctaagacggctcctggaaagaaacgtccggtagagcagtcgccacaagagccagactcctcctcgggcattggcaagacaggccagcagcccgctaaaaagagactcaattttggtcagactggcgactcagagtcagtcccagaccctcaacctctcggagaaccaccagcagcccccacaagtttgggatctaatacaatggcttcaggcggtggcgcaccaatggcagacaataacgagggcgccgacggagtgggtaattcctcgggaaattggcattgcgattccacatggatgggcgacagagtcatcaccaccagcacccgaacctgggccctgcccacctacaacaaccacctctacaaacaaatttccagccaatcaggagcttcaaacgacaaccactactttggctacagcaccccttgggggtattttgactttaacagattccactgccacttttcaccacgtgactggcagcgactcattaacaacaactggggattccggcccaagaaactcaacttcaagctctttaacatccaggtcaaggaggtcacgcagaatgaaggcaccaagaccatcgccaataacctcaccagcaccatccaggtgtttacggactcggagtaccagctgccgtacgttctcggctctgcccaccagggctgcctgcctccgttcccggcggacgtgttcatgattccccagtacggctacctaacactcaacaacggtagtcaggccgtgggacgctcctccttctactgcctggaatactttccttcgcagatgctgagaaccggcaacaacttccagtttacttacaccttcgaggacgtgcctttccacagcagctacgcccacagccagagcttggaccggctgatgaatcctctgattgaccagtacctgtattacttgtctcggactcaaacaacaggaggcacgacaaatacgcagactctgggcttcagccaaggtgggcctaatacaatggccaatcaggcaaagaactggctgcctggaccctgttaccgccagcagcgagtatcaaagacatctgcggataacaacaacagtgaatactcgtggactggagctaccaagtaccacctcaatggcagagactctctggtgaatccgggcccggccatggcaagccacaaggacgatgaagaaaagttttttcctcagagcggggttctcatctttgggaagcaaggctcagagaaaacaaatgtggacattgaaaaggttatgattacagacgaagaggaaatcaggacaaccaatcccgtggctacggagcagtatggttctgtatctaccaacctccagagaggcaacagacaagcagctaccgcagatgtcaacacacagggcgttcttccaggcatggtctggcaggacagagatgtgtaccttcagggtcccatttgggccaaaattcctcacacagatggacactttcacccgtcccctcttatgggcggctttggactcaagaacccgcctcctcagatcctcatcaaaaacacgcctgttcctgcgaatcctccggcagagttttcagctacaaagtttgcttcattcatcacccaatactccacaggacaagtgagtgtggaaattgaatgggagctgcagaaagaaaacagcaagcgctggaatcccgaagtgcagtacacatccaattatgcaaaatctgccaacgttgattttactgtggacactaatggcgtgtattcagagcctcgccccattggcaccagatacctcacccgtaatctgtaa

SEQ ID NO: 379 - protein, 735 aa, Artificial Sequence
  Description of Artificial Sequence: Synthetic polypeptide
MAADGYLPDWLEDNLSEGIREWWALKPGAPKPKANQQKQDDGRGLVLPGYKYLGPFNGLDKGEPVNAADAAALEHDKAYDQQLQAGDNPYLRYNHADAEFQERLQEDTSFGGNLGRAVFQAKKRVLEPFGLVEEGAKTAPGKKRPVEQSPQEPDSSSGIGKTGQQPAKKRLNFGQTGDSESVPDPQPLGEPPAAPTSLGSNTMASGGGAPMADNNEGADGVGNSSGNWHCDSTWMGDRVITTSTRTWALPTYNNHLYKQISSQSGASNDNHYFGYSTPWGYFDFNRFHCHFSPRDWQRLINNNWGFRPKKLNFKLFNIQVKEVTQNEGTKTIANNLTSTIQVFTDSEYQLPYVLGSAHQGCLPPFPADVFMIPQYGYLTLNNGSQAVGRSSFYCLEYFPSQMLRTGNNFQFTYTFEDVPFHSSYAHSQSLDRLMNPLIDQYLYYLSRTQTTGGTTNTQTLGFSQGGPNTMANQAKNWLPGPCYRQQRVSKTSADNNNSEYSWTGATKYHLNGRDSLVNPGPAMASHKDDEEKFFPQSGVLIFGKQGSEKTNVDIEKVMITDEEEIRTTNPVATEQYGSVSTNLQRGNRQAATADVNTQGVLPGMVWQDRDVYLQGPIWAKIPHTDGHFHPSPLMGGFGLKNPPPQILIKNTPVPANPPAEFSATKFASFITQYSTGQVSVEIEWELQKENSKRWNPEVQYTSNYAKSANVDFTVDTNGVYSEPRPIGTRYLTRNL

SEQ ID NO: 380 - DNA, 2214 bp, Artificial Sequence; identical to SEQ ID NO: 370
  Description of Artificial Sequence: Synthetic polynucleotide

SEQ ID NO: 381 - protein, 737 aa, Artificial Sequence; identical to SEQ ID NO: 371
  Description of Artificial Sequence: Synthetic polypeptide

SEQ ID NO: 382 - DNA, 2196 bp, Adeno-associated virus
atggctgctgacggttatcttccagattggctcgaggacaacctctctgagggcattcgcgagtggtgggcgctgaaacctggagccccgcaacccaaagccaaccagcaaaagcaggacgacggccggggtctggtgcttcctggctacaagtacctcggacccttcaacggactcgacaagggggagcccgtcaacgaggcggacgccgcggccctcgagcacgacaaggcctacgaccagcagctcaaagcgggtgacaatccgtacctgcggtataatcacgccgacgccgagtttcaagagcgtctgcaagaagatacgtcctttgggggcaacctcgggcgagcagtcttccaggccaaaaagagggtactcgagcctctgggtctggttgaggaaggcgctaagacggctcctggaaagaagcggccagtagaaccggactccagctcgggcatcggcaagtcaggccagcagcccgcgaaaaagagactgaattttgggcagactggcgactcagagtcagtgcctgacccccaacctctctcagaaccacccgcaggtccctctggtctgggatctggtacaatggctgctggcggtggcgctccaatggcagacaataacgaaggcgccgacggagtgggtaatgtctcaggaaattggcattgcgattccacatggctgggcgaccgagtcatcaccaccagcactcggacctgggccctccccacctacaacaaccacctctacaagcaaatctccaacgggacctcgggaggcagcagcaacgacaacacctactttggctacagcaccccctgggggtattttgactttaacagattccactgccacttttcaccacgtgactggcagcgactcatcaacaacaactgggggttccggcccaagaagctcaacttcaagctcttcaacatccaggtcaaggaggtcacccagaatgaaggcaccaagaccatcgccaataacctcaccagcacggtgcaggtctttacggactcggagtaccagctcccgtacgtgctcggctctgcccaccagggctgcctgcctccgttcccggcggacgtgttcatgattccgcagtacgggtacctgacgctgaacaacgggagccaggccgtggggcgatcctccttctactgcctggagtactttccctcgcagatgctgagaacgggcaacaactttaccttcagctacaccttcgaggacgtgcccttccacagcagctacgcgcacagccagagcctggaccggctgatgaacccgctgattgaccagtacctgtactacctgtctcggactcagaccaacgggaccaatgccacgcagactctgttgtttgctcaggccgggcctcagaacatgtcggctcaggccaagaactggctgcctggtccttgctatcggcagcagcgcgtctctacgacagtgtcgcaaaacaacaacagcaactttacctggaccggggcgaccaagtaccacctgaacggccgagactccctggtgagccccggtgtcgccatggcaacgcacaaggacgacgaggagcgcttcttcccgagcagcggggtcctgatgtttggcaagcagggcgctggaaaggacaatgtcgagtacaccaacgtgatgctcaccagcgaggaggagatcaagaccaccaaccctgtggccacggagcagtacggcgtggtggctgacaatctgcagcagaccaactcagctcccattgtgggggcagtcaacagccagggggccttacccggtatggtctggcagaaccgggacgtgtacctgcagggtcccatctgggccaagatcccgcatacggacggcaactttcacccgtctcctctcatgggcggctttggactgaaacacccgcctccccagatcctgatcaaaaacacgccggtacctgcggatcccccggtgaactttacggacgctaagctggcgagtttcatcacgcagtacagcaccgggcaggtcagcgtggagattgagtgggagctgcagaaggagaacagcaagcgctggaatcccgagattcagtacacttccaattattataaatcagctaatgtggactttgccgtcaatgcagatggtgtatatagtgaaccccgccccattggcactcgttacctcacccgtaatctgtaa

SEQ ID NO: 383 - protein, 731 aa, Adeno-associated virus
MAADGYLPDWLEDNLSEGIREWWALKPGAPQPKANQQKQDDGRGLVLPGYKYLGPFNGLDKGEPVNEADAAALEHDKAYDQQLKAGDNPYLRYNHADAEFQERLQEDTSFGGNLGRAVFQAKKRVLEPLGLVEEGAKTAPGKKRPVEPDSSSGIGKSGQQPAKKRLNFGQTGDSESVPDPQPLSEPPAGPSGLGSGTMAAGGGAPMADNNEGADGVGNVSGNWHCDSTWLGDRVITTSTRTWALPTYNNHLYKQISNGTSGGSSNDNTYFGYSTPWGYFDFNRFHCHFSPRDWQRLINNNWGFRPKKLNFKLFNIQVKEVTQNEGTKTIANNLTSTVQVFTDSEYQLPYVLGSAHQGCLPPFPADVFMIPQYGYLTLNNGSQAVGRSSFYCLEYFPSQMLRTGNNFTFSYTFEDVPFHSSYAHSQSLDRLMNPLIDQYLYYLSRTQTNGTNATQTLLFAQAGPQNMSAQAKNWLPGPCYRQQRVSTTVSQNNNSNFTWTGATKYHLNGRDSLVSPGVAMATHKDDEERFFPSSGVLMFGKQGAGKDNVEYTNVMLTSEEEIKTTNPVATEQYGVVADNLQQTNSAPIVGAVNSQGALPGMVWQNRDVYLQGPIWAKIPHTDGNFHPSPLMGGFGLKHPPPQILIKNTPVPADPPVNFTDAKLASFITQYSTGQVSVEIEWELQKENSKRWNPEIQYTSNYYKSANVDFAVNADGVYSEPRPIGTRYLTRNL

SEQ ID NO: 384 - DNA, 2196 bp, Adeno-associated virus
atggctgctgacggttatcttccagattggctcgaggacaacctctctgagggcattcgcgagtggtgggcgctgaaacctggagccccgcaacccaaagccaaccagcaaaagcaggacgacggccggggtctggtgcttcctggctacaagtacctcggacccttcaacggactcgacaagggggagcccgtcaacgaggcggacgccgcggccctcgagcacgacaaggcctacgaccagcagctcaaagcgggtgacaatccgtacctgcggtataatcacgccgacgccgagtttcaagagcgtctgcaagaagatacgtcctttgggggcaacctcgggcgagcagtcttccaggccaaaaagagggtactcgagcctctgggtctggttgaggaaggcgctaagacggctcctggaaagaagcggccagtagaaccggactccagctcgggcatcggcaagtcaggccggcagcccgcgaaaaagagactgaattttgggcagactggcgactcagagtcagtgcctgacccccaacctctctcagaaccacccgcaggtccctctggtctgggatctggtacaatggctgcaggcggtggcgctccaatggcagacaataacgaaggcgccgacggagtgggtaatgcctcaggaaattggcattgcgattccacatggctgggcgaccgagtcatcaccaccagcactcggacctgggccctccccacctacaacaaccacctctacaagcaaatctccaacgggacctcgggaggcagcagcaacgacaacacctactttggctacagcaccccctgggggtattttgactttaacagattccactgccacttttcaccacgtgactggcagcgactcatcaacaacaactggggattccggcccaagaggctcaacttcaagctcttcaacatccaggtcaaggaggtcacccagaatgaaggcaccaagaccatcgccaataacctcaccagcacggtgcaggtctttacggactcgaagtaccagctcccgtacgtgctcggctctgcccaccagggctgcctgcctccgttcccggcggacgtgttcatgattccgcagtacgggtacctgacgctgaacaacgggagccaggccgtggggcgatcctccttctactgcctggagtactttccctcgcagatgctgagaacgggcaacaactttaccttcagctacaccttcgaggacgtgcccttccacagcagctacgcgcacagccagagcctggaccggctgatgaacccgctgattgaccagtacctgtactacctgtctcggactcagaccaacgggaccaatgccacgcagactctgttgtttgctcaggccgggcctcagaacatgtcggctcaggccaagaactggctgcctggtccttgctatcggcagcagcgcgtctctacgacagtgtcgcaaaacaacaacagcaactttacctggaccggggcgaccaagtaccacctgaacggccgagactccctggtgaaccccggtgtcgccatggcaacgcacaaggacgacgaggagcgcttcttcccgagcagcggggtcctgatgtttggcaagcagggcgctggaaaggacaatgtcgagtacaccaacgtgatgctcaccagcgaggaggagatcaagaccaccaaccctgtggccacggagcagtacggtgtggtggctgacaatctgcagcagaccaactcggctcccattgtgggggcagtcaacagccagggggccttacccggtatggtctggcagaaccgggacgtgtacctgcagggtcccatctgggccaagatcccgcatacggacggcaactttcacccgtctcctctcatgggcggctttggactgaaacacccgcctccccagatcctgatcaaaaacacgccggtacctgcggatcccccggtgaactttacggacgctaagctggcgagtttcatcacgcagtacagcaccgggcaggtcagcgtggagattgagtgggagctgcagaaggagaacagcaagcgctggaatcccgagattcagtacacttccaattattataaatcagctaatgtggactttgccgtcaatgcagatggtgtatatagtgaaccccgccccattggcactcgttacctcacccgtaatctgtaa

SEQ ID NO: 385 - protein, 731 aa, Adeno-associated virus
MAADGYLPDWLEDNLSEGIREWWALKPGAPQPKANQQKQDDGRGLVLPGYKYLGPFNGLDKGEPVNEADAAALEHDKAYDQQLKAGDNPYLRYNHADAEFQERLQEDTSFGGNLGRAVFQAKKRVLEPLGLVEEGAKTAPGKKRPVEPDSSSGIGKSGRQPAKKRLNFGQTGDSESVPDPQPLSEPPAGPSGLGSGTMAAGGGAPMADNNEGADGVGNASGNWHCDSTWLGDRVITTSTRTWALPTYNNHLYKQISNGTSGGSSNDNTYFGYSTPWGYFDFNRFHCHFSPRDWQRLINNNWGFRPKRLNFKLFNIQVKEVTQNEGTKTIANNLTSTVQVFTDSKYQLPYVLGSAHQGCLPPFPADVFMIPQYGYLTLNNGSQAVGRSSFYCLEYFPSQMLRTGNNFTFSYTFEDVPFHSSYAHSQSLDRLMNPLIDQYLYYLSRTQTNGTNATQTLLFAQAGPQNMSAQAKNWLPGPCYRQQRVSTTVSQNNNSNFTWTGATKYHLNGRDSLVNPGVAMATHKDDEERFFPSSGVLMFGKQGAGKDNVEYTNVMLTSEEEIKTTNPVATEQYGVVADNLQQTNSAPIVGAVNSQGALPGMVWQNRDVYLQGPIWAKIPHTDGNFHPSPLMGGFGLKHPPPQILIKNTPVPADPPVNFTDAKLASFITQYSTGQVSVEIEWELQKENSKRWNPEIQYTSNYYKSANVDFAVNADGVYSEPRPIGTRYLTRNL

SEQ ID NO: 386 - DNA, 2196 bp, Adeno-associated virus
atggctgctgacggttatcttccagattggctcgaggacaacctctctgagggcattcgcgagtggtgggcgctgaaacctggagccccgcaacccaaagccaaccagcaaaagcaggacgacggccggggtctggtgcttcctggctacaagtacctcggacccttcaacggactcgacaagggggagcccgtcaacgaggcggacgccgcggccctcgagcacgacaaggcctacgaccagcagctcaaagcgggtgacaatccgtacctgcggtataatcacgccgacgccgagtttcaagagcgtctgcaagaagatacgtcctttgggggcaacctcgggcgagcagtcttccaggccaaaaagagggtactcgagcctctgggtctggttgaggaaggcgctaagacggctcctggaaagaagcggccagtagaaccggactccagctcgggcatcggcaagtcaggccagcagcccgcgaaaaagagactgaattttgggccgactggcgactcagagtcagtgcctgacccccaacctctctcagaaccacctgcaggtccctctggtctgggatctggtacaatggctgcaggcggtggcgctccaatggcagacaataacgaaggcgccgacggagtgggtaatgtctcaggaaattggcattgcgattccacatggctgggcgaccgagtcatcaccaccagcactcggacctgggccctccccacctacaacaaccacctctacaagcaaatctccaacgggacctcgggaggcagcagcaacgacaacacctactttggctacagcaccccctgggggtattttgactttaacagattccactgccacttttcaccacgcgactggcagcgactcatcaacaacaactggggattccggcccaagaagctcaacttcaagctcttcaacatccaggtcaaggaggtcacccagaatgaaggcaccaagaccaccgccaataacctcaccagcacggtgcaggtctttacggactcggagtaccagctcccgtacgtgctcggctctgcccaccagggctgcctgcctccgttcccggcggacgtgttcatgattccgcagtacgggtacctgacgctgaacaacgggagccaggccgtggggcgatcctccttctactgcctggagtactttccctcgcagatgctgagaacgggcaacaactttaccttcagctacaccttcgaggacgtgcccttccacagcagctacgcgcacagccagagcctggaccggctgatgaacccgctgattgaccagtacctgtactacctgtctcggactcagaccaacgggaccaatgccacgcagactctgttgtttgctcaggccgggcctcagaacatgtcggctcaggccaagaactggctgcctggtccttgctatcggcagcagcgcgtctctacggcagtgtcgcaaaacaacaacagcaactttacctggaccggggcgaccaagtaccacctgaacggccgagactccctggtgaaccccggtgtcgccatggcaacgcacaaggacgacgaggagcgcttcttcccgagcagcggggtcctgatgtttggcaagcagggcgctggaaaggacaatgtcgagtacaccaacgtgatgctcaccagcgaggaggagatcaagaccaccaaccctgtggccacggagcagtacggtgtggtggctgacaatctgcagcagaccaactcggctcccattgtgggggcagtcaacagccagggggccttacccggtatggtctggcagaaccgggacgtgtacctgcagggtcccatctgggccaagatcccgcatacggacggcaactttcacccgtctcctctcatgggcggctttggactgaaacacccgcctccccagatcctgatcaaaaacacgccggtacctgcggatcccccggtgaactttacggacgctaagctggcgagtttcatcacgcagtacagcaccgggcaggtcagcgtggagattgagtgggagctgcagaaggagaacagcaagcgctggaatcccgagattcagtacacttccaattattataaatcagctaatgtggactttgccgtcaatgcagatggtgtatatagcgaaccccgccccattggcactcgttacctcacccgtaatctgtaa

SEQ ID NO: 387 - protein, 731 aa, Adeno-associated virus
MAADGYLPDWLEDNLSEGIREWWALKPGAPQPKANQQKQDDGRGLVLPGYKYLGPFNGLDKGEPVNEADAAALEHDKAYDQQLKAGDNPYLRYNHADAEFQERLQEDTSFGGNLGRAVFQAKKRVLEPLGLVEEGAKTAPGKKRPVEPDSSSGIGKSGQQPAKKRLNFGPTGDSESVPDPQPLSEPPAGPSGLGSGTMAAGGGAPMADNNEGADGVGNVSGNWHCDSTWLGDRVITTSTRTWALPTYNNHLYKQISNGTSGGSSNDNTYFGYSTPWGYFDFNRFHCHFSPRDWQRLINNNWGFRPKKLNFKLFNIQVKEVTQNEGTKTTANNLTSTVQVFTDSEYQLPYVLGSAHQGCLPPFPADVFMIPQYGYLTLNNGSQAVGRSSFYCLEYFPSQMLRTGNNFTFSYTFEDVPFHSSYAHSQSLDRLMNPLIDQYLYYLSRTQTNGTNATQTLLFAQAGPQNMSAQAKNWLPGPCYRQQRVSTAVSQNNNSNFTWTGATKYHLNGRDSLVNPGVAMATHKDDEERFFPSSGVLMFGKQGAGKDNVEYTNVMLTSEEEIKTTNPVATEQYGVVADNLQQTNSAPIVGAVNSQGALPGMVWQNRDVYLQGPIWAKIPHTDGNFHPSPLMGGFGLKHPPPQILIKNTPVPADPPVNFTDAKLASFITQYSTGQVSVEIEWELQKENSKRWNPEIQYTSNYYKSANVDFAVNADGVYSEPRPIGTRYLTRNL

SEQ ID NO: 388 - DNA, 4404 bp, Adeno-associated virus
atggctgccgatggttatcttccagattggctcgagggcaacctctctgagggcattcgcgagtggtgggacttgaaacctggagccccgaaacccaaagccaaccagcaaaagcaggacgacggccggggtctggtgcttcctggctacaggtacctcggacccttcaacggactcgacaagggagagccggtcaacgaggcagacgccgcggccctcgagcacgacaaggcctacgacaagcagctcgagcagggggacaacccgtacctcaagtacaaccacgccgacgccgagtttcaggagcgtcttcaagaagatacgtcttttgggggcaacctcgggcgagcagtcttccaggccaagaagcgggttctcgaacctctcggtctggttgaggaaggcgctaagacggctcctggaaagaagagacccatagaatcccccgactcctccacgggcatcggcaagaacggccagccgcccgctaaaaagaagctcaactttgggcagactggcgactcagagtcagtgcccgacccccaacctctcggagaacctcccgccgcgccctcaggtctgggatctggtacaatggctgcaggcggtggcgcaccaatggcagacaataacgaaggcgccgacggagtgggtaatgcctccggaaattggcattgcgattccacatggctgggcgacagagtcatcaccaccagcacccgcacctgggccctgcccacctacaacaaccacctctacaagcagatatcaagtcagagcggggctaccaacgacaaccacttcttcggctacagcaccccctggggctattttgacttcaacagattccactgccacttctcaccacgtgactggcagcgactcatcaacaacaactggggattccggcccagaaagctgcggttcaagttgttcaacatccaggtcaaggaggtcacgacgaacgacggcgttacgaccatcgctaataaccttaccagcacgattcaggtcttctcggactcggagtaccaactgccgtacgtcctcggctctgcgcaccagggctgcctccctccgttccctgcggacgtgttcatgattcctcagtacggatatctgactctaaacaacggcagtcagtctgtgggacgttcctccttctactgcctggagtactttccttctcagatgctgagaacgggcgataactttgaattcagctacacctttgaggaagtgcctttccacagcagctatgcgcacagccagagcctggaccggctgatgaatcccctcatcgaccagtacctgtactacctggcccggacccagagcactacggggtccacaagggagctgcagttccatcaggctgggcccaacaccatggccgagcaatcaaagaactggctgcccggaccctgttatcggcagcagagactgtcaaaaaacatagacagcaacaacaacagtaactttgcctggaccggggccactaaataccatctgaatggtagaaattcattaaccaacccgggcgtagccatggccaccaacaaggacgacgaggaccagttctttcccatcaacggagtgctggtttttggcaaaacgggggctgccaacaagacaacgctggaaaacgtgctaatgaccagcgaggaggagatcaaaaccaccaatcccgtggctacagaagaatacggtgtggtctccagcaacctgcaatcgtctacggccggaccccagacacagactgtcaacagccagggggctctgcccggcatggtctggcagaaccgggacgtgtacctgcagggtcccatctgggccaaaattcctcacacggacggcaactttcacccgtctcccctgatgggcggatttggactcaaacacccgcctcctcaaattctcatcaaaaacaccccggtacctgctaatcctccagaggtgtttactcctgccaagtttgcctcatttatcacgcagtacagcaccggccaggtcagcgtggagatcgagtgggaactgcagaaagaaaacagcaaacgctggaatccagagattcagtacacctcaaattatgccaagtctaataatgtggaatttgctgtcaacaacgaaggggtttatactgagcctcgccccattggcacccgttacctcacccgtaacctgtaaatggctgccgatggttatcttccagattggctcgaggacaacctctctgagggcattcgcgagtggtgggacttgaaacctggagccccgaaacccaaagccaaccagcaaaagcaggacgacggccggggtctggtgcttcctggctacaagtacctcggacccttcaacggactcgacaagggggagcccgtcaacgcggcggacgcagcggccctcgagcacgacaaggcctacgaccagcagctcaaagcgggtgacaatccgtacctgcggtataaccacgccgacgccgagtttcaggagcgtctgcaagaagatacgtcttttgggggcaacctcgggcgagcagtcttccaggccaagaagcgggttctcgaacctctcggtctggttgaggaaggcgctaagacggctcctggaaagaagagaccggtagagccatcaccccagcgttctccagactcctctacgggcatcggcaagaaaggccagcagcccgcgaaaaagagactcaactttgggcagactggcgactcagagtcagtgcccgaccctcaaccaatcggagaaccccccgcaggcccctctggtctgggatctggtacaatggctgcaggcggtggcgctccaatggcagacaataacgaaggcgccgacggagtgggtagttcctcaggaaattggcattgcgattccacatggctgggcgacagagtcatcaccaccagcacccgaacctgggccctccccacctacaacaaccacctctacaagcaaatctccaacgggacttcgggaggaagcaccaacgacaacacctacttcggctacagcaccccctgggggtattttgactttaacagattccactgccacttctcaccacgtgactggcagcgactcatcaacaacaactggggattccggcccaagagactcaacttcaagctcttcaacatccaggtcaaggaggtcacgcagaatgaaggcaccaagaccatcgccaataaccttaccagcacgattcaggtctttacggactcggaataccagctcccgtacgtcctcggctctgcgcaccagggctgcctgcctccgttcccggcggacgtcttcatgattcctcagtacgggtacctgactctgaacaatggcagtcaggccgtgggccgttcctccttctactgcctggagtactttccttctcaaatgctgagaacgggcaacaactttgagttcagctaccagtttgaggacgtgccttttcacagcagctacgcgcacagccaaagcctggaccggctgatgaaccccctcatcgaccagtacctgtactacctgtctcggactcagtccacgggaggtaccgcaggaactcagcagttgctattttctcaggccgggcctaataacatgtcggctcaggccaaaaactggctacccgggccctgctaccggcagcaacgcgtctccacgacactgtcgcaaaataacaacagcaactttgcctggaccggtgccaccaagtatcatctgaatggcagagactctctggtaaatcccggtgtcgctatggcaacccacaaggacgacgaagagcgattttttccgtccagcggagtcttaatgtttgggaaacagggagctggaaaagacaacgtggactatagcagcgttatgctaaccagtgaggaagaaattaaaaccaccaacccagtggccacagaacagtacggcgtggtggccgataacctgcaacagcaaaacgccgctcctattgtaggggccgtcaacagtcaaggagccttacctggcatggtctggcagaaccgggacgtgtacctgcagggtcctatctgggccaagattcctcacacggacggaaactttcatccctcgccgctgatgggaggctttggactgaaacacccgcctcctcagatcctgattaagaatacacctgttcccgcggatcctccaactaccttcagtcaagctaagctggcgtcgttcatcacgcagtacagcaccggacaggtcagcgtggaaattgaatgggagctgcagaaagaaaacagcaaacgctggaacccagagattcaatacacttccaactactacaaatctacaaatgtggactttgctgttaacacagatggcacttattctgagcctcgccccatcggcacccgttacctcacccgtaatctgtaa

SEQ ID NO: 389 - protein, 738 aa, Adeno-associated virus; identical to SEQ ID NO: 7

SEQ ID NO: 390 - DNA, 3129 bp, Adeno-associated virus
gaattcgccctttctacggctgcgtcaactggaccaatgagaactttcccttcaacgattgcgtcgacaagatggtgatctggtgggaggagggcaagatgacggccaaggtcgtggagtccgccaaggccattctcggcggcagcaaagtgcgcgtggaccaaaagtgcaagtcgtccgcccagatcgaccccacccccgtgatcgtcacctccaacaccaacatgtgcgccgtgattgacgggaacagcaccaccttcgagcaccagcagccgttgcaggaccggatgttcaagtttgaactcacccgccgtctggagcacgactttggcaaggtgacaaagcaggaagtcagagagttcttccgctgggcgcaggatcacgtgaccgaggtggcgcacgagttctacgtcagaaagggtggagccaacaagagacccgcccccgatgacgcggataaaagcgagcccaagcgggcctgcccctcagtcgcggatccatcgacgtcagacgcggaaggagctccggtggactttgccgacaggtaccaaaacaaatgttctcgtcacgcgggcatgcttcagatgctgtttccctgcaaaacatgcgagagaatgaatcagaatttcaacatttgcttcacgcacgggaccagagactgttcagaatgtttccccggcgtgtcagaatctcaaccggtcgtcagaaaaaagacgtatcggaaactctgtgcgattcatcatctgctgggggcgggcacccgagattgcttgctcggcctgcgatctggtcaacgtggacctagatgactgtgtttctgagcaataaatgacttaaaccaggtatggctgccgatggttatcttccagattggctcgaggacaacctctctgagggcattcgcgagtggtgggacttgaaacctggagccccgaaacccaaagccaaccagcaaaagcaggacgacggccggggtctggtgcttcctggctacaagtacctcggacccttcaacggactcgacaagggggagcccgtcaacgcggcggacgcagcggccctcgagcacgacaaggcctacgaccagcagctcaaagcgggtgacaatccgtacctgcggtataaccacgccgacgccgagtttcaggagcgtctgcaagaagatacgtcttttgggggcaacctcgggcgagcagtcttccaggccaagaagcgggttctcgaacctctcggtctggttgaggaaggcgctaagacggctcctggaaagaagagaccggtagagccatcaccccagcgttctccagactcctctacgggcatcggcaagaaaggccagcagcccgcgaaaaagagactcaactttgggcagactggcgactcagagtcagtgcccgaccctcaaccaatcggagaaccccccgcaggcccctctggtctgggatctggtacaatggctgcaggcggtggcgctccaatggcagacaataacgaaggcgccgacggagtgggtagttcctcaggaaattggcattgcgattccacatggctgggcgacagagtcatcaccaccagcacccgaacctgggccctccccacctacaacaaccacctctacaagcaaatctccaacgggacttcgggaggaagcaccaacgacaacacctacttcggctacagcaccccctgggggtattttgactttaacagattccactgccacttctcaccacgtgactggcagcgactcatcaacaacaactggggattccggcccaagagactcaacttcaagctcttcaacatccaggtcaaggaggtcacgcagaatgaaggcaccaagaccatcgccaataaccttaccagcacgattcaggtctttacggactcggaataccagctcccgtacgtcctcggctctgcgcaccagggctgcctgcctccgttcccggcggacgtcttcatgattcctcagtacgggtacctgactctgaacaatggcagtcaggccgtgggccgttcctccttctactgcctggagtactttccttctcaaatgctgagaacgggcaacaactttgagttcagctaccagtttgaggacgtgccttttcacagcagctacgcgcacagccaaagcctggaccggctgatgaaccccctcatcgaccagtacctgtactacctgtctcggactcagtccacgggaggtaccgcaggaactcagcagttgctattttctcaggccgggcctaataacatgtcggctcaggccaaaaactggctacccgggccctgctaccggcagcaacgcgtctccacgacactgtcgcaaaataacaacagcaactttgcctggaccggtgccaccaagtatcatctgaatggcagagactctctggtaaatcccggtgtcgctatggcaacccacaaggacgacgaagagcgattttttccgtccagcggagtcttaatgtttgggaaacagggagctggaaaagacaacgtggactatagcagcgttatgctaaccagtgaggaagaaattaaaaccaccaacccagtggccacagaacagtacggcgtggtggccgataacctgcaacagcaaaacgccgctcctattgtaggggccgtcaacagtcaaggagccttacctggcatggtctggcagaaccgggacgtgtacctgcagggtcctatctgggccaagattcctcacacggacggaaactttcatccctcgccgctgatgggaggctttggactgaaacacccgcctcctcagatcctgattaagaatacacctgttcccgcggatcctccaactaccttcagtcaagctaagctggcgtcgttcatcacgcagtacagcaccggacaggtcagcgtggaaattgaatgggagctgcagaaagaaaacagcaaacgctggaacccagagattcaatacacttccaactactacaaatctacaaatgtggactttgctgttaacacagatggcacttattctgagcctcgccccatcggcacccgttacctcacccgtaatctgtaattgcttgttaatcaataaaccggttgattcgtttcagttgaactttggtctctgcgaagggcgaattc

SEQ ID NO: 391 - protein, 738 aa, Artificial Sequence; identical to SEQ ID NO: 7
  Description of Artificial Sequence: Synthetic polypeptide

SEQ ID NO: 392 - protein, 733 aa, Artificial Sequence
  Description of Artificial Sequence: Synthetic polypeptide
MAADGYLPDWLEDNLSEGIREWWDLRPGAPKPKANQQKQDDGRGLVLPGYKYLGPFNGLDKGEPVNEADAAALEHDKAYDKQLEQGDNPYLKYNHADAEFQERLQEDTSFGGNLGRAVFQAKKRVLEPLGLVEEGAKTAPGKKRPIESPDSSTGIGKKGQQPAKKRLNFGQTGDSESVPDPQPIGEPPAGPSGLGSGTMAAGGGAPMADNNEGADGVGSSSGNWHCDSTWLGDRVITTSTRTWALPTYNNHLYKQISNGTSGGSTNDNTYFGYSTPWGYFDFNRFHCHFSPRDWQRLINNNWGFRPKRLNFKLFNIQVKEVTQNEGTKTIANNLTSTIQVFTDSEYQLPYVLGSAHQGCLPPFPADVFMIPQYGYLTLNNGSQAVGRSSFYCLEYFPSQMLRTGNNFEFSYQFEDVPFHSSYAHSQSLDRLMNPLIDQYLYYLSRTQSTGGTAGTQQLLFSQAGPNNMSAQAKNWLPGPCYRQQRVSTTVSQNNNSNFAWTGATKYHLNGRDSLVNPGVAMATHKGDEERFFPSSGVLMFGKQGAGKDNVDYSSVMLTSEEEIKTTNPVATEQYGVVADNLQQQNAAPIVGAVNSQGALPGMVWQNRDVYLQGPIWAKIPHTDGNFHPSPLMGGFGLKHPPPQILIKNTPVPADPPTTFSQAKLASFITQYSTGQVSVEIEWELQKENSKRWNPEIQYTSNYYKSTNVDFAVNTEGTYSEPRPIGTRYLTRNL

SEQ ID NO: 393 - DNA, 2501 bp, Adeno-associated virus
gaattcgcccttggctgcgtcaactggaccaatgagaactttcccttcaacgattgcgtcgacaagatggtgatctggtgggaggagggcaagatgacggccaaggtcgtggagtccgccaaggccattcatcatctgctggggcgggctcccgagattgcttgctcggcctgcgatctggtcaacgtggacctggatgactgtgtttctgagcaataaatgacttaaaccaggtatggctgccgatggttatcttccagattggctcgaggacaacctctctgagggcattcgcgagtggtgggacttgagacctggagccccgaaacccaaagccaaccagcaaaagcaggacgacggccggggtctggtgcttcctggctacaagtacctcggacccttcaacggactcgacaagggagagccggtcaacgaggcagacgccgcggccctcgagcacgacaaggcctacgacaagcagctcgagcagggggacaacccgtacctcaagtacaaccacgccgacgccgagtttcaggagcgtcttcaagaagatacgtcttttgggggcaacctcgggcgagcagtcttccaggccaagaagcgggttctcgaacctctcggtctggttgaggaaggcgctaagacggctcctggaaagaagagacccatagaatcccccgactcctccacgggcatcggcaagaaaggccagcagcccgctaaaaagagactcaactttgggcagactggcgactcagagtcagtgcccgaccctcaaccaatcggagaaccccccgcaggcccctctggtctgggatctggcacaatggctgcaggcggtggcgctccaatggcagacaataacgaaggcgccgacggagtgggtagttcctcaggaaattggcattgcgattccacatggctgggcgacagagtcatcaccaccagcacccgaacctgggccctccccacctacaacaaccacctctacaagcaaatctccaacgggacatcgggaggaagcaccaacgacaacacctacttcggctacagcaccccctgggggtattttgactttaacagattccactgccacttctcaccacgtgactggcagcgactcatcaacaacaactggggattccggcccaagagactcaacttcaagctcttcaacatccaggtcaaggaggtcacgcagaatgaaggcaccaagaccatcgccaataaccttaccagcacgattcaggtctttacggactcggaataccagctcccgtacgtcctcggctctgcgcaccagggctgcctgcctccgttcccggcggacgtcttcatgattcctcagtacgggtacctgactctgaacaacggcagtcaggccgtgggccgttcctccttctactgcctggagtactttccttctcaaatgctgagaacgggcaacaactttgagttcagctaccagtttgaggacgtgccttttcacagcagctatgcgcacagccaaagcctggaccggctgatgaaccccctcatcgaccagtacctgtactacctgtctcggactcagtccacgggaggtaccgcaggaactcagcagttgctattttctcaggccgggcctaataacatgtcggctcaggccaaaaactggctacccgggccctgctaccggcagcaacgcgtctccacgacagtgtcgcaaaataacaacagcaactttgcttggaccggtgccaccaagtatcatctgaatggcagagactctctggtaaatcccggtgtcgctatggcaacgcacaagggcgacgaagagcgattttttccatccagcggagtcttgatgtttgggaaacagggagctggaaaagacaacgtagactatagcagcgttatgctaaccagtgaggaagaaatcaaaaccaccaacccagtggccacagaacagtacggcgtggtggccgataacctgcaacagcaaaacgccgctcctattgtaggggccgtcaacagtcaaggagccttacctggcatggtctggcagaaccgggacgtgtacctgcagggtcctatctgggccaagattcctcacacggacggcaactttcatccttcgccgctgatgggaggctttggactgaaacacccgcctcctcagatcctgattaagaatacacctgttcccgcggatcctccaactaccttcagtcaagccaagctggcgtcgttcatcacgcagtacagcaccggacaggtcagcgtggaaattgaatgggagctgcagaaagagaacagcaagcgctggaacccagagattcagtatacttccaactactacaaatctacaaatgtggactttgctgtcaatactgagggtacttattcagagcctcgccccattggcacccgttacctcacccgtaacctgtaattgcctgttaatcaataaaccggttgattcgtttcagttgaactttggtctcaagggcgaattc

SEQ ID NO: 394 - DNA, 2187 bp, Adeno-associated virus
atggctgccgatggttatcttccagattggctcgaggacaacctctctgagggcattcgcgagtggtgggacttgaaacctggagccccgaaacccaaagccaaccagcaaaagcaggacgacggccggggtctggtgcttcctggctacaagtacctcggacccttcaacggactcgacaagggagagccggtcaacgaggcagacgccgcggccctcgagcacgacaaggcctacgacaagcagctcgagcagggggacaacccgtacctcaagtacaaccacgccgacgccgagtttcaggagcgtcttcaagaagatacgtcttttgggggcaacctcgggcgagcagtcttccaggccaagaagcgggttctcgaacctctcggtctggttgaggaaggcgctaagacggctcctggaaagaagagacccatagaatcccccgactcctccacgggcatcggcaagaaaggccagcagcccgctaaaaagaagctcaactttgggcagactggcgactcagagtcagtgcccgacccccaacctctcggagaacctcccgccgcgccctcaggtctgggatctggtacaatggctgcaggcggtggcgcaccaatggcagacaataacgaaggcgccgacggagtgggtaatgcctccggaaattggcattgcgattccacatggctgggcgacagagtcatcaccaccagcacccgcacctgggccctgcccacctacaacaaccacctctacaagcagatatcaagtcagagcggggctaccaacgacaaccacttcttcggctacagcaccccctggggctattttgacttcaacagattccactgccacttctcaccacgtgactggcagcgactcatcaacaacaactggggattccggcccagaaagctgcggttcaagttgttcaacatccaggtcaaggaggtcacgacgaacgacggcgttacgaccatcgctaataaccttaccagcacgattcaggtcttctcggactcggagtaccaactgccgtacgtcctcggctctgcgcaccagggctgcctccctccgttccctgcggacgtgttcatgattcctcagtacggatatctgactctaaacaacggcagtcagtctgtgggacgttcctccttctactgcctggagtactttccttctcagatgctgagaacgggcaataactttgaattcagctacacctttgaggaagtgcctttccacagcagctatgcgcacagccagagcctggaccggctgatgaatcccctcatcgaccagtacctgtactacctggcccggacccagagcactacggggtccacaagggagctgcagttccatcaggctgggcccaacaccatggccgagcaatcaaagaactggctgcccggaccctgttatcggcagcagagactgtcaaaaaacatagacagcaacaacaacagtaactttgcctggaccggggccactaaataccatctgaatggtagaaattcattaaccaacccgggcgtagccatggccaccaacaaggacgacgaggaccagttctttcccatcaacggagtgctggtttttggcgaaacgggggctgccaacaagacaacgctggaaaacgtgctaatgaccagcgaggaggagatcaaaaccaccaatcccgtggctacagaagaatacggtgtggtctccagcaacctgcaatcgtctacggccggaccccagacacagactgtcaacagccagggggctctgcccggcatggtctggcagaaccgggacgtgtacctgcagggtcccatctgggccaaaattcctcacacggacggcaactttcacccgtctcccctgatgggcggatttggactcaaacacccgcctcctcaaattctcatcaaaaacaccccggtacctgctaatcctccagaggtgtttactcctgccaagtttgcctcatttatcacgcagtacagcaccggccaggtcagcgtggagatcgagtgggaactgcagaaagaaaacagcaaacgctggaatccagagattcagtacacctcaaattatgccaagtctaataatgtggaatttgctgtcaacaacgaaggggtttatactgagcctcgccccattggcacccgttacctcacccgtaacctgtaa

SEQ ID NO: 395 - protein, 728 aa, Adeno-associated virus; identical to SEQ ID NO: 63

SEQ ID NO: 396 - protein, 728 aa, Adeno-associated virus; identical to SEQ ID NO: 155

SEQ ID NO: 397 - protein, 728 aa, Adeno-associated virus; identical to SEQ ID NO: 155

SEQ ID NO: 398 - protein, 733 aa, Artificial Sequence
  Description of Artificial Sequence: Synthetic polypeptide
MAADGHLPDWLEDNLSEGIREWWDLKPGAPKPKANQQKQDDGRGLVLPGYKYLGPFNGLDKGEPVNAADAAALEHDKAYDQQLKAGDNPYLRYNHADAEFQERLQEDTSFGGNLGRAVFQAKKRVLEPLGLVEEGAKTAPGKKRPIESPDSSTGIGKKGQQPAKKKLNFGQTGDSESVPDPQPIGEPPAGPSGLGSGTMAAGGGAPMADNNEGADGVGSSSGNWHCDSTWLGDRVITTSTRTWALPTYNNHLYKQISNGTSGGSTNDNTYFGYSTPWGYFDFNRFHCHFSPRDWQRLINNSWGFRPKRLNFKLFNIQVKEVTQNEGTKTIANNLTSTIQVFTDSEYQLPYVLGSAHQGCLPPFPADVFMIPQYGYLTLNNGSQAVGRSSFYCLEYFPSQMLRTGNNFEFSYQFEDVPFHSSYAHSQSLDRLMNPLIDQYLYYLSRTQSTGGTAGTQQLLFSQAGPNNMSAQAKNWLPGPCYRQQRVSTTLSQNNNSNFAWTGATKYHLNGRDSLVNPGVAMATHKDDEERFFPSSGVLMFGKQGAGKDNVDYSSVMLTSEEEIKTTNPVATEQYGVVADNLQQQNAAPIVGAVNSQGALPGMVWQNRDVYLQGPIWAKIPHTDGNFHPSPLMGGFGLKHPPPQILIKNTPVPADPPTTFSQAKLASFITQYSTGQVSVEIEWELQKENSKRWNPEIQYTSNYYKSTNVDFAVNTEGTYSEPRPIGTRYLTRNL

SEQ ID NO: 399 - DNA, 3113 bp, Adeno-associated virus
gaattcgccctttctacggctgcgtcaactggaccaatgagaactttcccttcaacgattgcgtcgacaagatggtgatctggtgggaggagggcaagatgacggccaaggtcgtggagtccgccaaggccattctcggcggcagcaaggtgcgcgtggaccaaaagtgcaagtcgtccgcccagatcgatcccacccccgtgatcgtcacttccaacaccaacatgtgcgccgtgattgacgggaacagcaccaccttcgagcaccagcagccgttacaagaccggatgttcaaatttgaactcacccgccgtctggagcatgactttggcaaggtgacaaagcaggaagtcaaagagttcttccgctgggcgcaggatcacgtgaccgaggtggcgcatgagttctacgtcagaaagggtggagccaacaagagacccgcccccgatgacgcggataaaagcgagcccaagcgggcctgcccctcagtcgcggatccatcgacgtcagacgcggaaggagctccggtggactttgccgacaggtaccaaaacaaatgttctcgtcacgcgggcatgcttcagatgctgcttccctgcaagacatgcgagagaatgaatcagaatttcagcatttgcttcacgcacgggaccagagactgttcagaatgtttccccggcgtgtcagaatctcaaccggtcgtcagaaagaggacgtatcggaaactctgtgccattcatcatctgctggggcgggctcccgagattgcttgctcggcctgcgatctggtcaacgtggacctggatgactgtgtttctgagcaataaatgacttaaaccaggtatggctgccgatggtcatcttccagattggctcgaggacaacctctctgagggcattcgcgagtggtgggacttgaaacctggagccccgaaacccaaagccaaccagcaaaagcaggacgacggccggggtctggtgcttcctggctacaagtacctcggacccttcaacggactcgacaagggggagcccgtcaacgcggcggacgcagcggccctcgagcacgacaaggcctacgaccagcagctcaaagcgggtgacaatccgtacctgcggtataaccacgccgacgccgagtttcaggagcgtcttcaagaagatacgtcttttgggggcaacctcgggcgagcagtcttccaggccaagaagcgggttctcgaacctctcggtctggttgaggaaggcgctaagacggctcctggaaagaagagacccatagaatcccccgactcctccacgggcatcggcaagaaaggccagcagcccgctaaaaagaagctcaactttgggcagactggcgactcagagtcagtgcccgaccctcaaccaatcggagaaccccccgcaggcccctctggtctgggatctggtacaatggctgcaggcggtggcgctccaatggcagacaataacgaaggcgccgacggagtgggtagttcctcaggaaattggcattgcgattccacatagctgggcgacagagtcatcaccaccagcacccgaacctgggccctccccacctacaacaaccacctctacaagcaaatctccaacgggacatcgggaggaagcaccaacgacaacacctacttcggctacagcaccccctgggggtattttgactttaacagattccactgccacttctcaccacgtgactggcagcgactcatcaacaacagctggggattccggcccaagagactcaacttcaagctcttcaacatccaggtcaaggaggtcacgcagaatgaaggcaccaagaccatcgccaataaccttaccagcacgattcaggtctttacggactcggaataccagctcccgtacgtcctcggctctgcgcaccagggctgcctgcctccgttcccggcggacgtcttcatgattcctcagtacgggtacctgactctgaacaacggcagtcaggccgtgggccgttcctccttctactgcctggagtactttccttctcaaatgctgagaacgggcaacaactttgagttcagctaccagtttgaggacgtgccttttcacagcagctacgcgcacagccaaagcctggaccggctgatgaaccccctcatcgaccagtacctgtactacctgtctcggactcagtccacgggaggtaccgcaggaactcagcagttgctattttctcaggccgggcctaataacatgtcggctcaggccaaaaactggctacccgggccctgctaccggcagcaacgcgtctccacgacactgtcgcaaaataacaacagcaactttgcttggaccggtgccaccaagtatcatctgaatggcagagactctctggtaaatcccggtgtcgctatggcaacgcacaaggacgacgaagagcgattttttccatccagcggagtcttgatgtttgggaaacagggagctggaaaagacaacgtggactatagcagcgttatgctaaccagtgaggaagaaatcaaaaccaccaacccagtggccacagaacagtacggcgtggtggccgataacctgcaacagcaaaacgccgctcctattgtaggggccgtcaacagtcaaggagccttacctggcatggtctggcagaaccgggacgtgtacctgcagggtcctatctgggccaagattcctcacacggacggcaactttcatccttcgccgctgatgggaggctttggactgaaacacccgcctcctcagatcctgattaagaatacacctgttcccgcggatcctccaactaccttcagtcaagccaagctggcgtcgttcatcacgcagtacagcaccggacaggtcagcgtggaaattgaatgggagctgcagaaagagaacagcaagcgctggaacccagagattcagtatacttccaactactacaaatctacaaatgtggactttgctgtcaatactgagggtacttattcagagcctcgccccattggcacccgttacctcacccgtaacctgtaattgcctgttaatcaataaaccggttaattcgtttcagttgaactttggtctctgcgaagggcgaattc

SEQ ID NO: 400 - protein, 731 aa, Artificial Sequence
  Description of Artificial Sequence: Synthetic polypeptide
MAADGYLPDWLEDNLSEGIREWWDLKPGAPKPKANQQKQDDGRGLVLPGYKYLGPFNGLDKGEPVNEADAAALEHDKAYDKQLEQGDNPYLKYNHADAEFQERLQEDTSFGGNLGRAVFRAKKRVLEPLGLVEEGAKTAPGKKRPIESPDSSTGIGKKGQQPAKKKLNFGQTGDSESVPDPQPLGEPPAAPSGLGSGTMAAGGGAPMADNNEGADGVGNASGNWHCDSTWLGDRVITTSTRTWALPTYNNHLYKQISSQSGATNDNHFFGYSTPWGYFDFNRFHCHFSPRDWQRLINNNRGFRPRKLRFKLFNIQVKEVTTNDGVTTIANNLTSTIQVFSDSEYQLPYVLGSAHQGCLPPFPADVFMIPQYGYLTLNNGSQSVGRSSFYCLEYFPSQMLRTGNNFEFSYQFEDVPFHSSYAHSQSLDRLMNPLIDQYLYYLSRTQSTGGTAGTQQLLFSQAGPNNMSAQAKNWLPGPCYRQQRVSTTLSQNNNSNFAWTGATKYHLNGRDSLVNPGVAMATHKDDEERFFPSSGVLMFGKQGAGKDNVDYSSVMLTSEEEIKTTNPVATEQYGVVADNLQQQNAAPIVGAVNSQGALPGMAWQNRDVYLQGPIWAKIPHTDGNFHPSPLMGGFGLKHPPPQILIKNTPVPADPPTTFSQAKLASFITQYSTGQVSVEIEWELQKENSKRWNPEIQYTSNYYKSTNVDFAVNTEGTYSEPRPIGTRYLTRNL

SEQ ID NO: 401 - DNA, 3106 bp, Adeno-associated virus
gaattcgcccttctacggctgcgtcaactggaccaatgagaactttcccttcaacgattgcgtcgacaagatggtgatctggtgggaggagggcaagatgacggccaaggtcgtggagtccgccaaggccattctcggcggcagcaaggtgcgcgtggaccaaaagtgcaagtcgtccgcccagatcgaccccacccccgtgatcgtcacctccaacaccaacatgtgcgccgtgattgacgggaacagcaccaccttcgagcaccagcagccgttgcaggaccggatgttcaaatttgaactcacccgccgtctggagcatgactttggcaaggcgacaaagcaggaagtcaaagagttcttccgctgggcgcaggatcacgtgaccgaggtggcgcatgagttctacgtcagaaagggtggagccaacaagagacccgcccccgatgacgcggataaaagcgagcccaagcgggcccgcccctcagtcgcggatccatcgacgtcagacgcggaaggagctccggtggactttgccgacaggtaccaaaacaaatgttctcgtcacgcgggcatgcttcagatgctgtttccctgcaaaacatgcgagagaatgaatcagaatttcaacatttgcttcacgcacgggaccagagactgttcagaatgtttccccggcgtgtcagaatctcaaccggtcgtcagaaagaggacgtatcggaaactctgtgccattcatcatctgctggggcgggctcccgagattgcttgctcggcctgcgatctggtcaacgtggacctggatgactgtgtttctgagcaataaatgacttaaaccaggtatggctgccgatggttatcttccagattggctcgaggacaacctctctgagggcattcgcgagtggtgggacttgaaacctggagccccgaaacccaaagccaaccagcaaaagcaggacgacggccggggtctggtgcttcctggctacaagtacctcggacccttcaacggactcgacaagggagagccggtcaacgaggcagacgccgcggccctcgagcacgacaaggcctacgacaagcagctcgagcagggggacaacccgtacctcaagtacaaccacgccgacgccgagtttcaggagcgtcttcaagaagatacgtcttttgggggcaacctcgggcgagcagtcttccgggccaagaagcgggttctcgaacctctcggtctggttgaggaaggcgctaagacggctcctggaaagaagagacccatagaatcccccgactcctccacgggcatcggcaagaaaggccagcagcccgctaaaaagaagctcaactttgggcagactggcgactcagagtcagtgcccgacccccaacctctcggagaacctcccgccgcgccctcaggtctgggatctggtacaatggctgcaggcggtggcgcaccaatggcagacaataacgaaggcgccgacggagtgggtaatgcctccggaaattggcattgcgattccacatggctgggcgacagagtcatcaccaccagcacccgcacctgggccctgcccacctacaacaaccacctctacaagcagatatcaagtcagagcggggctaccaacgacaaccacttcttcggctacagcaccccctggggctattttgacttcaacagattccactgccacttctcaccacgtgactggcagcgactcatcaacaacaaccggggattccggcccagaaagctgcggttcaagttgttcaacatccaggtcaaggaggtcacgacgaacgacggcgttacgaccatcgctaataaccttaccagcacgattcaggtcttctcggactcggagtaccaactgccgtacgtcctcggctctgcgcaccagggctgcctccctccgttccctgcggacgtgttcatgattcctcagtacggatatctgactctaaacaacggcagtcagtctgtgggacgttcctccttctactgcctggagtactttccttctcagatgctgagaacgggcaataactttgaattcagctaccagtttgaggacgtgccctttcacagcagctacgcgcacagccaaagcctggaccggctgatgaaccccctcatcgaccagtacctgtactacctgtctcggactcagtccacgggaggtaccgcaggaactcagcagttgctattttctcaggccgggcctaataacatgtcggctcaggccaaaaactggctacccgggccctgctaccggcagcaacgcgtctccacgacactgtcgcaaaataacaacagcaactttgcttggaccggtgccaccaagtatcatctgaatggcagagactctctggtaaatcccggtgtcgctatggcaacgcacaaggacgacgaagagcgattttttccatccagcggagtcttgatgtttgggaaacagggagctggaaaagacaacgtggactatagcagcgttatgctaaccagtgaggaagaaatcaaaaccaccaacccagtggccacagaacagtacggcgtggtggccgataacctgcaacagcaaaacgccgctcctattgtaggggccgtcaacagtcaaggagccttacctggcatggcctggcagaaccgggacgtgtacctgcagggtcctatctgggccaagattcctcacacggacggcaactttcatccttcgccgctgatgggaggctttggactgaaacacccgcctcctcagatcctgattaagaatacacctgttcccgcggatcctccaactaccttcagtcaagccaagctggcgtcgttcatcacgcagtacagcaccggacaggtcagcgtggaaattgaatgggagctgcagaaagagaacagcaagcgctggaacccagagattcagtatacttccaactactacaaatctacaaatgtggactttgctgtcaatactgagggtacttattcagagcctcgccccattggcacccgttacctcacccgtaacctgtaattgcctgttaatcaataaaccggttaattcgtttcagttgaactttggtctctgcgaagggcgaattc

SEQ ID NO: 402 - protein, 738 aa, Artificial Sequence
  Description of Artificial Sequence: Synthetic polypeptide
MAADGYLPDWLEDNLSEGIREWWDLKPGAPKPKANQQKQDDGRGLVLPGYKYLGPFNGLDKGEPVNEADAAALEHDKAYDKQLEQGDNPYLKYNHADAEFQERLQEDTSFGGNLGRAVFQAKKRVLEPLGLVEEGAKTAPGKKRPVEPSPQRSPDSSTGIGKTGQQPAKKRLNFGQTGDSESVPDPQPIGEPPAGPSGLGSGTMAAGGGAPMADNNEGADGVGSSSGNWHCDSTWLGDRVITTSTRTWALPTYNNHLYKQISNGTSGGSTNDNTYFGYSTPWGYFDFNRFHCHFSPRDWQRLINNNWGFRPKRLNFKLFNIQVKEVTQNEGTKTIANNLTSTIQVFTDSEYQLPYVLGSAHQGCLPPFPADVFMIPQYGYLTLNNGSQAVGRSSFYCLEYFPSQMLRTGNNFEFSYQFEDVPFHSSYAHSQSLDRLMNPLIDQYLYYLSRTQSTGGTAGTQQLLFSQAGPNNMSAQAKNWLPGPCYRQQRVSTTLSQNNNSNFAWTGATKYHLNGRDSLVNPGVAMATHKDDEERFFPSSGVLMFGKQGAGKDNVDYSSVMLTSEEEIKTTNPVATEQYGVVADNLQQQNAAPIVGAVNSQGALPGMVWQNRDVYLQGPIWAKIPHTDGNFHPSPLMGGFGLKHPPPQILIKNTPVPADPPTTFSQAKLASFITQYSTGQVSVEIEWELQKENSKRWNPEIQYTSNYYKSTNVDFAVNTEGTYSEPRPIGTRYLTRNL

SEQ ID NO: 403 - DNA, 3197 bp, Adeno-associated virus
gaattcgccctttctacggctgcgtcaactggaccaatgagaactttcccttcaacgattgcgtcgacaagatggtgatctggtgggaggagggcaagatgacggccaaggtcgtggagtccgccaaggccattctcggcggcagcaaggtgcgcgtggaccaaaagtgcaagtcgtccgcccagatcgaccccacccccgtgatcgtcacctccaacaccaacatgtgcgccgtgattgacgggaacagcaccaccttcgagcaccagcagccgttacaagaccggatgttcaaatttgaactcacccgccgtctggagcacgactttggcaaggtgacaaagcaggaagtcaaagagttcttccgctgggcgcaggatcacgtgaccgaggtggcgcatgagttctacgtcagaaagggtggagccaacaagagacccgcccccgatgacgcggataaaagcgagcccaagcgggcctgcccctcagtcgcggatccatcgacgtcagacgcggaaggagctccggtggactttgccgacaggtaccaaaacaaatgttctcgtcacgcgggcatgcttcagatgctgtttccctgcaagacatgcgagagaatgaatcagaatttcaacatttgcttcacgcacgggaccagagactgttcagaatgtttccccggcgtgtcagaatctcaaccggtcgtcagaaagaggacgtatcggaaactctgtgccattcatcatctgctggggcgggctcccgagattgcttgctcggcctgcgatctggtcaacgtggacctggatgactgtgtttctgagcaataaatgacttaaaccaggtatggctgccgatggttatcttccagattggctcgaggacaacctctctgagggcattcgcgagtggtgggacttgaaacctggagccccgaaacccaaagccaaccagcaaaagcaggacgacggccggggtctggtgcttcctggctacaagtacctcggacccttcaacggactcgacaagggagagccggtcaacgaggcagacgccgcggccctcgagcacgacaaggcctacgacaagcagctcgagcagggggacaacccgtacctcaagtacaaccacgccgacgccgagtttcaggagcgtcttcaagaagatacgtcttttgggggcaacctcgggcgagcagtcttccaggccaagaagcgggttctcgaacctctcggtctggttgaggaaggcgctaagacggctcctggaaagaagagaccggtagagccatcaccccagcgttctccagactcctctacgggcatcggcaagacaggccagcagcccgcgaaaaagagactcaactttgggcagactggcgactcagagtcagtgcccgaccctcaaccaatcggagaaccccccgcaggcccctctggtctgggatctggtacaatggctgcaggcggtggcgctccaatggcagacaataacgaaggcgccgacggagtgggtagttcctcaggaaattggcattgcgattccacatggctgggcgacagagtcatcaccaccagcacccgaacctgggccctccccacctacaacaaccacctctacaagcaaatctccaacgggacatcgggaggaagcaccaacgacaacacctacttcggctacagcaccccctgggggtattttgactttaacagattccactgccacttctcaccacgtgactggcagcgactcatcaacaacaactggggattccggcccaagagactcaacttcaagctcttcaacatccaggtcaaggaggtcacgcagaatgaaggcaccaagaccatcgccaataaccttaccagcacgattcaggtctttacggactcggaataccagctcccgtacgtcctcggctctgcgcaccagggctgcctgcctccgttcccggcggacgtcttcatgattcctcagtacgggtacctgactctgaacaacggcagtcaggccgtgggccgttcctccttctactgcctggagtactttccttctcaaatgctgagaacgggcaacaactttgagttcagctaccagtttgaggacgtgccttttcacagcagctacgcgcacagccaaagcctggaccggctgatgaaccccctcatcgaccagtacctgtactacctgtctcggactcagtccacgggaggtaccgcaggaactcagcagttgctattttctcaggccgggcctaataacatgtcggctcaggccaaaaactggctacccgggccctgctaccggcagcaacgcgtctccacgacactgtcgcaaaataacaacagcaactttgcttggaccggtgccaccaagtatcatctgaatggcagagactctctggtaaatcccggtgtcgctatggcaacgcacaaggacgacgaagagcgattttttccatccagcggagtcttgatgtttgggaaacagggagctggaaaagacaacgtggactatagcagcgttatgctaaccagtgaggaagaaatcaaaaccaccaacccagtggccacagaacagtacggcgtggtggccgataacctgcaacagcaaaacgccgctcctattgtaggggccgtcaacagtcaaggagccttacctggcatggtctggcagaaccgggacgtgtacctgcagggtcctatctgggccaagattcctcacacggacggcaactttcatccttcgccgctgatgggaggctttggactgaaacacccgcctcctcagatcctgattaagaatacacctgttcccgcggatcctccaactaccttcagtcaagccaagctggcgtcgttcatcacgcagtacagcaccggacaggtcagcgtggaaattgaatgggagctgcagaaagagaacagcaagcgctggaacccagagattcagtatacttccaactactacaaatctacaaatgtggactttgctgtcaatactgagggtacttattcagagcctcgccccattggcacccgttacctcacccgtaacctgtaattgcctgttaatcaataaaccggttaattcgtttcagttgaactttggtctctgcgaagggcgaattcgtttaaacctgcaggactagtccctttagtgagggttaattctgagcttggcgtaatcatgggtcatag

SEQ ID NO: 404 - protein, 735 aa, Artificial Sequence
  Description of Artificial Sequence: Synthetic polypeptide
MAADGYLPDWLEDNLSEGIREWWDLKPGAPKPKANQQKQDDGRGLVLPGYKYLGPFNGLDKGEPVNEADAAALEHDKAYDKQLEQGDNPYLKYNHADAEFQERLQEDTSFGGNLGRAVFQAKKRVLEPLGLVEEGAKTAPGKKRPVEPSPQRSPDSSTGIGKTGQQPAKKRLNFGQTGDSESVPDPQPIGEPPAGPSGLGSGTMAAGGGAPMADNNEGADGVGSSSGNWHCDSTWLGDRVITTSTRTWALPTYNNHLYKQISNGTSGGSTNDNTYFGYSTPWGYFDFNRFHCHFSPRDWQRLINNNWGFRPRKLRFKLFNIQVKEVTTDDGVTTIANNLTSTIQVFSDSEYQLPYVLGSAHQGCLPPFPADVFMIPQYGYLTLNNGSQSVGRSSFYCLEYFPSQMLRTGNNFEFSYTFEEVPFHSSYAHSQSLDRLMNPLIDQYLYYLARTQSTTGSTRELQFHQAGPNTMAEQSKNWLPGPCYRQQRLSKNIDSNNNSNFAWTGATKYHLNGRNSLTNPGVAMATNKDDEDQFFPINGVLVFGKTGAANKTTLENVLMTSEEEIKTTNPVATEEYGVVSSNLQSSTAGPQTQTVNSQGALPGMVWQNRDVYLQGPIWAKIPHTDGNFHPSPLMDGFGLKHPPPQILIKNTPVPANPPEVFTPAKFASFITQYSTGQVSVEIEWELQKENSKRWNPEIQYTSNYAKSNNVEFAVNNEGVYTEPRPIGTRYLTRNL

SEQ ID NO: 405 - DNA, 3276 bp, Adeno-associated virus
gaattcgcccttcgcagagaccaaagttcaactgaaacgaattaaccggtttattgattaacaggcaattacaggttacgggtgaggtaacgggtgccaatggggcgaggctcagtataaaccccttcgttgttgacagcaaattccacattattagacttggcataatttgaggtgtactgaatctctggattccagcgtttgctgttttctttctgcagttcccactcgatctccacgctgacctggccggtgctgtactgcgtgataaatgaggcaaacttggcaggagtaaacacctctggaggattagcaggtaccggggtgtttttgatgagaatttgaggaggcgggtgtttgagtccaaatccgtccatcaggggagacgggtgaaagttgccgtccgtgtgaggaattttggcccagatgggaccctgcaggtacacgtcccggttctgccagaccatgccgggcagagccccctggctgttgacagtctgtgtctggggtccggccgtagacgattgcaggttgctggagaccacaccgtattcttctgtagccacgggattggtggttttgatctcctcctcgctggtcattagcacgttttccagcgttgtcttgttggcagcccccgttttgccaaaaaccagcactccgttgatgggaaagaactggtcctcgtcgtccttgttggtggccatggctacgcccgggttggttaatgaatttctaccattcagatggtatttagtggccccggtccaggcaaagttactgttgttgttgctgtctatgttttttgacagtctctgctgccgataacagggtccgggcagccagttctttgattgctcggccatggtgttgggcccagcctgatggaactgcagctcccttgtggaccccgtagtgctctgggtccgggccaggtagtacaggtactggtcgatgaggggattcatcagccggtccaggctctggctatgcgcatagctgctgtggaaaggcacttcctcaaaggtgtagctgaattcaaagttattgcccgttctcagcatctgagaaggaaagtactccaggcagtagaaggaggaacgtcccacagactgactgccgttgtttagagtcagatatccgtactgaggaatcatgaacacgtccgcagggaacggagggaggcagccctggtgcgcagagccgaggacgtacggcagttggtactccgagtccgagaagacctgaatcgtgctggtaaggttattagcgatggtcgtaacgccgtcgtccgtcgtgacctccttgacctggatgttgaacaacttgaaccgcagctttctgggccggaatccccagttgttgttgatgagtcgctgccagtcacgtggtgagaagtggcagtggaatctgttaaagtcaaaatacccccagggggtgctgtagccgaagtaggtgttgtcgttggtgcttcctcccgatgtcccgttggagatttgcttgtagaggtggttgttgtaggtggggagggcccaggttcgggtgctggtggtgatgactctgtcgcccagccatgtggaatcgcaatgccaatttcctgaggaactacccactccgtcggcgccttcgttattgtctgccattggagcgccaccgcctgcagccattgtaccagatcccagaccagaggggcctgcggggggttctccgattggttgagggtcgggcactgactctgagtcgccagtctgcccaaagttgagtctctttttcgcgggctgctggcctgtcttgccgatgcccgtagaggagtctggagaacgctggggtgatggctctaccggtctcttctttccaggagccgtcttagcgccttcctcaaccagaccgagaggttcgagaacccgcttcttggcctggaagactgctcgcccgaggttgcccccaaaagacgtatcttcttgaagacgctcctgaaactcggcgtcggcgtggttgtacttgaggtacgggttgtccccctgctcgagctgcttgtcgtaggccttgtcgtgctcgagggccgcggcgtctgcctcgttgaccggctctcccttgtcgagtccgttgaagggtccgaggtacttgtagccaggaagcaccagaccccggccgtcgtcctgcttttgctggttggctttgggtttcggggctccaggtttcaagtcccaccactcgcgaatgccctcagagaggttgtcctcgagccaatctggaagataaccatcggcagccatacctggtttaagtcatttattgctcagaaacacagtcatccaggtccacgttgaccagatcgcaggccgagcaagcaatctcgggagcccgccccagcagatgatgaatggcacagagtttccgatacgtcctctttctgacgaccggttgagattctgacacgccggggaaacattctgaacagtctctggtcccgtgcgtgaagcaaatgttgaaattctgattcattctctcgcatgtcttgcagggaaacagcatctgaagcatgcccgcgtgacgagaacacttgttttggtacctgtcggcaaagtccaccggagctccttccgcgtctgacgtcgatggatgcaaaatgtcgcaaaagcactcacgtgacagctaatacaggaccactcccctatgacgtgatttacgtcagcgctatgcccgcgtgacgagaacatttgttttggtacctgtcggcaaagtccaccggagctccttccgcgtctgacgtcgatggatccgcgactgaggggcaggcccgcttgggctcgcttttatccgcgtcatcgggggcgggtctcttgttggctccaccctttctgacgtagaactcatgcgccacctcggtcacgtgatcctgcgcccagcggaagaactctttgacttcctgctttgtcaccttgccaaagtcatgctccagacggcgggtgagttcaaatttgaacatccggtcctgcaacggctgctggtgctcgaaggtggtgctgttcccgtcaatcacggcgcacatgttggtgttggaagtgacgatcacgggggtgggatcgatctgggcggaagacttgcacttttggtccacgcgcaccttgctgccgccgagaatggccttggcggactccacgaccttggccgtcatcttgccctcctcccaccagatcaccatcttgtcgacgcaatcgttgaagggaaagttctcattggtccagttgacgcagccgtagaaagggcgaattc

SEQ ID NO: 406 - protein, 738 aa, Adeno-associated virus; identical to SEQ ID NO: 71

SEQ ID NO: 407 - protein, 738 aa, Adeno-associated virus
MAADGYLPDWLEDNLSEGIREWWDLKPGAPKPKANQQKQDDGRGLVLPGYKYLGPFNGLDKGEPVNAADAAALEHDKAYDQQLKAGDNPYLRYNHADAEFQERLQEDTSFGGNLGRAVFQAKKRVLEPLGLVEEGAKTAPGKKRPVEPSPQRSPDSSTGIGKKGHQPARKRLNFGQTGDSESVPDPQPIGEPPAGPSGLGSGTMAAGGGAPMADNNEGADGVGSSSGNWHCDSTWLGDRVITTSTRTWALPTYNNHLYKQISNGTSGGSTNDNTYFGYSTPWGYFDFNRFHCHFSPRDWQRLINNNWGFRPKRLNFKLFNIQVKEVTQNEGTKTIANNLTSTIQVFTDSEYQLPYVPGSAHQGCLPPFPADVFMIPQYGYLTLNNGSQAVGRSSFYCLEYFPSQMLRTGNNFEFSYTFEDVPFHSSYAHSQSLDRLMNPLIDQYLYYLSRTQSTGGTQGTQQLLFSQAGPANMSAQAKNWLPGPCYRQQRVSTTLSQNNNSNFAWTGATKYHLNGRDSLVNPGVAMATHKDDEERFFPSSGVLMFGKQGAGKDNVDYSSVMLTSEEEIKTTNPVATEQYGVVADNLQQTNGAPIVGTVNSQGALPGMVWQNRDVYLQGPIWAKIPHTDGNFHPSPLMGGFGLKHPPPQILIKNTPVPADPPTTFSQAKLASFITQYSTGQVSVEIEWELQKENSKRWNPEIQYTSNYYKSTNVDFAVNTEGTYSEPRPIGTRYLTRNL

SEQ ID NO: 408 - protein, 738 aa, Adeno-associated virus; identical to SEQ ID NO: 69

SEQ ID NO: 409 - protein, 728 aa, Artificial Sequence
  Description of Artificial Sequence: Synthetic polypeptide
MAADGYLPDWLEDNLSEGIREWWDLKPGAPKPKANQQKQDDGRGLVLPGYKYLGPFNGLDKGEPVNEADAAALEHDKAYDKQLEQGDNPYLKYNHADAEFQERLQEDTSFGGNLGRAVFQAKKRVLEPLGLVEEGAKTAPGKKRPIESPDSSTGIGRKGQQPAKKKLNFGQTGDSESVPDPQPIGEPPAGPSGLGSGTMAAGGGAPMADNNEGADGVGNASGNWHCDSTWLGDRVITTSTRTWALPTYNNHLYKQISSQSGATNDNHFFGYSTPWGYFDFNRFHCHFSPRDWQRLINNNWGFRPRKLRFKLFNIQVKEVTTNDGVTTIANNLTSTIQVFSDSEYQLPYVLGSAHQGCLPPFPADVFMIPQYGYLTLNNGSQSVGRSSFYCLEYFPSQMLRTGNNFEFSYTFEEVPFHSSYAHSQSLDRLMNPLIDQYLYYLARTQSTTGSTRELQFHQAGPNTMAEQSKNWLPGPCYRQQRLSKNIDSNNNSNFAWTGATKYHLNGRNSLTNPGVAMATNKDDEDQFFPINGVLVFGKTGAANKTTLENVLMTSEEEIKTTNPVATEEYGVVSSNLQSSTAGPQTQTVNSQGALPGMVWQNRDVYLQGPIWAKIPHTDGNFHPSPLMGGFGLKHPPPQILIKNTPVPANPPEVFTPAKFASFITQYSTGQVSVEIEWELQKENSKRWNPEIQYTSNYAKSNNVEFAVNNEGVYTEPRPIGTRYLTRNL

SEQ ID NO: 410 - DNA, 2489 bp, Adeno-associated virus
gaattcgccctttctacggctgcgtcaactggaccaatgagaactttcccttcaacgattgcgtcgacaagatggtgatctggtgggaggagggcaagatgacggccaaggtcgtgaagtccgccaaggccattcatcatctgctggggcgggctcccgagattgcttgctcggcctgcgatctggtcaacgtggacctggatgactgtgtttctgagcaataaatgacttaaaccaggtatggctgccgatggttatcttccagattggctcgaggacaacctctctgagggcattcgcgagtggtgggacttgaaacctggagccccgaaacccaaagccaaccagcaaaagcaggacgacggccggggtctggtgcttcctggctacaagtacctcggacccttcaacggactcgacaagggagagccggtcaacgaggcagacgccgcggccctcgagcacgacaaggcctacgacaagcagctcgagcagggggacaacccgtacctcaagtacaaccacgccgacgccgagtttcaggagcgtcttcaagaagatacgtcttttgggggcaacctcgggcgagcagtcttccaggccaagaagcgggttctcgaacctctcggtctggttgaggaaggcgctaagacggctcctggaaagaagagacccatagaatcccccgactcctccacgggcatcggcaggaaaggccagcagcccgctaaaaagaagctcaactttgggcagactggcgactcagagtcagtgcccgaccctcaaccaatcggagaaccccccgcaggcccctctggtctgggatctggtacaatggctgcaggcggtggcgctccaatggcagacaataacgaaggcgccgacggagtgggtaatgcctccggaaattggcattgcgattccacatggctgggcgacagagtcatcaccaccagcacccgcacctgggccctgcccacctacaacaaccacctctacaagcagatatcaagtcagagcggggctaccaacgacaaccacttcttcggctacagcaccccctggggctattttgacttcaacagattccactgccacttctcaccacgtgactggcagcgactcatcaacaacaactggggattccggcccagaaagctgcggttcaagttgttcaacatccaggtcaaggaggtcacgacgaacgacggcgttacgaccatcgccaataaccttaccagcacgattcaggtcttctcggactcggagtaccaactgccgtacgtcctcggctctgcgcaccagggctgcctccctccgttccctgcggacgtgttcatgattcctcagtacggatatctgactctaaacaacggcagtcagtctgtgggacgttcctccttctactgcctggagtactttccttctcagatgctgagaacgggcaataactttgaattcagctacacctttgaggaagtgcctttccacagcagctatgcgcacagccagagcctggaccggctgatgaatcccctcatcgaccagtacctgtactacctggcccggacccagagcactacggggtccacaagggagctgcagttccatcaggctgggcccaacaccatggccgagcaatcaaagaactggctgcccggaccctgttatcggcagcagagactgtcaaaaaacatagacagcaacaacaacagtaactttgcctggaccggggccactaaataccatctgaatggtagaaattcattaaccaacccgggcgtagccatggccaccaacaaggacgacgaggaccagttctttcccatcaacggagtgctggtttttggcaaaacgggggctgccaacaagacaacgctggaaaacgtgctaatgaccagcgaggaggagatcaaaaccaccaatcccgtggctacagaagaatacggtgtggtctccagcaacctgcaatcgtctacggccggaccccagacacagactgtcaacagccagggggctctgcccggcatggtctggcagaaccgggacgtgtacctgcagggtcccatctgggccaaaattcctcacacggacggcaactttcacccgtctcccctgatgggcggatttggactcaaacacccgcctcctcaaattctcatcaaaaacaccccggtacctgctaatcctccagaggtgtttactcctgccaagtttgcctcatttatcacgcagtacagcaccggccaggtcagcgtggagatcgagtgggaactgcagaaagaaaacagcaaacgctggaatccagagattcagtacacctcaaattatgccaagtctaataatgtggaatttgctgtcaacaacgaaggggtttatactgagcctcgccccattggcacccgttacctcacccgtaacctgtaattgcctgttaatcaataaaccggttaattcgtttcagttgaactttggtcaagggcgaattc

SEQ ID NO: 411 - protein, 728 aa, Artificial Sequence
  Description of Artificial Sequence: Synthetic polypeptide
MAADGYLPDWLEDNLSEGIREWWDLKPGAPKPKANQQKQDDGRGLVLPGYKYLGPFNGLDKGEPVNAADAAALEHDKAYDQQLKAGDNPYLRYNHADAEFQERLQEDTSFGGNLGRAVFQAKKRVLEPLGLVEEGAKTAPGKKRPIESPDSSTGIGKKGQQPAKKKLNFGQTGDSESVPDPQPIGEPPAGPSGLGSGTMAAGGGAPMADNNEGADGVGNASGNWHCDSTWLGDRVITTSTRTWALPTYNNHLYKQISSQSGATNDNHFFGYSTPWGYFDFNRFHCHFSPRDWQRLINNNWGFRPRKLRFKLFNIQVKEVTTNDGVTTIANNLTSTIQVFSDSEYQLPYVLGSAHQGCLPPFPADVFMIPQYGYLTLNNGSQSVGRSSFYCLEYFPSQMLRTGNNFEFSYTFEEVPFHSSYAHSQSLDRLMNPLIDQYLYYLARTQSTTGSTRELQFHQAGPNTMAEQSKNWLPGPCYRRQRLSKDIDSNNNSNFAWTGATKYHLNGRNSLTNPGVAMATNKDDEDQFFPINGVLVFGKTGAANKTTLENVLMTSEEEIKTTNPVATEEYGVVSSNLQSSTAGPQTQTVNSQGALPGMVWQNRDVYLQGPIWAKIPHTDGNFHPSPLMGGFGLKHPPPQILIKNTPVPANPPEVFTPAKFASFITQYSTGQVSVEIEWELQKENSKRWNPEIQYTSNYAKSNNVEFAVNNEGVYTEPRPIGTRYLTRNL

SEQ ID NO: 412 - DNA, 3098 bp, Adeno-associated virus
gaattcgccctttctacggctgcgtcaactggaccaatgagaactttcccttcaacgattgcgtcgacaagatggtgatctggtgggaggagggcaagatgacggccaaggtcgtggagtccgccaaggccattctcggcggcagcaaggtgcgcgtggaccaaaagtgcaagtcttccgcccagatcgatcccacccccgtgatcgtcacttccaacaccaacatgtgcgccgtgattgacgggaacagcaccaccttcgagcaccagcagccgttacaagaccggatgttcaaatttgaactcacccgccgtctggagcacgactttggcaaggtgacaaagcaggaagtcaaagagttcttccgctgggcgcaggatcacgtgaccgaggtggcgcatgagttctacgtcagaaagggtggagccaacaagagacccgcccccgatgacgcggataaaagcgagcccaagcgggcctgcccctcagtcgcggatccatcgacgtcagacgcggaaggagctccggtggactttgccgacaggtaccaaaacaaatgttctcgtcacgcgggcatgcttcagatgctgtttccctgcaagacatgcgagagaatgaatcagaatttcaacatttgcttcacgcacgggaccggagactgttcagaatgtttccccggcgtgtcagaatctcaaccggtcgtcagaaagaggacgtatcggaaactctgtgccattcatcatctgctggggcgggctcccgagattgcttgctcggcctgcgatctggtcaacgtggacctggatgactgtgtttctgagcaataaatgacttaaaccaggtatggctgccgatggttatcttccagattggctcgaggacaacctctctgagggcattcgcgagtggtgggacttgaaacctggagccccgaaacccaaagccaaccagcaaaagcaggacgacggccggggtctggtgcttcctggctacaagtacctcggacccttcaacggactcgacaagggagagccggtcaacgcggcggacgcagcggccctcgagcacgacaaggcctacgaccagcagctcaaagcgggtgacaatccgtacctgcggtataaccacgccgacgccgagtttcaggagcgtcttcaagaagatacgtcttttgggggcaacctcgggcgagcagtcttccaggccaagaagcgggttctcgaacctctcggtctggttgaggaaggcgctaagacggctcctggaaagaagagacccatagaatcccccgactcctccacgggcatcggcaagaaaggccagcagcccgctaaaaagaagctcaactttgggcagactggcgactcagagtcagtgcccgaccctcaaccaatcggagaaccccccgcaggcccctctggtctgggatctggtacaatggctgcaggcggtggcgctccaatggcagacaataacgaaggcgccgacggagtgggtaatgcctccggaaattggcattgcgattccacatggctgggcgacagagtcatcaccaccagcacccgcacctgggccctgcccacctacaacaaccacctctacaagcagatatcaagtcagagcggggctaccaacgacaaccacttcttcggctacagcaccccctggggctattttgacttcaacagattccactgccacttctcaccacgtgactggcagcgactcatcaacaacaactggggattccggcccagaaagctgcggttcaagttgttcaacatccaggtcaaggaggtcacgacgaacgacggcgttacgaccatcgctaataaccttaccagcacgattcaggtcttctcggactcggagtaccaactgccgtacgtcctcggctctgcgcaccagggctgcctccctccgttccctgcggacgtgttcatgattcctcagtacggatatctgactctaaacaacggcagtcagtctgtgggacgttcctccttctactgcctggagtactttccttctcagatgctgagaacgggcaataactttgaattcagctacacctttgaggaagtgcctttccacagcagctatgcgcacagccagagcctggaccggctgatgaatcccctcatcgaccagtacctgtactacctggcccggacccagagcactacggggtccacaagggagctgcagttccatcaggctgggcccaacaccatggccgagcaatcaaagaactggctgcccggaccctgttatcggcggcagagactgtcaaaagacatagacagcaacaacaacagtaactttgcctggaccggggccactaaataccatctgaatggtagaaattcattaaccaacccgggcgtagccatggccaccaacaaggacgacgaggaccagttctttcccatcaacggagtgctggtttttggcaaaacgggggctgccaacaagacaacgctggaaaacgtgctaatgaccagcgaggaggagatcaaaaccaccaatcccgtggctacagaagaatacggtgtggtctccagcaacctgcaatcgtctacggccggaccccagacacagactgtcaacagccagggggctctgcccggcatggtctggcagaaccgggacgtgtacctgcagggtcccatctgggccaaaattcctcacacggacggcaactttcacccgtctcccctgatgggcggatttggactcaaacacccgcctcctcaaattctcatcaaaaacaccccggtacctgctaatcctccagaggtgtttactcctgccaagtttgcctcatttatcacgcagtacagcaccggccaggtcagcgtggagatcgagtgggaactgcagaaagagaacagcaaacgctggaatccagagattcagtacacctcaaattatgccaagtctaataatgtggaatttgctgtcaacaacgaaggggtttatactgagcctcgccccattggcacccgttacctcacccgtaacctgtaattacttgttaatcaataaaccggttgattcgtttcagttgaactttggtctctgcgaagggcgaattc

SEQ ID NO: 413 - protein, 685 aa, Artificial Sequence
  Description of Artificial Sequence: Synthetic polypeptide
MAADGYLPDWLEDNLSEGIREWWDLKPGAPKPKANQQKQDDGRGLVLPGYKYLGPFNGLDKGEPVNEADAAALEHDKAYDKQLEQGDNPYLKYNHADAEFQERLQEDTSFGGNLGRAVFQAKKRVLEPLGLVEEGAKTAPGKKRPVEPSPQRSPDSSTGIGKTGQQPAKKRLNFGQTGDSESVPDPQPIGEPPAGPSGLGSGTMAAGGGAPMADNNEGADGVGSSSGNWHCDSTWLGDRVITTSTRTWALPTYNNHLYKQISNGTSGGSTNDNTYFGYSTPWGYFDFNRFHCHFSPRDWQRLINNNWGFRPKRLNFKLFNIQVKEVTQNEGTKTIANNLTSTIQVFTDSEYQLPYVLGSAHQGCLPPFPADVFMIPQYGYLTLNNGSQAVGRSSFYCLEYFPSQMLRTGNNFEFSYQFEDVPFHSSYAHSQSLDRLTNPLIDQYLYYLARTQSTTGSTRGLQFHQAGPNTMAEQSKNWLPGPCYRQQRLSKNIDSNNNSNFAWTGATKYHLNGRNSLTNPGVAMATNKDDEDQFFPINGVLVFGKTGAANKTTLENVLMTSEEEIKTTNPVATEEYGVVSSNLQSSTAGPQTQTVNSQGALPGMVWQNRDVYLQGPIWAKIPHTDGNFHPSPLMGGFGLKHPPPQILIKYTSNYYKSTNVDFAVNTEGTYSEPRPIGTRYLTRNL

SEQ ID NO: 414 - DNA, 2969 bp, Adeno-associated virus
gaattcgccctttctacggctgcgtcaactggaccaatgagaactttcccttcaacgattgcgtcgacaagatggtgatctggtgggaggagggcaagatgacggccaaggtcgtggagtccgccaaggccattctcggcggcagcaaggtgcgcgtggaccaaaagtgcaagtcgtccgcccagatcgaccccacccccgtgatcgtcacctccaacaccaacatgtgcgccgtgattgacgggaacagcaccaccttcgagcaccagcagccgttacaagaccggatgttcaaatttgaactcacccgccgtctggagcacgactttggcaaggtgacaaagcaggaagtcaaagagttcttccgctgggcgcaggatcacgtgaccgaggtggcgcatgagttctacgtcagaaagggtggagccaacaagagacccgcccccgatgacgcggataaaagcgagcccaagcgggcctgcccctcagtcgcggatccatcgacgtcagacgcggaaggagctccggtggactttgccgacaggtaccaaaacaaatgttctcgtcacgcgggcatgcttcagatgctgtttccctgcaagacatgcgagagaatgaatcagaatttcaacatttgcttcacgcacgggaccagagactgttcagaatgtttccccggcgtgtcagaatctcaaccggtcgtcagaaagaggacgtatcggaaactctgtgccattcatcatctgctggggcgggctcccgagattgcttgctcggcctgcgatctggtcaacgtggacctggatgactgtgtttctgagcaataaatgacttaaaccaggtatggctgccgatggttatcttccagattggctcgaggacaacctctctgagggcatccgcgagtggtgggacttgaaacctggagccccgaaacccaaagccaaccagcaaaagcaggacgacggccggggtctggtgcttcctggctacaagtacctcggacccttcaacggactcgacaagggagagccggtcaacgaggcagacgccgcggccctcgagcacgacaaggcctacgacaagcagctcgagcagggggacaacccgtacctcaagtacaaccacgccgacgccgagtttcaggagcgtcttcaagaagatacgtcttttgggggcaacctcgggcgagcagtcttccaggccaagaagcgggttctcgaacctctcggtctggttgaggaaggcgctaagacggctcctggaaagaagagaccggtagagccatcaccccagcgttctccagactcctctacgggcatcggcaagacaggccagcagcccgcgaaaaagagactcaactttgggcagactggcgactcagagtcagtgcccgaccctcaaccaatcggagaaccccccgcaggcccctctggtctgggatctggtacaatggctgcaggcggtggcgctccaatggcagacaataacgaaggcgccgacggagtgggtagttcctcaggaaattggcattgcgattccacatggctgggcgacagagtcatcaccaccagcacccgaacctgggccctccccacctacaacaaccacctctacaagcaaatctccaacgggacatcgggaggaagcaccaacgacaacacctacttcggctacagcaccccctgggggtattttgactttaacagattccactgccacttctcaccacgtgactggcagcgactcatcaacaacaactggggattccggcccaagagactcaacttcaagctcttcaacatccaggtcaaggaggtcacgcagaatgaaggcaccaagaccatcgccaataaccttaccagcacgattcaggtctttacggactcggaataccagctcccgtacgtcctcggctctgcgcaccagggctgcctgcctccgttcccggcggacgtcttcatgattcctcagtacgggtacctgactctgaacaacggcagtcaggccgtgggccgttcctccttctactgcctggagtactttccttctcaaatgctgagaacgggcaacaactttgagttcagctaccagtttgaggacgtgccttttcacagcagctacgcgcacagccaaagcctggaccggctgacgaaccccctcatcgaccagtacctgtactacctggcccggacccagagcactacggggtccacaagggggctgcagttccatcaggctgggcccaacaccatggccgagcaatcaaagaactggctgcccggaccctgttatcggcagcagagactgtcaaaaaacatagacagcaacaacaacagtaactttgcctggaccggggccactaaataccatctgaatggtagaaattcattaaccaacccgggcgtagccatggccaccaacaaggacgacgaggaccagttctttcccatcaacggagtgctggtttttggcaaaacgggggctgccaacaagacaacgctggaaaacgtgctaatgaccagcgaggaggagatcaaaaccaccaatcccgtggctacagaagaatacggtgtggtctccagcaacctgcaatcgtctacggccggaccccagacacagactgtcaacagccagggggctctgcccggcatggtctggcagaaccgggacgtgtacctgcagggtcccatctgggccaaaattcctcacacggacggcaactttcacccgtctcccctgatgggcggatttggactcaaacacccgcctcctcaaattctcatcaagtatacttccaactactacaaatctacaaatgtggactttgctgtcaatactgagggtacttattcagagcctcgccccattggcacccgttacctcacccgtaacctgtaattgcctgttaatcaataaaccggttaattcgtttcagttgaactttggtctctgcgaagggcgaattc

SEQ ID NO: 415 - protein, 733 aa, Artificial Sequence
  Description of Artificial Sequence: Synthetic polypeptide
MAADGYLPDWLEDNLSEGIREWWDLKPGAPKPKANQQKQDDGRGLVLPGYKYLGPFNGLDKGEPVNAADAAALEHDKAYDQQLKAGDNPYLRYNHADAEFQERLQEDTSFGGNLGRAVFQAKKRVLEPLGLVEEGAKTAPGKKRPIESPDSSTGIGKKGQQPAKKKLNFGQTGDSESVPDPQPIGEPPAGPSGLGSGTMAAGGGAPMADNNEGADGVGSSSGNWHCDSTWLGDRVITTSTRTWALPTYNNHLYKQISNGTSGGSTNDNTYFGYSTPWGYFDFNRFHCHFSPRDWQRLINNNWGFRPKRLNFKLFNIQVKEVTQNEGTKTIANNLTSTIQVFTDSEYQLPYVLGSAHQGCLPPFPADVFMIPQYGYLTLNNGSQAVGRSSFYCLEYFPSQMLRTGNNFEFSYQFEDVPFHSSYAHSQSLDRLMNPLIDQYLYYLSRTQSTGGTAGTQQLLFSQAGPNNMSAQAKNWLPGPCYRQQRVSTTVSQNNNSNFAWTGATKYHLNGRDSLVNPGVAMATHKGDEERFFPSSGVLMFGKQGAGKDNVDYSSVMLTSEEEIKTTNPVATEQYGVVADNLQQQNAAPIVGAVNSQGALPGMVWQNRDVYLQGPIWAKIPHTDGNFHPSPLMGGFGLKHPPPQILIKNTPVPADPPTTFSQAKLASFITQYSTGQVSVEIEWELQKENSKRWNPEIQYTSNYYKSTNVDFAVNTEGTYSEPRPIGTRYLTRSL

SEQ ID NO: 416 - DNA, 3113 bp, Adeno-associated virus
gaattcgccctttctacggctgcgtcaactggaccaatgagaactttcccttcaacgattgcgtcgacaagatggtgatctggtgggaggagggcaagatgacggccaaggtcgtggagtccgccaaggccattctcggcggcagcaaggtgcgcgtggaccaaaagtgcaagtcgtccgcccagatcgatcccacccccgtgatcgtcacttccaacaccaacatgtgcgccgtgattgacgggaacagcaccaccttcgagcaccagcagccgttacaagaccggatgttcaaatttgaactcacccgccgtctggagcatgactttggcaaggtgacaaagcaggaagtcaaagagttcttccgctgggcgcaggatcacgtgaccgaggtggcgcatgagttctacgtcagaaagggtggagccaacaagagacccgcccccgatgacgcggataaaagcgagcccaagcgggcctgcccctcagtcgcggatccatcgacgtcagacgcggaaggagctccggtggactttgccgacaggtaccaaaacaaatgttctcgtcacgcgggcatgcttcagatgctgtttccctgcaagacatgcgagagaatgaatcagaatttcaacatttgcttcacgcacgggaccagagactgttcagaatgtttccccggcgtgtcagaatctcaaccggtcgtcagaaagaggacgtatcggaaactctgtgccattcatcatctgctggggcgggctcccgagattgcttgctcggcctgcgatctggtcaacgtggacctggatgactgtgtttctgagcaataaatgacttaaaccaggtatggctgccgatggttatcttccagattggctcgaggacaacctctctgagggcattcgcgagtggtgggacttgaaacctggagccccgaaacccaaagccaaccagcaaaagcaggacgacggccggggtctggtgcttcctggctacaagtacctcggacccttcaacggactcgacaagggggagcccgtcaacgcggcggacgcagcggccctcgagcacgacaaggcctacgaccagcagctcaaagcgggtgacaatccgtacctgcggtataaccacgccgacgccgagtttcaggagcgtcttcaagaagatacgtcttttgggggcaacctcgggcgagcagtcttccaggccaagaagcgggttctcgaacctctcggtctggttgaggaaggcgctaagacggctcctggaaagaagagacccatagaatcccccgactcctccacgggcatcggcaagaaaggccagcagcccgctaaaaagaagctcaactttgggcagactggcgactcagagtcagtgcccgaccctcaaccaatcggagaaccccccgcaggcccctctggtctgggatctggtacaatggctgcaggcggtggcgctccaatggcagacaataacgaaggcgccgacggagtgggtagttcctcaggaaattggcattgcgattccacatggctgggcgacagagtcatcaccaccagcacccgaacctgggccctccccacctacaacaaccacctctacaagcaaatctccaacgggacatcgggaggaagcaccaacgacaacacctacttcggctacagcaccccctgggggtattttgactttaacagattccactgccacttctcaccacgtgactggcagcgactcatcaacaacaactggggattccggcccaagagactcaacttcaagctcttcaacatccaggtcaaggaggtcacgcagaatgaaggcaccaagaccatcgccaataaccttaccagcacgattcaggtctttacggactcggaataccagctcccgtacgtcctcggctctgcgcaccagggctgcctgcctccgttcccggcggacgtcttcatgattcctcagtacgggtacctgactctgaacaacggcagtcaggccgtgggccgttcctccttctactgcctggagtactttccttctcaaatgctgagaacgggcaacaactttgagttcagctaccagtttgaggacgtgccttttcacagcagctatgcgcacagccaaagcctggaccggctgatgaaccccctcatcgaccagtacctgtactacctgtctcggactcagtccacgggaggtaccgcaggaactcagcagttgctattttctcaggccgggcctaataacatgtcggctcaggccaaaaactggctacccgggccctgctaccggcagcaacgcgtctccacgacagtgtcgcaaaataacaacagcaactttgcttggaccggtgccaccaagtatcatctgaatggcagagactctctggtaaatcccggtgtcgctatggcaacgcacaagggcgacgaagagcgattttttccatccagcggagtcttgatgtttgggaaacagggagctggaaaagacaacgtggactatagcagcgttatgctaaccagtgaggaagaaatcaaaaccaccaacccagtggccacagaacagtacggcgtggtggccgataacctgcaacagcaaaacgccgctcctattgtaggggccgtcaacagtcaaggagccttacctggcatggtctggcagaaccgggacgtgtacctgcagggtcctatctgggccaagattcctcacacggacggcaactttcatccttcgccgctgatgggaggctttggactgaaacacccgcctcctcagatcctgattaagaatacacctgttcccgcggatcctccaactaccttcagtcaagccaagctggcgtcgttcatcacgcagtacagcaccggacaggtcagcgtggaaattgaatgggagctgcagaaagagaacagcaagcgctggaacccagagattcagtatacttccaactactacaaatctacaaatgtggactttgctgtcaatactgagggtacttattcagagcctcgccccattggcacccgttacctcacccgtagcctgtaattgcctgttaatcaataaaccggttgattcgtttcagttgaactttggtctctgcgaagggcgaattc

SEQ ID NO: 417 - protein, 738 aa, Artificial Sequence
  Description of Artificial Sequence: Synthetic polypeptide
MAADGYLPDWLEDNLSEGIREWWDLKPGAPKPKANQQKQDDGRGLVLPGYKYLGPFNGLDKGEPVNAADAAALEHDKAYDQQLKAGDNPYLRYNHADAEFQERLQEDTSFGGNLGRAVFQAKKRVLEPLGLVEEGAKTAPGKKRPVEPSPQRSPDSSTGIGKTGQQPAKKRLNFGQTGDSESVPDPQPIGEPPAGPSGLGSGTMAAGGGAPMADNNEGADGVGSSSGNWHCDSTWLGDRVITTSTRTWALPTYNNHLYKQISNGTSGGSTNDNTYFGYSTPWGYFDFNRFHCHFSPRDWQRLINNNWGFRPKRLNFKLFNIQVKEVTQNEGTKTIANNLTSTIQVFTDSEYQLPYVLGSAHQGCPPPFPADVFMIPQYGYLTLNNGSQAVGRSSFYCLEYFPSQMRRTGNNFEFSYQFEDVPFHSSYAHSQSLDRLMNPLIDQYLYYLSRTQSTGGTAGTQQLLFSQAGPNNMSAQAKNWLPGPCYRQQRVSTTLSQNNNSNFAWTGATKYHLNGRDSLVNPGVAMATHKDDEERFFPSSGVLMFGKQGAGKDNVDYSSVMLTSEEEIKTTNPVATEQYGVVADNLQQQNAAPIVGAVNSQGALPGMVWQNRDVYLQGPIWAKIPHTDGNFHPSPLMGGFGLKHPPPQILIKNTPVPADPPTTFSQAKLASFITQYSTGQVSVEIEWELQKENSKRWNPEIQYTSNYYKSTNVDFAVNTEGTYSEPRPIGTRYLTRNL

SEQ ID NO: 418 - DNA, 3128 bp, Adeno-associated virus
gaattcgccctttctacggctgcgtcaactggaccaatgagaactttcccttcaacgattgcgtcgacaagatggtgatctggtgggaggagggcaagatgacggccaaggtcgtggagtccgccaaggccattctcggcggcagcaaggtgcgcgtggaccaaaagtgcaagtcgtccgcccagatcgaccccacccccgtgatcgtcacctccaacaccaacatgtgcgccgtgattgacgggaacagcaccaccttcgagcaccagcagccgttgcaggaccggatgttcaaatttgaactcacccgccgtctggagcatgactttggcaaggtgacaaagcaggaagtcaaagagttcttccgctgggcgcaggatcacgtgaccgaggtggcgcatgagttctacgtcagaaagggtggagccaacaagagacccgcccccgatgacgcggataaaagcgagcccaagcgggcctgcccctcagtcgcggatccatcgacgtcagacgcggaaggagctccggtggactttgccgacaggtaccaaaacaaatgttctcgtcacgcgggcatgcttcagatgctgtttccctgcaagacatgcgagagaatgaatcagaatttcaacatttgcttcacgcgcgggaccagagactgttcagaatgtttcccgggcgtgtcagaatctcaaccggtcgtcagaaagaggacgtatcggaaactctgtgccattcatcatctgctggggcgggctcccgagattgcttgctcggcctgcgatctggtcaacgtggacctggatgactgtgtttctgagcaataaatgacttaaaccaggtatggctgccgatggttatcttccagattggctcgaggacaacctctctgagggcattcgcgagtggtgggacttgaaacctggagccccgaaacccaaagccaaccagcaaaagcaggacgacggccggggtctggtgcttcctggctacaagtacctcggacccttcaacggactcgacaagggggagcccgtcaacgcggcggacgcagcggccctcgagcacgacaaggcctacgaccagcagctcaaagcgggtgacaatccgtacctgcggtataaccacgccgacgccgagtttcaggagcgtctgcaagaagatacgtcttttgggggcaacctcgggcgagcagtcttccaggccaagaagcgggttctcgaacctctcggtctggttgaggaaggcgctaagacggctcctggaaagaagagaccggtagagccatcaccccagcgttctccagactcctctacgggcatcggcaagacaggccagcagcccgcgaaaaagagactcaactttgggcagactggcgactcagagtcagtgcccgaccctcaaccaatcggagaaccccccgcaggcccctctggtctgggatctggtacaatggctgcaggcggtggcgctccaatggcagacaataacgaaggcgccgacggagtgggtagttcctcaggaaattggcattgcgattccacatggctgggcgacagagtcatcaccaccagcacccgaacctgggccctccccacctacaacaaccacctctacaagcaaatctccaacgggacatcgggaggaagcaccaacgacaacacctacttcggctacagcaccccctgggggtattttgactttaacagattccactgccacttctcaccacgtgactggcagcgactcatcaacaacaactggggattccggcccaagagactcaacttcaagctcttcaacatccaggtcaaggaggtcacgcagaatgaaggcaccaagaccatcgccaataaccttaccagcacgattcaggtctttacggactcggaataccagctcccgtacgtcctcggctctgcgcaccagggctgcccgcctccgttcccggcggacgtcttcatgattcctcagtacgggtacctgactctgaacaacggcagtcaggccgtgggccgttcctccttctactgcctggagtactttccttctcaaatgcggagaacgggcaacaactttgagttcagctaccagtttgaggacgtgccttttcacagcagctacgcgcatagccaaagcctggaccggctgatgaaccccctcatcgaccagtacctgtactacctgtctcggactcagtccacgggaggtaccgcaggaactcagcagttgctattttctcaggccgggcctaataacatgtcggctcaggccaaaaactggctacccgggccctgctaccggcagcaacgcgtctccacgacactgtcgcaaaataacaacagcaactttgcttggaccggtgccaccaagtatcatctgaatggcagagactctctggtaaatcccggtgtcgctatggcaacgcacaaggacgacgaagagcgattttttccatccagcggagtcttgatgtttgggaaacagggagctggaaaagacaacgtggactatagcagcgttatgctaaccagtgaggaagaaatcaaaaccaccaacccagtggccacagaacagtacggcgtggtggccgataacctgcaacagcaaaacgccgctcctattgtaggggccgtcaacagtcaaggagccttacctggcatggtctggcagaaccgggacgtgtacctgcagggtcctatctgggccaagattcctcacacggacggcaactttcatccttcgccgctgatgggaggctttggactgaaacacccgcctcctcagatcctgattaagaatacacctgttcccgcggatcctccaactaccttcagtcaagccaagctggcgtcgttcatcacgcagtacagcaccggacaggtcagcgtggaaattgaatgggagctgcagaaagagaacagcaagcgctggaacccagagattcagtatacttccaactactacaaatctacaaatgtggactttgctgtcaatactgagggtacttattcagagcctcgccccattggcacccgttacctcacccgtaacctgtaattgcctgttaatcaataaaccggttaattcgtttcagttgaactttggtctctgcgaagggcgaattc

SEQ ID NO: 419 - protein, 738 aa, Adeno-associated virus; identical to SEQ ID NO: 407

SEQ ID NO: 420 - DNA, 1933 bp, Adeno-associated virus
  misc_feature (1302)..(1302): n is a, c, t, or g
caaggcctacgaccagcagctcaaagcgggtgacaatccgtacctgcggtataaccacgccgacgccgagtttcaggagcgtcttcaagaagatacgtcttttgggggcaacctcgggcgagcagtcttccaggccaaaaagcgggttctcgaacctcttggtctggttgagacgccagctaagacggcacctggaaagaagcgaccggtagactcgccagactccacctcgggcatcggcaagaaaggccagcagcccgcgaaaaagagactcaactttgggcagactggcgactcagagtcagtccccgaccctcaaccaatcggagaaccaccagcaggcccctctggtctgggatctggtacaatggctgcaggcggtggcgcaccaatggctgacaataacgagggcgccgacggagtgggtaatgcctcaggaaattggcattgcgattccacatggctgggcgacagagtcatcaccaccagcacccgaacctgggccctgcccacctacaacaaccacctctacaagcaaatctccagtcagtcagcagggagcaccaacgataacgtctatttcggctacagcaccccctgggggtattttgacttcaacagattccattgccacttctcaccacgtgactggcagcgacttatcaacaacaactggggattccggcccaagaagctcaacttcaagctcttcaacatccaggtcaaggaggtcacgacgaatgacggtgtcacaaccatcgctaataaccttaccagcacggttcaggtcttttcggactcggaatatcaactgccgtacgtcctcggctccgcgcaccagggctgcctgcctccgttcccggcagacgtgttcatgattccgcagtacggatacctgactctgaacaatggcagccaatcggtaggccgttcctccttctactgcctggagtactttccttctcagatgctgagaacgggcaacaacttcacctttagctacaccttcgaggacgtgcctttccacagcagctacgcgcacagccagagtctggaccggctgatgaatcccctcatcgaccagtacctgtactacttggccagaacacagagcaacgcaggaggtactgctggcaatcgggaactgcagttttatcagggcggacctaccaccatggccgaacaagcaaagaactggctgcccggaccttgcttccggcaacagagagtatccaagacgctggatcaaaataacaacagcaactttgcctggactggtgccacaaaataccatttaaatgnaagaaattcattggttaatcccggtgtcgccatggcaacccacaaggacgacgaggaacgcttcttcccttcgagcggagttctaatttttggcaaaactggagcagctaataaaactacattagaaaacgtgctcatgacaaatgaagaagaaattcgtcctaccaacccggtagctaccgaggaatacgggattgtaagcagcaacttgcaggcggctagcaccgcagcccagacacaagttgttaacaaccagggagccttacctggcatggtctggcagaaccgggacgtgtacctgcaaggtcccatttgggccaagattcctcacacggacggcaactttcacccgtctcctctaatgggtggctttggactgaaacacccgcctccccagatcctgatcaaaaacacaccggtacctgctaatcctccagaagtgtttactcctgccaagtttgcttccttcatcacgcagtacagcaccgggcaagtcagcgttgagatcgagtgggagctgcagaaagagaacagcaagcgctggaacccagagattcagtacacctccaactttgacaaacagactggagtggactttgctgttgacagccagggtgtttactctgagcct

SEQ ID NO: 421 - protein, 733 aa, Artificial Sequence
  Description of Artificial Sequence: Synthetic polypeptide
MAADGYLPDWLEDNLSEGIREWWDLKPGAPKPKANQQKQDDGRGLVLPGYKYLGPFNGLDKGEPVNAADAAALEHDKAYDQQLKAGDNPYLRYNHADAEFQERLQEDTSFGGNLGRAVFQAKKRVLEPLGLVEEGAKTAPGKKRPLESPQEPDSSSGIGKKGKQPAKKRLNFEEDTGAGDGPPEGSDTSAMSSDIEMRAAPGGNAVDAGQGSDGVGNASGDWHCDSTWSEGKVTTTSTRTWVLPTYNNHLYLRLGTTSNSNTYNGFSTPWGYFDFNRFHCHFSPRDWQRLINNNWGLRPKAMRVKIFNIQVKEVTTSNGETTVANNLTSTVQIFADSSYELPYVMDAGQEGSLSPFPNDVFMVPQYGYCGIVTGENQNQTDRNAFYCLEYFPSQMLRTGNNFEMAYNFGKVPFHSMYAYSQSPDRLMNPLLDQYLWHLQSTTSGETLNQGNAATTFGKIRSGDFAFYRKNWLPGPCVKQQRLSKTASQNYKIPASGGNALLKYDTHYTLNNRWSNIAPGPPMATAGPSDGDFSNAQLIFPGPSVTGNTTTSANNLLFTSEEEIAATNPRDTDMFGQIADNNQNATTAPITGNVTAMGVLPGMVWQNRDIYYQGPIWAKIPHADGHFHPSPLIGGFGLKHPPPQIFIKNTPVPANPATTFTAARVDSFITQYSTGQVAVQIEWEIEKERSKRWNPEVQFTSNYGNQSSMLWAPDTTGKYTEPRVIGSRYLTNHL

SEQ ID NO: 422 - DNA, 3105 bp, Adeno-associated virus
gaattcgcccttgctgcgtcaactggaccaatgagaactttcccttcaacgattgcgtcgacaagatggtgatctggtgggaggagggcaagatgaccgccaaggtcgtggagtccgccaaggccattctgggcggaagcaaggtgcgcgtggaccaaaagtgcaagtcatcggcccagatcgaccccacgcccgtgatcgtcacctccaacaccaacatgtgcgccgtgatcgacgggaacagcaccaccttcgagcaccagcagccgctgcaggaccgcatgttcaagttcgagctcacccgccgtctggagcacgactttggcaaggtgaccaagcaggaagtcaaagagttcttccgctgggctcaggatcacgtgactgaggtggcgcatgagttctacgtcagaaagggcggagccaccaaaagacccgcccccagtgacgcggatataagcgagcccaagcgggcctgcccctcagttgcggagccatcgacgtcagacgcggaagcaccggtggactttgcggacaggtaccaaaacaaatgttctcgtcacgcgggcatgcttcagatgctgtttccctgcaagacatgcgagagaatgaatcagaatttcaacgtctgcttcacgcacggggtcagagactgctcagagtgcttccccggcgcgtcagaatctcaacccgtcgtcagaaaaaagacgtatcagaaactgtgcgcgattcatcatctgctggggcgggcacccgagattgcgtgttcggcccgcgatctcgtcaacgtggacttggatgactgtgtttctgagcaataaatgacttaaaccaggtatggctgctgacggttatcttccagattggctcgaggacaacctctctgagggcattcgcgagtggtgggacctgaaacctggagcccccaagcccaaggccaaccagcagaagcaggacgacggccggggtctggtgcttcctggctacaagtacctcggacccttcaacggactcgacaagggggagcccgtcaacgcggcggacgcagcggccctcgagcacgacaaggcctacgaccagcagctcaaagcgggtgacaatccgtacctgcggtataaccacgccgacgccgagtttcaggagcgtctgcaagaagatacgtcttttgggggcaacctcgggcgagcagtcttccaggccaagaagagggtactcgaacctctgggcctggttgaagaaggtgctaagacggctcctggaaagaagagaccgttagagtcaccacaagagcccgactcctcctcaggaatcggcaaaaaaggcaaacaaccagccaaaaagagactcaactttgaagaggacactggagccggagacggaccccctgaaggatcagataccagcgccatgtcttcagacattgaaatgcgtgcagcaccgggcggaaatgctgtcgatgcgggacaaggttccgatggagtgggtaatgcctcgggtgattggcattgcgattccacctggtctgagggcaaggtcacaacaacctcgaccagaacctgggtcttgcccacctacaacaaccacttgtacctgcggctcggaacaacatcaaacagcaacacctacaacggattctccaccccctggggatactttgactttaacagattccactgtcacttctcaccacgtgactggcaaagactcatcaacaacaactggggactacgaccaaaagccatgcgcgttaaaatcttcaatatccaagttaaggaggtcacaacgtcgaacggcgagactacggtcgctaataaccttaccagcacggttcagatatttgcggactcgtcgtatgagctcccgtacgtgatggacgctggacaagagggaagtctgtctcctttccccaatgacgtcttcatggtgcctcaatatggctactgtggcattgtgactggcgaaaatcagaaccagacggacagaaatgctttctactgcctggagtattttccttcacaaatgctgagaactggcaataactttgaaatggcttacaactttgggaaggtgccgttccactcaatgtatgcttacagccagagcccggacagactgatgaatcccctcctggaccagtacctgtggcacttacagtcgaccacctctggagagactctgaatcaaggcaatgcagcaaccacatttggaaaaatcaggagtggagactttgccttttacagaaagaactggctgcctgggccttgtgttaaacagcagagactctcaaaaactgccagtcaaaattacaagattcctgccagcgggggcaacgctctgttaaagtatgacacccactataccttaaacaaccgctggagcaacatagcgcctggacctccaatggcaacagctggaccttcagatggggacttcagcaacgcccagctcatcttccctggaccatcagtcaccggaaacacaacaacctcagcaaacaatctgttgtttacatcagaagaagaaattgctgccaccaacccaagagacacggacatgtttggtcagattgctgacaataatcagaatgctacaactgctcccataaccggcaacgtgactgctatgggagtgcttcctggcatggtgtggcaaaacagagacatttactaccaagggccaatttgggccaagatcccacacgcggacggacattttcatccttcaccgctaattggcggttttggactgaaacatccgcctccccagatatttatcaaaaacacccccgtacctgccaatcctgcgacaaccttcactgcagccagagtggactctttcatcacacaatacagcaccggccaggtcgctgttcagattgaatgggaaatcgaaaaggaacgctccaaacgctggaatcctgaagtgcagtttacttcaaactatgggaaccagtcttctatgttgtgggctcccgatacaactgggaagtatacagagccgcgggttattggctctcgttatttgactaatcatttgtaactgcctagttaatcaataaaccgtgtgattcgtttcagttgaactttggtctctgcgaagggcgaattc

SEQ ID NO: 423 - protein, 733 aa, Adeno-associated virus
MAADGYLPDWLEDNLSEGIREWWDLKPGAPKPKANQQKQDDGRGLVLPGYKYLGPFNGLDKGEPVNAADAAALEHDKAYDQQLKAGDNPYLRYNHADAEFQERLQEDTSFGGNLGRAVFQAKKRVLEPLGLVEEGAKTAPGKKRPLESPQEPDSSSGIGKKGKQPAKKRLNFEEDTGAGDGPPEGSDTSAMSSDIEMRAAPGGNAVDAGQGSDGVGNASGDWHCDSTWSEGKVTTTSTRTWVLPTYNNHLYLRLGTTSNSNTYNGFSTPWGYFDFNRFHCHFSPRDWQRLINNNWGLRPKAMRVKIFNIQVKEVTTSNGETTVANNLTSTVQIFADSSYELPYVMDAGQEGSLPPFPNDVFMVPQYGYCGIVTGENQNQTDRNAFYCLEYFPSQMLRTGNNFEMAYNFEKVPFHSMYAHSQSLDRLMNPLLDQYLWHLQSTTSGETLNQGNAATTFGKIRSGDFAFYRKNWLPGPCVKQQRFSKTASQNYKIPASGGNALLKYDTHYTLNNRWSNIAPGPPMATAGPSDGDFSNAQLIFPGPSVTGNTTTSANNLLFTSEEEIAATNPRDTDMFGQIADNNQNATTAPITGNVTAMGVLPGMVWQNRDIYYQGPIWAKIPHADGHFHPSPLIGGFGLKHPPPQIFIKNTPVPANPATTFTAARVDSFITQYSTGQVAVQIEWEIEKERSKRWNPEVQFTSNYGNQSSMLWAPDTTGKYTEPRVIGSRYLTNHL

SEQ ID NO: 424 - DNA, 3105 bp, Adeno-associated virus
gaattcgcccttgctgcgtcaactggaccaatgagaactttcccttcaacgattgcgtcgacaagatggtgatctggtgggaggagggcaagatgaccgccaaggtcgtggagtccgccaaggccattctgggcggaagcaaggtgcgcgtggaccaaaagtgcaagtcatcggcccagatcgaccccacgcccgtgatcgtcacctccaacaccaacatgtgcgccgtgatcgacgggaacagcaccaccttcgagcaccagcagccgctgcaggaccgcatgttcaagttcgagctcacccgccgtctggagcacgactttggcaaggtgaccaagcaggaagtcaaagagttcttccgctgggctcaggatcacgtgactgaggtggcgcatgagttctacgtcagaaagggcggagccaccaaaagacccgcccccagtgacgcggatataagcgagcccaagcgggcctgcccctcagttgcggagccatcgacgtcagacgcggaagcaccggtggactttgcggacaggtaccaaaacaaatgttctcgtcacgcgggcatgcttcagatgctgtttccctgcaagacatgcgagagaatgaatcagaatttcaacgtctgcttcacgcacggggtcagagactgctcagagtgcttccccggcgcgtcagaatctcaacccgtcgtcagaaaaaagacgtatcagaaactgtgcgcgattcatcatctgctggggcgggcacccgagattgcgtgttcggcctgcgatctcgtcaacgtggacttggatgactgtgtttctgagcaataaatgacttaaaccaggtatggctgctgacggttatcttccagattggctcgaggacaacctctctgagggcattcgcgagtggtgggacctgaaacctggagcccccaagctcaaggccaaccagcagaagcaggacgacggccggggtctggtgcttcctggctacaagtacctcggacccttccacggactcgacaagggggagcccgtcaacgcggcggacgcagcggccctcgagcacgacaaggcctacgaccagcagctcaaagcgggtgacaatccgtacctgcggtataaccacgccgacgccgagtttcaggagcgtctgcaagaagatacgtcttttgggggcaacctcgggcgagcagtcttccaggccaagaagagggtactcgaaccactgggcctggttgaagaaggtgctaagacggctcctggaaagaagagaccgttagagtcaccacaagagcccgactcctcctcaggaatcggcaaaaaaggcaaacaaccagccaaaaagagactcaactttgaagaggacactggagccggagacggaccccctgaaggatcagataccagcgccatgtcttcagacattgaaatgcgtgcagcaccgggcggaaatgctgtcgatgcgggacaaggttccgatggagtgggtaatgcctcgggtgattggcattgcgattccacctggtctgagggcaaggtcacaacaacctcgaccagaacctgggtcttgcccacctacaacaaccacttgtacctgcggctcggaacaacatcaaacagcaacacctacaacggattctccaccccctggggatactttgactttaacagattccactgtcacttctcaccacgtgactggcaaagactcatcaacaacaactggggactacgaccaaaagccatgcgcgttaaaatcttcaatatccaagttaaggaggtcacaacgtcgaacggcgagactacggtcgctaataaccttaccagcacggttcagatatttgcggactcgtcgtatgagctcccgtacgtgatggacgctggacaagagggaagtctgcctcctttccccaatgacgtcttcatggtgcctcaatatggctactgtggcattgtgactggcgaaaatcagaaccagacggacagaaatgctttctactgcctggagtattttccttcacaaatgctgagaactggcaataactttgaaatggcttacaactttgagaaggtgccgttccactcaatgtatgctcacagccagagcctggacagactgatgaatcccctcctggaccagtacctgtggcacttacagtcgaccacctctggagagactctgaatcaaggcaatgcagcaaccacatttggaaaaatcaggagtggagactttgccttttacagaaagaactggctgcctgggccttgtgttaaacagcagagattctcaaaaactgccagtcaaaattacaagattcctgccagcgggggcaacgctctgttaaagtatgacacccactataccttaaacaaccgctggagcaacatagcgcctggacctccaatggcaacagctggaccttcagatggggacttcagcaacgcccagctcatcttccctggaccatcagtcaccggaaacacaacaacctcagcaaacaatctgttgtttacatcagaaggagaaattgctgccaccaacccaagagacacggacatgtttggtcagattgctgacaataatcagaatgctacaactgctcccataaccggcaacgtgactgctatgggagtgcttcctggcatggtgtggcaaaacagagacatttactaccaagggccaatttgggccaagatcccacacgcggacggacattttcatccttcaccgctaattggcggttttggactgaaacatccgcctccccagatatttatcaaaaacacccccgtacctgccaatcctgcgacaaccttcactgcagccagagtggactctttcatcacacaatacagcaccggccaggtcgctgttcagattgaatgggaaatcgaaaaggaacgctccaaacgccggaatcctgaagtgcagtttacttcaaactatgggaaccagtcttctatgttgtgggctcccgatacaactgggaagtatacagagccgcgggttattggctctcgttatttgactaatcatttgtaactgcctagttaatcaataaaccgtgtgattcgtttcagttgaactttggtctctgcgaagggcgaattc

SEQ ID NO: 425 - protein, 733 aa, Artificial Sequence
  Description of Artificial Sequence: Synthetic polypeptide
MAADGYLPDWLEDNLSEGIREWWDLKPGAPKPKANQQKQDDGRGLVLPGYEYLGPFNGLDKGEPVNAADAAALEHDKAYDQQLKAGDNPYLRYNHADAEFQERLQEDTSFGGNLGRAVFQAKKRVLEPLGLVEEGAKTAPGKKRPLESPQEPDSSSGIGKKGKQPAKKRLNFEEDTGAGDGPPEGSDTSAMSSDIEMRAAPGGNAVDAGQGSDGVGNASGDWHCDSTWSEGKVTTTSTRTWVLPTYNNHLYLRLGTTSNSNTYNGFSTPWGYFDFNRFHCHFSPRDWQRLINNNWGLRPKAMRVKIFNIQVKEVTTSNGETTVANNLTSTVQIFADSSYELPYVMDAGQEGSLPPFPNDVFMVPQYGYCGIVTGENQNQTDRNAFYCLEYFPSQMLRTGNNFETAYNFEKVPFHSMYAHSQSLDGLMNPLLDQYLWHLQSTTSGETLNQGNAATTFGKIRSGDFAFYRKNWLPGPCVKQQRFSKTASQNYKIPASGGNALLKYDTHYTLNNRWSNIAPGPPMATAGPSDGDFSNAQLIFPGPSVTGNTTTSANNLLFTSEEEIAATNPRDTDMFGQIADNNQNATTAPITGNVTAMGVLPGMVWQNRDIYYQGPIWAKIPHADGHFHPSPLIGGFGLKHPPPQIFIKNTPVPAYPATTFTAARVDSFITQYSTGQVAVQIEWEIEKERSKRWNPEVQFTSNCGNQSSMLWAPDTTGKYTEPRVIGSRYLTNHL

SEQ ID NO: 426 - DNA, 3105 bp, Adeno-associated virus
gaattcgcccttcgcagagaccaaagttcaactgaaacgaatcacacggtttattgattaactaggcagttacaaatgattagtcaaataacgagagccaataacccgcggctctgtatacttcccagttgtatcgggagcccacaacatagaagactggttcccacagtttgaagtaaactgcacttcaggattccagcgtttggagcgttccttttcgatttcccattcaatctgaacagcgacctggccggtgctgtattgtgtgatgaaagagtccactctggctgcagtgaaggttgtcgcaggataggcaggtacgggggtgtttttgataaatatctggggaggcggatgtttcagtccaaaaccgccaattagcggtgaaggatgaaaatgtccgtccgcgtgtgggatcttggcccaaattggcccttggtagtaaatgtctctgttttgccacaccatgccaggaagcactcccatagcagtcacgttgccggttatgggagcagttgtagcattctgattattgtcagcaatctgaccaaacatgtccgtgtctcttgggttggtggcagcaatttcttcttctgatgtaaacaacagattgtttgctgaggttgttgtgtttccggtgactgatggtccagggaagatgagctgggcgttgctgaagtccccatctgaaggtccagctgttgccattggaggtccaggcgctatgttgctccagcggttgtttaaggtatagtgggtgtcatactttaacagagcgttgcccccgctggcaggaatcttgtaattttgactggcagtttttgagaatctctgctgtttaacacaaggcccaggcagccagttctttctgtaaaaggcaaagtctccactcctgatttttccaaatgtggttgctgcattgccttgattcagagtctctccagaggtggtcgactgtaagtgccacaggtactggtccaggaggggattcatcagtccgtccaggctctggctgtgagcatacattgagtggaacggcaccttctcaaagttgtaagccgtttcaaagttattgccagttctcagcatttgtgaaggaaaatactccaggcagtagaaagcatttctgtccgtctggttctgattttcgccagtcacaatgccacagtagccatattgaggcaccatgaagacgtcattggggaaaggaggcagacttccctcttgtccagcgtccatcacgtacgggagctcatacgacgagtccgcaaatatctgaaccgtgctggtaaggttattagcgaccgtagtctcgccgttcgacgttgtgacctccttaacttggatattgaagattttaacgcgcatggcttttggtcgtagtccccagttgttgttgatgagtctttgccagtcacgtggtgagaagtgacagtggaatctgttaaagtcaaagtatccccagggggtggagaatccgttgtaggtgttgctgtttgatgttgttccgagccgcaggtacaagtggttgttgtaggtgggcaagacccaggttctggtcgaggttgttgtgaccttgccctcagaccaggtggaatcgcaatgccaatcacccgaggcattacccactccatcggaaccttgtcccgcatcgacagcatttccgcccggtgctgcacgcatttcaatgtctgaagacatggcgctggtatctgatccttcagggggtccgtctccggctccagtgtcctcttcaaagttgagtctctttttggctggttgtttgccttttttgccgattcctgaggaggagtcgggctcttgtggtgactctaacggtctcttctttccaggagccgtcttagcaccttcttcaaccaggcccagaggttcgagtaccctcttcttggcctggaagactgctcgcccgaggttgcccccaaaagacgtatcttcttgcagacgctcctgaaactcggcgtcggcgtggttataccgcaggtacggattgtcacccgctttgagctgctggtcgtaggccttgtcgtgctcgagggccgctgcgtccgccgcgttgacgggctcccccttgtcgagtccgttgaagggtccgaggtactcgtagccaggaagcaccagaccccggccgtcgtcctgcttctgctggttggccttgggcttgggggctccaggtttcaggtcccaccactcgcgaatgccctcagagaggttgtcctcgagccaatctggaagataaccgtcagcagccatacctggtttaagtcatttattgctcagaaacacagtcatccaagtccacgttgacgagatcgcaggccgaacacgcaatctcgggtgcccgccccagcagatgatgaatcgcgcacagtttctgatacgtcttttttctgacgacgggttgagattctgacgcgccggggaagcactctgagcagtctctgaccccgtgcgtgaagcagacgttgaaattctgattcattctctcgcatgtcttgcagggaaacagcatctgaagcatgcccgcgtgacgagaacatttgttttggtacctgtccgcaaggtccaccggtgcttccgcgtctgacgtcgatggctccgcaactgaggggcaggcccgcttgggctcgcttatatccgcgtcactgggggcgggtcttttggtggctccgccctttctgacgtagaactcatgcgccacctcagtcacgtgatcctgagcccagcggaagaactctttgacttcctgcttggtcaccttgccaaagtcgtgctccagacggcgggtgagctcgaacttgaacatgcggtcctgcagcggctgctggtgctcgaaggtggtgctgttcccgtcgatcacggcgcacatgttggtgttggaggtgacgatcacgggcgtggggtcgatctgggccgatgacttgcacttttggtccacgcgcaccttgcttccgcccagaatggccttggcggactccacgaccttggcggtcatcttgccctcctcccaccagatcaccatcttgtcgacgcaatcgttgaagggaaagttctcattggtccagttgacgcagcaagggcgaattc

SEQ ID NO: 427 - protein, 729 aa, Artificial Sequence
  Description of Artificial Sequence: Synthetic polypeptide
MAADGYLPDWLEDNLSEGIREWWDLKPGAPKPKANQQKQDDGRGLVLPGYKYLGPFNGLDKGEPVNAADAAALEHDKAYDQQLKAGDNPYLRYNHADAEFQERLQEDTSFGGNLGRAVFQAKKRVLEPLGLVEEGAKTAPGKKRPIDSPDSSTGIGKKGQQPAKKKLNFGQTGDSESVPDPQPLGEPPAAPSSVGSGTMAAGGGAPMADNNEGADGVGNASGNWHCDSTWLGDRVITTSTRTWALPTYNNHLYKQISSSSSGATNDNHYFGYSTPWGYFDFNRFHCHFSPRDWQRLINNNWGFRPKKLRFKLFNIQVKEVTTNDGVTTIANNLTSTVQVFSDSEYQLPYVLGSAHQGCLPPFPADVFMIPQYGYLTLNNGSQSVGRSSFYCLEYFPSQMLRTGNNFEFSYSFEDVPFHSSYAHSQSLDRLMNPLIDQYLYYLARTQSTTGSTRELQFHQAGPNTMAEQSKNWLPGPCYRQQGLSKNLDFNNNSNFAWTAATKYHLNGRNSLTNPGIPMATNKDDEDQFFPINGVLVFGKTGAANKTTLENVLMTSEEEIKTTNPVATEEYGVVSSNLQPSTAGPQSQTINSQGALPGMVWQNRDVYLQGPIWAKIPHTDGNFHPSPLMGGFGLKHPPPQILIKNTPVPANPPEVFTPAKFASFITQYSTGQVSVEIEWELQKENSKRWNPEIQYTSNYAKSNNVEFAVNPDGVYTEPRPIGTRYLPRNL

SEQ ID NO: 428 - DNA, 3094 bp, Adeno-associated virus
gaattcgcccttgctgcgtcaactggaccaagagaactttcccttcaacgattgcgtcgacaagatggtgatctggtgggaggagggcaagatgacggccaaggtcgtggagtccgccaaagccattctgggcggaagcaaggtgcgcgtcgaccaaaagtgcaagtcctcggcccagatcgatcccacccccgtgatcgtcacctccaacaccaacatgtgcgccgtgatcgacgggaacagcaccaccttcgagcaccagcagccgttgcaggaccggatgttcaaatttgaactcacccgccgtctggaacacgactttggcaaggtgaccaagcaggaagtcaaagagttcttccgctgggctagtgatcacgtgactgaggtgacgcatgagttctacgtcagaaagggcggagccagcaaaagacccgcccccgatgacgcggatataagcgagcccaagcgggcctgtccctcagtcacggacccatcgacgtcagacgcggaaggagctccggtggactttgccgacaggtaccaaaacaaatgttctcgtcacgcgggcatgcttcagatgctgtttccctgcaaaacgtgcgagagaatgaatcagaatttcaacatttgcttcacgcacggggtcagagactgtttagaatgtttccccggcgtgtcagaatctcaaccggtcgtcagaaaaaagacgtatcggaagctgtgtgcgattcatcatctgctggggcgggcacccgagattgcttgctcggcctgcgacctggtcaacgtggacctggacgactgtgtttctgagcaataaatgacttaaaccgggtatggctgccgatggttatcttccagattggctcgaggacaacctctctgagggcattcgcgagtggtgggacctgaaacctggagccccgaaacccaaagccaaccagcaaaagcaggacgacggccggggtctggtgcttcctggctacaagtacctcggacccttcaacggactcgacaagggggagcccgtcaacgcggcggacgcagcggccctcgagcacgacaaggcctacgaccagcagctcaaagcgggtgacaatccgtacctgcggtataaccacgccgacgccgagtttcaggagcgtctgcaagaagatacgtcatttgggggcaacctcgggcgagcagtcttccaggccaagaagcgggttctcgaacctctcggtctggttgaggaaggcgctaagacggctcctggaaagaagagacccatagactctccagactcctccacgggcatcggcaaaaaaggccagcagcccgctaaaaagaagctcaattttggtcagactggcgactcagagtcagtccccgaccctcaacctcttggagaacctccagcagcgccctctagtgtgggatctggtacaatggctgcaggcggtggcgcaccaatggcagacaataacgaaggtgccgacggagtgggtaatgcctcaggaaattggcattgcgattccacatggctgggcgacagagtcatcaccaccagcaccagaacctgggccctccccacctacaacaaccacctctacaagcaaatctccagcagcagctcaggagccaccaatgacaaccactacttcggctacagcaccccctgggggtattttgactttaacagattccactgccacttctcaccacgtgactggcagcgactcatcaacaacaactggggattccggcccaagaagctgcggttcaagctcttcaacatccaggtcaaggaggtcacaacgaatgacggcgtcacgaccatcgctaataaccttaccagcacggttcaggtcttctcggactcggaataccagctgccgtacgtcctcggctctgcgcaccagggctgcctgcctccgttcccggcggacgtcttcatgattcctcagtacggctacctgactctgaacaacggcagccaatcggtgggccgttcctccttctactgcctggaatatttcccctctcaaatgctgagaacgggcaacaactttgagttcagttacagcttcgaggacgtgcctttccacagcagctacgcgcacagccagagcctagaccggctgatgaaccctctcatcgaccagtacctgtactacctggcccggacccagagcaccacgggttccaccagggaactgcaatttcatcaagctgggcccaatactatggccgagcagtcaaagaactggctgcctggaccctgctataggcaacagggactgtcaaagaacttggactttaacaacaacagcaattttgcctggactgctgccactaaatatcatctgaatggcagaaactctttgaccaatcctggcattcccatggcaaccaacaaggatgatgaggaccagttctttcccatcaacggggtactggtttttggcaagacgggagctgccaacaaaactacgctggaaaacgttctgatgaccagcgaggaggagatcaagaccactaaccctgtggctacagaagaatacggtgtggtctccagcaacctgcagccgtctacagccgggcctcaatcacagactatcaacagccagggagcactgcctggcatggtctggcagaaccgggacgtgtatctgcagggtcccatctgggccaaaattcctcacacggatggcaactttcacccgtctcctctgatgggcggttttggactcaaacacccgcctccacagatcctgatcaaaaacacacctgtacctgctaatcctccggaggtgtttactcctgccaagtttgcctccttcatcacgcagtacagcaccggacaagtcagcgtggaaatcgagtgggagctgcagaaagaaaacagcaagcgctggaacccagaaattcagtatacttccaattatgccaagtctaataatgttgaatttgctgtgaaccctgatggtgtttatactgagcctcgccccattggcactcgttacctcccccgtaatctgtaattgcttgttaatcaataaaccggttgattcgtttcagttgaactttggtctctgcgaagggcgaattc

SEQ ID NO: 429 - protein, 1458 aa, Artificial Sequence
  Description of Artificial Sequence: Synthetic polypeptide
MAADGYLPDWLEDNLSEGIREWWDLKPGAPKPKANQQKQDDGRGLVLPGYKYLGPFNGLDKGEPVNAADAAALEHDKAYDQQLKAGDNPYLRYNHADAEFQERLQEDTSFGGNLGRAVFQAKKRVLEPLGLVEEGAKTAPGKKRPIDSPDSSTGIGKKGQQPAKKKLNFGQTGDSESVPDPQPLGEPPAAPSSVGSGTMAAGGGAPTADNNEGADGVGNASGNWHCDSTWLGDRVITTSTRTWALPTYNNHLYKQISSSSSGATNDNHYFGYSTPWGYFDFNRFHCHFSPRDWQRLINNNWGFRPKKLRFKLFNIQVKEVTTNDGVTTIANNLTSTVQVFSDSEYQLPYVLGSAHQGCLPPFPADVFMIPQYGYLTLNNGSQSVGRSSFYCLEYFPSQMLRTGNNFEFSYSFEDVPFHSSYAHSQSLDRLMNPLIDQYLYYLARTQSTTGSTRELQFHQAGPNTMAEQSKNWLPGPCYRQQRLSKNLDFNNNSNFAWTAATKYHLNGRNSLTNPGIPMATNKDDEDQFFPINGVLVFGKTGAANKTTLENVLMTSEEEIKTTNPVATEEYGVVSSNLQSSTAGPQSQTINSQGALPGMVWQNRDVYLQGPIWAKIPHTDGNFHPSPLMGGFGLEHPPPQILIKNTPVPANPPEVFTPAKFASFITQYSTGQVSVEIEWELQKENSKRWNPEIQYTSNYAKSNNVEFAVNPDGVYTEPRPIGTRYLTRNLMAADGYLPDWLEDNLSEGIREWWDLKPGAPKPKANQQKQDDGRGLVLPGYKYLGPFNGLDKGEPVNAADAAALEHDKAYDQQLKAGDNPYLRYNHADAEFQERLQEDTSFGGNLGRAVFQAKKRVLEPLGLVEEGAKTAPGKKRPIGSPDSSTGIGKKGQQPAKKKLNFGQTGDSESVPDPQPLGEPPAAPSSVGSGTMAAGGGAPMADNNEGADGVGNASGNWHCDSTWLGDRVITTSTRTWALPTYNNHLYKQISSSSSGATNDNHYFGYSTPWGYFDFNRFHCHFSPRDWQRLINNNWGFRPKKLRFKLLNIQVKEVTTNDGVTTIANNLTSTVQVFSDSEYQLPYVLGSAHQGCLPPFPADVFMIPQYGYLTLDNGSQSVGRSSFYCLEYFPSQMLRTGNNFEFSYSFEDVPFHSSYAHSQSLDRLMNPLIDQYLYYLARTQSTTGSTRELQFHQAGPNTMAEQSKNWLPGPCYRQQRLSKNLDFNNNSNFAWTAATKYHLNGRNSLTNPGIPMATNKDDEDQFFPINGVLVFGKTGAANKTTLENVLMTSEEEIKTTNPVATEEYGVVSSNLQSSTAGPQSQTINSQGALPGMVWQNRDVYLQGPIWAKIPHTDGNFHPSPLMGGFGLKHPPPQILIKNTPVPANPPEVFTPAKFASFITQYSTGQVSVEIEWELQKENSKRWNPEIQYTSNYAKSNNVEFAVNPDGVYTEPRPIGTRYLTRNL

SEQ ID NO: 430 - DNA, 3095 bp, Adeno-associated virus
gaattcgcccttcgcagagaccaaagttcaactgaaacgaatcaaccggtttattgattaacaagcaattacagattacgggtgaggtaacgagtgccaatggggcgaggctcagtataaacaccatcagggttcacagcaaattcaacattattagacttggcataattggaagtatactgaatttctgggttccagcgcttgctgttttctttctgcagctcccactcgatttccacgctgacttgtccggtgctgtactgcgtgatgaaggaggcaaacttggcaggagtaaacacctccggaggattagcaggtacaggtgtgtttttgatcaggatctgtggaggcgggtgtttgagtccaaaaccgcccatcagaggagacgggtgaaagttgccatccgtgtgaggaattttggcccagatgggaccctgcagatacacgtcccggttctgccagaccatgccaggcagtgctccctggctgttgatagtctgtgattgaggcccggctgtagacgactgcaggttgctggagaccacaccgtattcttctgtagccacagggttagtggtcttgatctcctcctcgctggtcatcagaacgttttccagcgtagttttgttggcagctcccgtcttgccaaaaaccagtaccccgttgatgggaaagaactggtcctcatcatccttgttggttgccatgggaatgccaggattggtcaaagagtttctgccattcagatgatatttagtggcagcagtccaggcaaaattgctgttgttgttaaagtccaagttctttgacagtctctgttgcctatagcagggtccaggcagccagttctttgactgctcggccatagtattgggcccagcttgatgaaattgcagttccctggtggaacccgtggtgctctgggtccgggccaggtagtacaggtactggtcgatgagagggttcatcagccggtctaggctctggctgtgcgcgtagctgctgtggaaaggcacgtcctcgaagctgtaactgaactcaaagttgttgcccgttctcagcatttgagaggggaaatattccaggcagtagaaggaggaacggcccaccgattggctgccgttgtccagagtcaggtagccgtactgaggaatcatgaagacgtccgccgggaacggaggcaggcagccctggtgcgcagagccgaggacgtacggcagctggtattccgagtccgagaagacctgaaccgtgctggtaaggttattagcgatggtcgtgacgccgtcattcgttgtgacctccttgacctggatgttgaggagcttgaaccgcagcttcttgggccggaatccccagttgttgttgatgagtcgctgccagtcacgtggtgagaagtggcagtggaatctgttaaagtcaaaatacccccagggggtgctgtagccgaagtagtggttgtcattggtggctcctgagctgctgctggagatttgcttgtagaggtggttgttgtaggtggggagggcccaggttctggtgctggtggtgatgactctgtcgcccagccatgtggaatcgcaatgccaatttcctgaggcattacccactccgtcggcaccttcgttattgtctgccattggtgcgccaccgcctgcagccattgtaccagatcccacactagagggcgctgctggaggttctccaagaggttgagggtcggggactgactctgagtcgccagtctgaccaaaattgagcttctttttagcgggctgctggccttttttgccgatgcccgtggaggagtctggagagcctatgggtctcttctttccaggagccgtcttagcgccttcctcaaccagaccgagaggttcgagaacccgcttcttggcctggaagactgctcgcccgaggttgcccccaaatgacgtatcttcttgcagacgctcctgaaactcggcgtcggcgtggttataccgcaggtacggattgtcacccgctttgagctgctggtcgtaggccttgtcgtgctcgagggccgctgcgtccgccgcgttgacgggctcccccttgtcgagtccgttgaagggtccgaggtacttgtagccaggaagcaccagaccccggccgtcgtcctgcttttgctggttggctttgggtttcggggctccaggtttcaggtcccaccactcgcgaatgccctcagagaggttgtcctcgagccaatctggaagataaccatcggcagccatacctggtttaagtcatttattgctcagaaacacagtcgtccaggtccacgttgaccaggtcgcaggccgagcaagcaatctcgggtgcccgccccagcagatgatgaatcgcacacagcttccgatacgtcttttttctgacgaccggttgagattctgacacgccggggaaacattctaaacagtctctgaccccgtgcgtgaagcaaatgttgaaattctgattcattctctcgcacgttttgcagggaaacagcacctgaagcatgcccgcgtgacgagaacatttgttttggtacctgtcggcaaagtccaccggagctccttccgcgtctgacgtcgatgggtccgtgactgagggacgggcccgcttgggctcgcttatatccgcgtcatcgggggcgggtcttttgctggctccgccctttctgacgtagaactcatgcgtcacctcagtcacgtgatcactagcccagcggaagaactctttgacttcctgctttgtcaccttgccaaagtcgtgttccagacggcgggtgagttcaaatttgaacatccggtcctgcaacggttgctggtgctcgaaggtggtgctgttcccgtcgatcacggcgcacatgttggtgttggaggtgacgatcacgggggtgggatcgatctgggcggacgacttgcacttttggtccacgcgcaccttgctgccgccgagaatggccttggcggactccacgaccttggccgtcatcttgccctcctcccaccagatcaccatcttgtcgacgcaatcgttgaagggaaagttctcattggtccagttgacgcagcaagggcgaattc

SEQ ID NO: 431 - DNA, 3095 bp, Adeno-associated virus
gaattcgcccttcgcagagaccaaagttcaactgaaacgaatcaaccggtttattgattaacaagcaattacagattacgggtgaggtaacgagtgccaatggggcgaggctcagtataaacaccatcagggttcacagcaaattcaacattattagacttggcataattggaagtatactgaatttctgggttccagcgcttgctgttttctttctgcagctcccactcgatttccacgctgacttgtccggtgctgtactgcgtgatgaaggaggcaaacttggcaggagtaaacacctccggaggattagcaggtacaggtgtgtttttgatcaggatctgtggaggcgggtgttcgagtccaaaaccgcccatcagaggagacgggtgaaagttgccatccgtgtgaggaattttggcccagatgggaccctgcagatacacgtcccggttctgccagaccatgccaggcagtgctccctggctgttgatagtctgtgattgaggcccggctgtagacgactgcaggttgctggagaccacaccgtattcttctgtagccacagggttagtggtcttgatctcctcctcgctggtcatcagaacgttttccagcgtagttttgttggcagctcccgtcttgccaaaaaccagtaccccgttgatgggaaagaactggtcctcatcatccttgttggttgccatgggaatgccaggattggtcaaagagtttctgccattcagatgatatttagtggcagcagtccaggcaaaattgctgttgttgttaaagtccaagttctttgacagtctctgttgcctatagcagggtccaggcagccagttctttgactgctcggccatagtattgggcccagcttgatgaaattgcagttccctggtggaacccgtggtgctctgggtccgggccaggtagtacaggtactggtcgatgagagggttcatcagccggtctaggctctggctgtgcgcgtagctgctgtggaaaggcacgtcctcgaagctgtaactgaactcaaagttgttgcccgttctcagcatttgagaggggaaatattccaggcagtagaaggaggaacggcccaccgattggctgccgttgttcagagtcaggtagccgtactgaggaatcatgaagacgtccgccgggaacggaggcaggcagccctggtgcgcagagccgaggacgtacggcagctggtattccgagtccgagaagacctgaaccgtgctggtaaggttattagcgatggtcgtgacgccgtcattcgttgtgacctccttgacctggatgttgaagagcttgaaccgcagcttcttgggccggaatccccagttgttgttgatgagtcgctgccagtcacgtggtgagaagtggcagtggaatctgttaaagtcaaaatacccccagggggtgctgtagccgaagtagtggttgtcattggtggctcctgagctgctgctggagatttgcttgtagaggtggttgttgtaggtggggagggcccaggttctggtgctggtggtgatgactctgtcgcccagccatgtggaatcgcaatgccaatttcctgaggcattacccactccgtcggcaccttcgttattgtctgccgttggtgcgccaccgcctgcagccattgtaccagatcccacactagagggcgctgctggaggttctccaagaggttgagggtcggggactgactctgagtcgccagtctgaccaaaattgagcttctttttagcgggctgctggccttttttgccgatgcccgtggaggagtctggagagtctatgggtctcttctttccaggagccgtcttagcgccttcctcaaccagaccgagaggttcgagaacccgcttcttggcctggaagactgctcgcccgaggttgcccccaaatgacgtatcttcttgcaggcgctcctgaaactcggcgtcggcgtggttataccgcaggtacggattgtcacccgctttgagctgctggtcgtaggccttgtcgtgctcgagggccgctgcgtccgccgcgttgacgggctcccccttgtcgagtccgttgaagggtccgaggtacttgtagccaggaagcaccagaccccggccgtcgtcctgcttttgctggttggctttgggtttcggggctccaggtttcaggtcccaccactcgcgaatgccctcagagaggttgtcctcgagccaatctggaagataaccatcggcagccatacctggtttaagccatttattgctcagaaacacagtcgtccaggtccacgttgaccaggtcgcaggccgagcaggcaatctcgggtgcccgccccagcagatgatgaatcgcacacagcttccgatacgtcttttttctgacgaccggttgagattctgacacgccggggaaacattctaaacagtctctgaccccgtgcgtgaagcaaatgttgaaattctgattcattctctcgcacgttttgcagggaaacagcatctgaagcatgcccgcgtggcgagaacatttgttttggtacctgtcggcaaagtccaccggagctccttccgcgtctgacgtcgatgggtccgtgactgagggacaggcccgcttgggctcgcttatatccgcgtcatcgggggcgggtcttttgctggctccgccctttctgacgtagaactcatgcgtcacctcagtcacgtgatcactagcccagcggaagaactctttgacttcctgctttgtcaccttgccaaagtcgtgttccagacggcgggtgagttcaaatttgaacatccggtcctgcaacggctgctggtgctcgaaggtggtgctgttcccgtcgatcacggcgcgcatgttggtgttggaggtgacgatcacgggggtgggatcgatctgggcggacgacttgcacttttggtccacgcgcaccttgctgccgccgagaatggccttggcggactccacgaccttggccgtcatcttgccctcctcccaccagatcaccatcttgtcgacgcaatcgttgaagggaaagttctcattggtccagttgacgcagcaagggcgaattc

SEQ ID NO: 432 - protein, 729 aa, Adeno-associated virus; identical to SEQ ID NO: 160

SEQ ID NO: 433 - protein, 729 aa, Adeno-associated virus
MAADGYLPDWLEDNLSEGIREWWDLKPGAPKPKANQQKQDDGRGLVLPGYKYLGPFNGLDKGEPVNAADAAALEHDKAYDQQLKAGDNPYLRYNHADAEFQERLQEDTSFGGNLGRAVFQAKKRVLEPLGLVEEGAKTAPGKKRPIDSPDSSTGIGKKGQQPAKKKLNFGQTGDSESVPDPQPLGEPPAAPSSVGSGTMAAGGGAPTADNNEGADGVGNASGNWHCDSTWLGDRVITTSTRTWALPTYNNHLYKQISSSSSGATNDNHYFGYSTPWGYFDFNRFHCHFSPRDWQRLINNNWGFRPKKLRFKLFNIQVKEVTTNDGVTTIANNLTSTVQVFSDSEYQLPYVLGSAHQGCLPPFPADVFMIPQYGYLTLNNGSQSVGRSSFYCLEYFPSQMLRTGNNFEFSYSFEDVPFHSSYAHSQSLDRLMNPLIDQYLYYLARTQSTTGSTRELQFHQAGPNTMAEQSKNWLPGPCYRQQRLSKNLDFNNNSNFAWTAATKYHLNGRNSLTNPGIPMATNKDDEDQFFPINGVLVFGKTGAANKTTLENVLMTSEEEIKTTNPVATEEYGVVSSNLQSSTAGPQSQTINSQGALPGMVWQNRDVYLQGPIWAKIPHTDGNFHPSPLMGGFGLKHPPPQILIKNTPVPANPPEVFTPAKFASFITQYSTGQVSVEIEWELQKENSKRWNPEIQYTSNYAKSNNVEFAVNPDGVYTEPRPIGTRYLTRNL

SEQ ID NO: 434 - protein, 729 aa, Adeno-associated virus
MAADGYLPDWLEDNLSEGIREWWDLKPGAPKPKANQQKQDDGRGLVLPGYKYLGPFNGLDKGEPVNAADAAALEHDKAYDQQLKAGDNPYLRYNHADAEFQERLQEDTSFGGNLGRAVFQAKKRVLEPLGLVEEGAKTAPGKKRPIDSPDSSTGIGKKGQQPAKKKLNFGQTGDSESVPDPQPLGEPPAAPSSVGSGTMAAGGGAPMADNNEGADGVGNASGNWHCDSTWLGDRVITTSTRTWALPTYNNHLYKQISSSSSGATNDNHYFGYSTPWGYFDFNRFHCHFSPRDWQRLINNNWGFRPKKLRFKLFNIQVKEVTTNDGVTTIANNLTSTVQVFSDSEYQLPYVLGSAHQGCLPPFPADVFMIPQYGYLTLNNGSQSVGRSSFYCLEYFPSQMLRTGNNFEFSYSFEDVPFHSSYAHSQSLDRLMNPLIDQYLYYLARTQSTTGSTRELQFHQAGPNTMAEQSKNWLPGPCYRQQRLSKNLDFNNNSNFAWTAATKYHLNGRNSLTNPGIPMATNKDDEDQFFPINGVLVFGKTGAANKTTLENVLMTSEEEIKTTNPVATEEYGVVSSNLQSSTAGPQSQTINSQGALPGMVWQNRDVYLQGPIWAKIPHTDGNFHPSPLMGGFGLKHPPPQILIKNTPVPANPPEVFTPAKFASFITQYSTGQVSVEIEWELQKENSKRWNPEIQYTSNYAKSNNVEFAVNPDGVYTEPRPIGTRYLTRNL

SEQ ID NO: 435 - DNA, 2217 bp, Adeno-associated virus
atggctgctgacggttatcttccagattggctcgaggacaacctctctgagggcattcgcgagtggtgggacctgaaacctggagcccccaagcccaaggccaaccagcagaagcaggacgacggccggggtctggtgcttcctggctacaagtacctcggacccttcaacggactcgacaagggggagcccgtcaacgcggcggacgcagcggccctcgagcacgacaaggcctacgaccagcagctcaaagcgggtgacaatccgtacctgcggtataaccacgccgacgccgagtttcaggagcgtctacaagaagatacgtcttttgggggcaacctcgggcgagcagtcttccaggccaagaagcgggttctcgaacctctcggtctggttgaggaagctgctaagacggctcctggaaagaagagaccggtagaaccgtcacctcagcgttcccccgactcctccacgggcatcggcaagaaaggccagcggcccgctaaaaagagactgaactttggtcagactggcgactcagagtcagtccccgaccctcaaccaatcggagaaccaccagcaggcccctctggtctgggatctggtacaatggctgcaggcggtggcgctccaatggcagacaataacgaaggcgccgacggagtgggtagttcctcaggaaattggcattgcgattccacatggctgggcgacagagtcatcaccaccagcacccgaacctgggccctgcccacctacaacaaccacctctacaagcaaatatccaatgggacatcgggaggaagcaccaacgacaacacctacttcggctacagcaccccctgggggtattttgacttcaacagattccactgccacttctcaccacgtgactggcagcgactcatcaacaacaactggggattccggccaaaaagactcagcttcaagcccttcaacatccaggtcaaggaggtcacgcagaatgaaggcaccaagaccatcgccaataaccttaccagcacgattcaggtatttacggactcggaataccagctgccgtacgtcctcggctccgcgcaccagggctgcctgcctccgttcccggcggacgtcttcatgattccccagtacggctaccttacactgaacaatggaagtcaagccgtaggccgttcctccttctactgcctggaatattttccatctcaaatgctgcgaactggaaacaattttgaattcagctacaccttcgaggacgtgcctttccacagcagctacgcacacagccagagcttggaccgactgatgaatcctctcatcgaccagtacctgcactacttatccagaactcagtccacaggaggaactcaaggtacccagcaattgttattttctcaagctgggcctgcaaacatgtcggctcaggctaagaactggctacctggaccttgctaccggcagcagcgagtctctacgacactgtcgcaaaacaacaacagcaactttgcttggactggtgccaccaaatatcacctgaacggaagagactctttggtaaatcccggtgtcgccatggcaacccacaaggacgacgaggaacgcttcttcccgtcgagtggagtcctgatgtttggaaaacagggtgctggaagagacaatgtggactacagcagcgttatgctaaccagcgaagaagaaattaaaaccactaaccctgtagccacagaacaatacggtgtggtggctgacaacttgcagcaaaccaatacagggcctattgtgggaaatgtcaacagccaaggagccttacctggcatggtctggcagaaccgagacgtgtacctgcagggtcccatctgggccaagattcctcacacggacggcaacttccacccttcaccgctaatgggaggatttggactgaagcacccacctcctcagatcctgatcaagaacacgccggtacctgcggatcctccaacaacgttcagccaggcgaaattggcttccttcattacgcagtacagcaccggacaggtcagcgtggaaatcgagtgggagctgcagaaggagaacagcaaacgctggaacccagagattcagtacacttcaaactactacaaatctacaaatgtggactttgctgtcaatacagagggaacttattctgagcctcgccccattggtactcgctacctcacccgtaatctgtaa

SEQ ID NO: 436 - protein, 738 aa, Adeno-associated virus
MAADGYLPDWLEDNLSEGIREWWDLKPGAPKPKANQQKQDDGRGLVLPGYKYLGPFNGLDKGEPVNAADAAALEHDKAYDQQLKAGDNPYLRYNHADAEFQERLQEDTSFGGNLGRAVFQAKKRVLEPLGLVEEAAKTAPGKKRPVEPSPQRSPDSSTGIGKKGQRPAKKRLNFGQTGDSESVPDPQPIGEPPAGPSGLGSGTMAAGGGAPMADNNEGADGVGSSSGNWHCDSTWLGDRVITTSTRTWALPTYNNHLYKQISNGTSGGSTNDNTYFGYSTPWGYFDFNRFHCHFSPRDWQRLINNNWGFRPKRLSFKPFNIQVKEVTQNEGTKTIANNLTSTIQVFTDSEYQLPYVLGSAHQGCLPPFPADVFMIPQYGYLTLNNGSQAVGRSSFYCLEYFPSQMLRTGNNFEFSYTFEDVPFHSSYAHSQSLDRLMNPLIDQYLHYLSRTQSTGGTQGTQQLLFSQAGPANMSAQAKNWLPGPCYRQQRVSTTLSQNNNSNFAWTGATKYHLNGRDSLVNPGVAMATHKDDEERFFPSSGVLMFGKQGAGRDNVDYSSVMLTSEEEIKTTNPVATEQYGVVADNLQQTNTGPIVGNVNSQGALPGMVWQNRDVYLQGPIWAKIPHTDGNFHPSPLMGGFGLKHPPPQILIKNTPVPADPPTTFSQAKLASFITQYSTGQVSVEIEWELQKENSKRWNPEIQYTSNYYKSTNVDFAVNTEGTYSEPRPIGTRYLTRNL

SEQ ID NO: 437 - DNA, 2217 bp, Adeno-associated virus
atggctgctgacggttatcttccagattggctcgaggacaacctctctgagggcattcgcgagtggtgggacctgaaacctggagcccccaagcccaaggccaaccagcagaagcaggacgacggccggggtctggtgcttcctggctacaagtacctcggacccttcaacggactcgacaagggggagcccgtcaacgcggcggacgcagcggccctcgagcacgacaaggcctacgaccagcagctcaaagcgggtgacaatccgtacctgcggtataaccacgccgacgccgagtttcaggagcgtctgcaagaagatacgtcttttgggggcaacctcgggcgagcagtcttccaggccaagaagcgggttctcgaacctctcggtctggttgaggaagctgctaagacggctcctggaaagaagagaccggtagaaccgtcacctcagcgttcccccgactcctccacgggcatcggcaagaaaggccagcagcccgctaaaaagagactgaactttggtcagactggcgactcagagtcagtccccgaccctcaaccaatcggagaaccaccagcaggcccctctggtctgggatctggtacaatggctgcaggcggtggcgctccaatggcagacaataacgaaggcgccgacggagtgggtagttcctcaggaaattggcattgcgattccacatggctgggcgacagagtcatcaccaccagcacccgaacctgggccctgcccacctacaacaaccacctctacaagcaaatatccaatgggacatcgggaggaagcaccaacgacaacacctacttcggctacagcaccccctgggggtattttgacttcaacagattccactgccacttctcaccacgtgactggcagcgactcatcaacaacaactggggattccggccaaaaagactcagcttcaagctcttcaacatccaggtcaaggaggtcacgcagaatgaaggcaccaagaccatcgccaataaccttaccagcacgattcaggtatttacggactcggaataccagctgccgtacgtcctcggctccgcgcaccagggctgcctgcctccgttcccggcggacgtcttcatgattccccagtacggctaccttacactgaacaatggaagtcaagccgtaggccgttcctccttctactgcctggaatattttccatctcaaatgctgcgaactggaaacaattttgaattcagctacaccttcgaggacgtgcctttccacagcagctacgcacacagccagagcttggaccgactgatgaatcctctcatcgaccagtacctgtactacttatccagaactcagtccacaggaggaactcaaggtacccagcaattgttattttctcaagctgggcctgcaaacatgtcggctcaggctaagaactggctacctggaccttgctaccggcagcagcgagtctctacgacactgtcgcaaaacaacaacagcaactttgcttggactggtgccaccaaatatcacctgaacggaagagactctttggtaaatcccggtgtcgccatggcaacccacaaggacgacgaggaacgcttcttcccgtcgagtggagtcctgatgtttggaaaacagggtgctggaagagacaatgtggactacagcagcgttatgctaaccagcgaagaagaaattaaaaccactaaccctgtagccacagaacaatacggtgtggtggctgataacttgcagcaaaccaatacggggcctattgtgggaaatgtcaacagccaaggagccttacctggcatggtctggcagaaccgagacgtgtacctgcagggtcccatctgggccaagattcctcacacggacggcaacttccacccttcaccgctaatgggaggatttggactgaagcacccacctcctcagatcctgatcaagaacacgccggtacctgcggatcctccaacaacgttcagccaggcgaaattggcttccttcattacgcagtacagcaccggacaggtcagcgtggaaatcgagtgggagctgcagaaggagaacagcaaacgctggaacccagagattcagtacacttcaaactactacaaatctacaaatgtggactttgctgtcaatacagagggaacttattctgagcctcgccccattggtactcgttacctcacccgtaatctgtaa

SEQ ID NO: 438 - protein, 738 aa, Adeno-associated virus; identical to SEQ ID NO: 90

SEQ ID NO: 439 - protein, 738 aa, Adeno-associated virus
MAADGYLPDWLEDNLSEGIREWWDLKPGAPKPKANQQKQDDGRGLVLPGYKYLGPFNGLDKGEPVNAADAAALEHDKAYDQQLKAGDNPYLRYNHADAEFQERLQEDTSFGGNLGRAVFQAKKRVLEPLGLVEEAAKTAPGKKRPVEPSPQRSPDSSTGIGKKGQQPAKKRLNFGQTGDSESVPDPQPIGEPPAGPSGLGSGTMAAGGGAPMADNNEGADGVGSSSGNWHCDSTWLGDRVITTSTRTWALPTYNNHLYKQISNGTSGGSTNDNTYFGYSTPWGYFDFNRFHCHFSPRDWQRLINNNWGFRPKRLSFKLFNIQVKEVTQDEGTKTIANNLTSTIQVFTDSEYQLPYVLGSAHQGCLPPFPADVFMIPQYGYLTLNNGSQAVGRSSFYCLEYFPSQMLRTGNNFEFSYTFEDVPFHSSYAHSQSLDRLMNPLIDQYLYYLSRTQSTGGTQGTQQLLFSQAGPANMSARAKNWLPGPCYRQQRVSTTLSQNNNSNFAWTGATKYHLNGRDSLVNPGVAMATHKDDEERFFPSSGVLMFGKQGAGRDNVDYSSVMLTSEEEIKTTNPVATEQYGVVADNLQQANTGPIVGNVNSQGALPGMVWQNRDVYLQGPIWAKIPHTDGNFHPSPLMGGFGLKHPPPQILIKNTPVPADPPTTFSQAKLASFITQYSTGQVSVEIEWELQKENSKRWNPEIQYTSNYYKSTNVDFAVNSEGTYSEPRPIGTRYLTRNL

SEQ ID NO: 440 - DNA, 2217 bp, Adeno-associated virus
atggctgctgacggttatcttccagattggctcgaggacaacctctctgagggcattcgcgagtggtgggacctgaaacctggagcccccaagcccaaggccaaccagcagaagcaggacgacggccggggtctggtgcttcctggctacaagtacctcggacccttcaacggactcgacaagggggagcccgtcaacgcggcggacgcagcggccctcgagcacgacaaggcctacgaccagcagctcaaagcgggtgacaatccgtacctgcggtataaccacgccgacgccgagtttcaggagcgtctgcaagaagatacgtcttttgggggcaacctcgggcgagcagtcttccaggccaagaagcgggttctcgaacctctcggtctggttgaggaagctgctaagacggctcctggaaagaagagaccggtagaaccgtcacctcagcgttcccccgactcctccacgggcatcggcaagaaaggccagcagcccgctaaaaagagactgaactttggtcagactggcgactcagagtcagtccccgaccctcaaccaatcggagaaccaccagcaggcccctctggtctgggatctggtacaatggctgcaggcggtggcgctccaatggcagacaataacgaaggcgccgacggagtgggtagttcctcaggaaattggcattgcgattccacatggctgggcgacagagtcatcaccaccagcacccgaacctgggccctgcccacctacaacaaccacctctacaagcaaatatccaatgggacatcgggaggaagcaccaacgacaacacctacttcggctacagcaccccctgggggtattttgacttcaacagattccactgccacttctcaccacgtgactggcagcgactcatcaacaacaactggggattccggccaaaaagactcagcttcaagctcttcaacatccaggtcaaggaggtcacgcaggatgaaggcaccaagaccatcgccaataaccttaccagcacgattcaggtatttacggactcggaataccagctgccgtacgtcctcggctccgcgcaccagggctgcctgcctccgttcccggcggacgtcttcatgattccccagtacggctaccttacactgaacaatggaagtcaagccgtaggccgttcctccttctactgcctggaatattttccatctcaaatgctgcgaactggaaacaattttgaattcagctacaccttcgaggacgtgcctttccacagcagctacgcacacagccagagcttggaccgactgatgaatcctctcatcgaccagtacctgtactacttatccagaactcagtccacaggaggaactcaaggtacccagcaattgttattttctcaagctgggcctgcaaacatgtcggctcgggctaagaactggctacctggaccttgctaccggcagcagcgagtctctacgacactgtcgcaaaacaacaacagcaactttgcttggactggtgccaccaaatatcacctgaacggaagagactctttggtaaatcccggtgttgctatggcaacgcataaggacgacgaggaacgtttctttccatcgagcggagtcctgatgtttggaaaacagggtgctggaagagacaatgtggactatagcagcgttatgctaaccagcgaggaagaaattaaaaccactaaccctgtagccacagaacaatacggtgtggtggctgacaacttgcagcaagccaatacagggcctattgtgggaaatgtcaacagccaaggagccttacctggcatggtctggcagaaccgagacgtgtacctgcagggtcccatctgggccaaaattcctcacacggacggcaattttcacccgtctcctctgatgggcggctttggactgaagcacccacctccccagatcctgatcaagaatacgccggtacctgcggatcctccaacgacgttcagccaggcaaaattggcttccttcatcacgcagtacagcaccggccaggtcagcgtggagatcgagtgggagctgcagaaggagaacagcaagcgatggaacccagaaattcagtacacttccaactactacaaatctacaaatgtggactttgctgtcaattctgagggtacatattcagagcctcgccccattggtactcgttatctgacacgtaatctgtaa

SEQ ID NO: 441 - DNA, 2211 bp, Adeno-associated virus
atggctgccgatggttatcttccagattggctcgaggacaacctctctgagggcattcgcgagtggtgggacttgaaacctggagccccgaaacccaaagccaaccagcaaaagcaggacgacggccggggcctggtgcttcctggctacaagtacctcggacccttcaacggactcgacaagggggagcccgtcaacgcggcggacgcagcggccctcgagcacgacaaggcctacgaccagcagctcgaagcgggtgacaatccgtacctgcggtataaccacgccgacgccgagtttcaggagcgtctgcaagaagatacgtcttttgggggcaacctcgggcgagcagtcttccaggccaagaagcgggttctcgaacctctcggtctggttgaggaaggcgctaagacggctcctggaaagaagagaccagtagagcagtcaccccaagaaccagactcctcctcgggcatcggcaagaaaggccaacagcccgccagaaaaagactcaattttggccagactggcgactcagagtcagttccagaccctcaacctctcggagaacctccagcagcgccctctggtgtgggacctaatacaatggctgcaggcggtggcgcaccaatggcagacaataacgaaggcgccgacggagtgggtagttcctcgggaaattggcattgcgattccacatggctgggcgacagagtcatcaccaccagcacccgaacctgggccctgcccacctacaacaaccacctctacaagcaaatctccaacgggacatcgggaggagccaccaacgacaacacctacttcggctacagcaccccctgggggtattttgactttaacagattccactgccacttttcaccacgtgactggcagcgactcatcaacaacaactggggattccggcccaagagactcagcttcaagctcttcaacatccaggtcaaggaggtcacgcagaatgaaggcaccaagaccatcgccaataacctcaccagcaccatccaggtgtttacggactcggagtaccagctgccgtacgttctcggctctgcccaccagggctgcctgcctccgttcccggcggacgtgttcatgattccccagtacggctacctaacactcaacaacggtagtcaggccgtgggacgctcctccttctactgcctggaatactttccttcgcagatgctgagaaccggcaacaacttccagtttacttacaccttcgaggacgtgcctttccacagcagctacgcccacagccagagcttggaccggctgatgaatcctctgattgaccagtacctgtactacttgtctcggactcaaacaacaggaggcacggcaaatacgcagactctgggcttcagccaaggtgggcctaatacaatggccaatcaggcaaagaactggctgccaggaccctgttaccgccaacaacgcgtctcaacgacaaccgggcaaaacaacaatagcaactttgcctggactgctgggaccaaataccatctgaatggaagaaattcattggctaatcctggcatcgctatggcaacacacaaagacgacgaggagcgttttttcccagtaacgggatcctgtttttggcaacaaaatgctgccagagacaatgcggattacagcgatgtcatgctcaccagcgaggaagaaatcaaaaccactaaccctgtggctacagaggaatacggtatcgtggcagataacttgcagcagcaaaacacggctcctcaaattggaactgtcaacagccagggggccttacccggtatggtctggcagaaccgggacgtgtacctgcagggtcccatctgggccaagattcctcacacggacggcaacttccacccgtctccgctgatgggcggctttggcctgaaacatcctccgcctcagatcctgatcaagaacacgcctgtacctgcggatcctccgaccaccttcaaccagtcaaagctgaactctttcatcacgcaatacagcaccggacaggtcagcgtggaaattgaatgggagctacagaaggaaaacagcaagcgctggaaccccgagatccagtacacctccaactactacaaatctacaagtgtggactttgctgttaatacagaaggcgtgtactctgaaccccgccccattggcacccgttacctcacccgtaatctgtaa

SEQ ID NO: 442 - protein, 736 aa, Adeno-associated virus
MAADGYLPDWLEDNLSEGIREWWDLKPGAPKPKANQQKQDDGRGLVLPGYKYLGPFNGLDKGEPVNAADAAALEHDKAYDQQLEAGDNPYLRYNHADAEFQERLQEDTSFGGNLGRAVFQAKKRVLEPLGLVEEGAKTAPGKKRPVEQSPQEPDSSSGIGKKGQQPARKRLNFGQTGDSESVPDPQPLGEPPAAPSGVGPNTMAAGGGAPMADNNEGADGVGSSSGNWHCDSTWLGDRVITTSTRTWALPTYNNHLYKQISNGTSGGATNDNTYFGYSTPWGYFDFNRFHCHFSPRDWQRLINNNWGFRPKRLSFKLFNIQVKEVTQNEGTKTIANNLTSTIQVFTDSEYQLPYVLGSAHQGCLPPFPADVFMIPQYGYLTLNNGSQAVGRSSFYCLEYFPSQMLRTGNNFQFTYTFEDVPFHSSYAHSQSLDRLMNPLIDQYLYYLSRTQTTGGTANTQTLGFSQGGPNTMANQAKNWLPGPCYRQQRVSTTTGQNNNSNFAWTAGTKYHLNGRNSLANPGIAMATHKDDEERFFPVTGSCFWQQNAARDNADYSDVMLTSEEEIKTTNPVATEEYGIVADNLQQQNTAPQIGTVNSQGALPGMVWQNRDVYLQGPIWAKIPHTDGNFHPSPLMGGFGLKHPPPQILIKNTPVPADPPTTFNQSKLNSFITQYSTGQVSVEIEWELQKENSKRWNPEIQYTSNYYKSTSVDFAVNTEGVYSEPRPIGTRYLTRNL

SEQ ID NO: 443 - DNA, 2214 bp, Adeno-associated virus
atggctgctgacggttatcttccagattggctcgaggacaacctctctgagggcattcgcgagtggtgggacctgaaacctggagcccccaagcccaaggccaaccagcagaagcaggacgacggccggggtctggtgcttcctggctacaagtacctcggacccttcaacggactcgacaagggggagcccgtcagcgcggcggacgcagcggccctcgagcacgacaaggcctgcgaccagcggctcaaagcgggtgacaatccgtacctgcggtataaccacgccgacgccgagtttcaggagcgtctgcaagaagatacgtcttttgggggcaacctcgggcgagcagtcttccaggccaagaagcgggttctcgaacctctcggtctggttgaggaagctgctaagacggctcctggaaagaagggaccggtagaaccgtcacctcagcgttcccccgactcctccacgggcatcggcaagaaaggccagcagcccgctagaaagagactgaactttgggcagactggcgactcagagtcagtccccgaccctcaaccaatcggagaaccaccagcaggcccctctggtctgggatctggtacaatggctgcaggcggtggcgcaccaatggctgacaataacgagggcgccgacggagtgggtaatgcctcaggaaattggcattgcgattccacatggctgggcgacagagtcatcaccaccagcacccgaacctgggctttgcccacctacaacaatcacctctacaagcaaatctccagtcagtcagcaggtagcaccaacgacaacgtctacttcggctacagcaccccctgggggtattttgacttcaacagattccactgtcacttctcaccacgtgactggcagcggctcatcaacaacaactggggattccggcccaagaagctcaacttcaagctgttcaacatccaggtcaaggaggtcacaacgaatgacggcgtcacgaccatcgccaataaccttaccagcacggttcaggtcttttcggactcggaataccagctgccctacgtcctcggctccgcacaccagggctgcctgcctccgttcccggcggacgtcttcatgattccccagtacggctacctgactctgaacaatggcagccaatcggtgggtcgttcctctttctactgcctggaatatttcccttctcaaatgctgagaacgggcaacaacttcaccttcagctacaccttcgaggacgttcccttccacagcagctacgcacacagccagagcctggaccggctgatgaatcctcttatcgaccagtacctgtattacctggccagaacacagagcaacgcaggaggcacagctggcaatcgggaactgcagttttatcagggcgggcctaccaccatggccgaacaagccaaaaactggctgcctggaccttgcttccggcaacaaagagtctccaagacgctggatcaaaacaacaacagcaactttgcttggactggtgccaccaaataccatctaaatggaagaaattcattggttaatcccggtgtcgccatggcaacccacaaggacgacgaggaacgcttcttcccttcgagcggagtcctgatttttggaaaaactggagcagctaataagactacactggaaaatgtgttaatgacaaatgaagaggaaattcgtcctaccaacccggtagccaccgaggaatacgggactgttagcagcaacctgcaggcggctaacactgcagcccagacacaagttgtcaacaaccagggagccttacctggtatggtctggcagaaccgggacgtgtacctgcagggtcccatctgggccaagattcctcacacggacggcaactttcacccgtctccgctgatgggcggctttggactgaagcatccgcctcctcagatcctgatcaaaaacactcctgttcctgctaatcccccggaggtgtttacgcctgccaagtttgcttctttcatcacacagtacagcaccggccaggtcagcgtggagatcgagtgggagctgcagaaggagaacagcaagcgctggaacccagagattcagtatacctccaattttgacgaacagactggtgtggactttgccgttgacagccagggtgtttattctgagcctcgccccattggtactcgttacctcacccgtaatctgtaa

SEQ ID NO: 444 - protein, 737 aa, Adeno-associated virus
MAADGYLPDWLEDNLSEGIREWWDLKPGAPKPKANQQKQDDGRGLVLPGYKYLGPFNGLDKGEPVSAADAAALEHDKACDQRLKAGDNPYLRYNHADAEFQERLQEDTSFGGNLGRAVFQAKKRVLEPLGLVEEAAKTAPGKKGPVEPSPQRSPDSSTGIGKKGQQPARKRLNFGQTGDSESVPDPQPIGEPPAGPSGLGSGTMAAGGGAPMADNNEGADGVGNASGNWHCDSTWLGDRVITTSTRTWALPTYNNHLYKQISSQSAGSTNDNVYFGYSTPWGYFDFNRFHCHFSPRDWQRLINNNWGFRPKKLNFKLFNIQVKEVTTNDGVTTIANNLTSTVQVFSDSEYQLPYVLGSAHQGCLPPFPADVFMIPQYGYLTLNNGSQSVGRSSFYCLEYFPSQMLRTGNNFTFSYTFEDVPFHSSYAHSQSLDRLMNPLIDQYLYYLARTQSNAGGTAGNRELQFYQGGPTTMAEQAKNWLPGPCFRQQRVSKTLDQNNNSNFAWTGATKYHLNGRNSLVNPGVAMATHKDDEERFFPSSGVLIFGKTGAANKTTLENVLMTNEEEIRPTNPVATEEYGTVSSNLQAANTAAQTQVVNNQGALPGMVWQNRDVYLQGPIWAKIPHTDGNFHPSPLMGGFGLKHPPPQILIKNTPVPANPPEVFTPAKFASFITQYSTGQVSVEIEWELQKENSKRWNPEIQYTSNFDEQTGVDFAVDSQGVYSEPRPIGTRYLTRNL

SEQ ID NO: 445 - DNA, 2214 bp, Adeno-associated virus
atggctgccgatggttatcttccagattggctcgaggacaacctctctgagggcattcgcgagtggtgggacctgaaacctggagccccgaaacccaaagccaaccagcaaaagcaggacgacggccggggtctggtgcttcctggctacaagtacctcggacccttcaacggactcgacaagggggagcccgtcaacgcggcggacgcagcggccctcgagcacgacaaggcctacgaccagcagctcaaagcgggtgacaatccgtacctgcggtataaccacgccgacgccgagtttcaggagcgtctgcaagaagatacgtcttttgggggcaacctcgggcgagcagtcttccaggccaagaagcgggttctcgaacctctcggtctggttgaggaagctgctaagacggctcctggaaagaagagaccggtagaaccgtcacctcagcgttcccccgactcctccacgggcatcggcaagaaaggccagcagcccgctagaaagagactgaactttgggcagactggcgactcagagtcagtccccgaccctcaaccaatcggagaaccaccagcaggcccctctggtctgggatctggtacaatggctgcaggcggtggcgctccaatggcagacaataacgaaggcgccgacggagtgggtaatgcctcaggaaattggcattgcgattccacatggctgggcgacagagtcatcaccaccagcacccgaacctgggctttgcccacctacaacaaccacctctacaagcaaatctccagtcagtcagcaggtagcaccaacgacaacgtctacttcggctacagcaccccctgggggtattttgacttcaacagattccactgtcacttctcaccacgtgactggcagcggctcatcaacaacaactggggattccggcccaagaagctcaacttcaagctgttcaacatccaggtcaaggaggtcacaacgaatgacggcgtcacgaccatcgccaataaccttaccagcacggttcaggtcttttcggactcggaataccagctgccctacgtcctcggctccgcacaccagggctgcctgcctccgttcccggcggacgtcttcatgattcctcagtacggctacctgactctcaacaacggtagtcaggccgtgggacgttcctccttctactgcctggagtacttcccctctcagatgctgagaacgggcaacaacttttccttcagctacactttcgaggacgtgcctttccacagcagctacgcgcacagccagagtttggacaggctgatgaatcctctcatcgaccagtacctgtactacctgtcaagaacccagtctacgggaggcacagcgggaacccagcagttgctgttttctcaggccgggcctagcaacatgtcgactcaggccagaaactggctgcctggaccctgctacagacagcagcgcgtctccacgacactgtcgcaaaacaacaacagcaactttgcctggactggtgccaccaagtatcatctgaacggcagagactctctggtgaatccgggcgtcgccatggcaaccaacaaggacgacgaggaccgcttcttcccatccagcggcatcctcatgtttggcaagcagggagctggaaaagacaacgtggactatagcaacgtgatgctaaccagcgaggaagaaatcaagaccaccaaccccgtggccacagaacagtatggcgtggtggctgataacctacagcagcaaaacaccgctcctattgtgggggccgtcaacagccagggagccttacctggcatggtctggcagaaccgggacgtgtacctgcagggtcctatttgggccaagattcctcacacagatggcaactttcacccgtctcctttaatgggcggctttggacttaaacatccgcctcctcagatccttatcaaaaacactcctgttcctgcggatcctccaacagcgttcaaccaggccaagctgaattctttcatcacgcagtacagcaccggacaagtcagcgtggagatcgagtgggagctgcagaaggagaacagcaagcgctggaacccagagattcagtatacttccaactactacaaatctacaaatgtggactttgctgttaatactgagggtgcttactctgagcctcgccccattggcactcgttacctcacccgtaatctgtaa

SEQ ID NO: 446 - protein, 737 aa, Adeno-associated virus
MAADGYLPDWLEDNLSEGIREWWDLKPGAPKPKANQQKQDDGRGLVLPGYKYLGPFNGLDKGEPVNAADAAALEHDKAYDQQLKAGDNPYLRYNHADAEFQERLQEDTSFGGNLGRAVFQAKKRVLEPLGLVEEAAKTAPGKKRPVEPSPQRSPDSSTGIGKKGQQPARKRLNFGQTGDSESVPDPQPIGEPPAGPSGLGSGTMAAGGGAPMADNNEGADGVGNASGNWHCDSTWLGDRVITTSTRTWALPTYNNHLYKQISSQSAGSTNDNVYFGYSTPWGYFDFNRFHCHFSPRDWQRLINNNWGFRPKKLNFKLFNIQVKEVTTNDGVTTIANNLTSTVQVFSDSEYQLPYVLGSAHQGCLPPFPADVFMIPQYGYLTLNNGSQAVGRSSFYCLEYFPSQMLRTGNNFSFSYTFEDVPFHSSYAHSQSLDRLMNPLIDQYLYYLSRTQSTGGTAGTQQLLFSQAGPSNMSTQARNWLPGPCYRQQRVSTTLSQNNNSNFAWTGATKYHLNGRDSLVNPGVAMATNKDDEDRFFPSSGILMFGKQGAGKDNVDYSNVMLTSEEEIKTTNPVATEQYGVVADNLQQQNTAPIVGAVNSQGALPGMVWQNRDVYLQGPIWAKIPHTDGNFHPSPLMGGFGLKHPPPQILIKNTPVPADPPTAFNQAKLNSFITQYSTGQVSVEIEWELQKENSKRWNPEIQYTSNYYKSTNVDFAVNTEGAYSEPRPIGTRYLTRNL

SEQ ID NO: 447 - DNA, 2217 bp, Adeno-associated virus
atggctgccgatggttatcttccagattggctcgaggacaacctctctgagggcattcgcgagtggtgggacctgaaacctggagccccgaaacccaaagccaaccagcaaaagcaggacgacggccggggtctggtgcttcctggctacaagtacctcggacccttcaacggactcgacaagggggagcccgtcaacgcggcggacgcagcggccctcgagcacgacaaggcctacgaccagcagctcaaagcgggtgacaatccgtacctgcggtataatcacgccgacgccgagtttcaggagcgtctgcaagaagatacgtcttttgggggcaacctcgggcgagcagtcttccaggccaagaagcgggttctcgaacctctcggtctggttgaggaaggcgctaagacggctcctggaaagaagagaccggtagagccgtcaccacagcgttcccccgactcctccacgggcatcggcaagaaaggccagcagcccgccagaaagagactcaatttcggtcagactggcgactcagagtcagtccccgaccctcaacctatcggagaacctccagcagcgccctctagtgtgggatctggtacaatggctgcaggcggtggcgcaccaatggcagacaataacgaaggtgccgacggagtgggtagttcctcgggaaattggcattgcgattccacatggctgggcgacagagtcatcaccaccagcacccgaacctgggccctgcccacctacaacaaccacctctacaagcaaatctccaacgggacctcgggaggcagcaccaacgacaacacctactttggctacagcaccccctgggggtattttgactttaacagattccactgccacttctcaccacgtgactggcagcgactcatcaacaacaactggggattccggcccaagagactcagcttcaagctcttcaacatccaggtcaaagaggtcacgcagaatgaaggcaccaagaccatcgccaataacctcaccagcaccatccaggtgtttacggactcggaataccagctgccgtacgtcctcggctctgcccaccagggctgcctgcctccgttcccggcggacgtcttcatgattcctcagtacggctacctgactctcaacaacggtagtcaggccgtgggacgttcctccttctactgcctggagtacttcccctctcagatgctgagaacgggcaacaacttttccttcagctacactttcgaggacgtgcctttccacagcagctacgcgcacagccagagtttggacaggctgatgaatcctctcatcgaccagtacctgtactacctgtcaagaacccagtctacgggaggcacagcgggaacccagcagttgctgttttctcaggccgggcctagcaacatgtcggctcaggccagaaactggctgcctggaccctgctacagacagcagcgcgtctccacgacactgtcgcaaaacaacaacagcaactttgcctggactggtgccaccaagtatcatctgaacggcagagactctctggtgaatccgggcgtcgccatggcaaccaacaaggacgacgaggaccgcttcttcccatccagcggcatcctcatgtttggcaagcagggagctggaaaagacaacgtggactatagcaacgtgatgctaaccagcgaggaagaaatcaaggccaccaaccccgtggccacagaacagtatggcgtggtggctgataacctacagcagcaaaacaccgctcctattgtgggggccgtcaacagccagggagccttacctggcatggtctggcagaaccgggacgtgtacctgcagggtcctatttgggccaagattcctcacacagatggcaactttcacccgtctcctttaatgggcggctttggacttaaacatccgcctcctcagatcctcatcaaaaacactcctgttcctgcggatcctccaacagcgttcaaccaggccaagctgaattctttcatcacgcagtacagcaccggacaagtcagcgtggagatcgagtgggagctgcagaaggagaacagcaagcgctggaacccagagattcagtatacttccaactactacaaatctacaaatgtggactttgctgttaatactgagggtgtttactctgagcctcgccccattggcactcgttacctcacccgtaatctgtaa

SEQ ID NO: 448 - protein, 738 aa, Adeno-associated virus
MAADGYLPDWLEDNLSEGIREWWDLKPGAPKPKANQQKQDDGRGLVLPGYKYLGPFNGLDKGEPVNAADAAALEHDKAYDQQLKAGDNPYLRYNHADAEFQERLQEDTSFGGNLGRAVFQAKKRVLEPLGLVEEGAKTAPGKKRPVEPSPQRSPDSSTGIGKKGQQPARKRLNFGQTGDSESVPDPQPIGEPPAAPSSVGSGTMAAGGGAPMADNNEGADGVGSSSGNWHCDSTWLGDRVITTSTRTWALPTYNNHLYKQISNGTSGGSTNDNTYFGYSTPWGYFDFNRFHCHFSPRDWQRLINNNWGFRPKRLSFKLFNIQVKEVTQNEGTKTIANNLTSTIQVFTDSEYQLPYVLGSAHQGCLPPFPADVFMIPQYGYLTLNNGSQAVGRSSFYCLEYFPSQMLRTGNNFSFSYTFEDVPFHSSYAHSQSLDRLMNPLIDQYLYYLSRTQSTGGTAGTQQLLFSQAGPSNMSAQARNWLPGPCYRQQRVSTTLSQNNNSNFAWTGATKYHLNGRDSLVNPGVAMATNKDDEDRFFPSSGILMFGKQGAGKDNVDYSNVMLTSEEEIKATNPVATEQYGVVADNLQQQNTAPIVGAVNSQGALPGMVWQNRDVYLQGPIWAKIPHTDGNFHPSPLMGGFGLKHPPPQILIKNTPVPADPPTAFNQAKLNSFITQYSTGQVSVEIEWELQKENSKRWNPEIQYTSNYYKSTNVDFAVNTEGVYSEPRPIGTRYLTRNL

SEQ ID NO: 449 - DNA, 2217 bp, Adeno-associated virus
atggctgccgatggttatcttccagattggctcgaggacaacctctctgagggcattcgcgagtggtgggacctgaaacctggagccccgaaacccaaagccaaccagcaaaagcaggacgacggccggggtctggtgcttcctggctacaagcacctcggacccttcaacggactcgacaagggggagcccgtcaacgcggcggacgcagcggccctcgagcacgacaaggcctacgaccagcagctcaaagcgggtgacaatccgtacctgcggtataatcacgctgacgccgagtttcaggagcgtctgcaagaagatacgtcttttgggggcaacctcgggcgagcagtcttccaggccaagaagcgggttctcgaacctctcggtctggttgaggaaggcgctaagacggctcctggaaagaagagaccggtagagccgtcaccacagcgttcccccgactcctccacgggcatcggcaagaaaggccagcagcccgccagaaagagactcaatttcggtcagactggcgactcagagtcagtccccgaccctcaacctatcggagaacctccagcagcgccctctagtgtgggatctggtacaatggctgcaggcggtggcgcaccaatggcagacaataacgaaggtgccgacggagtgggtagttcctcgggaaattggcattgcgattccacatggctgggcgacagagtcatcaccaccagcacccgaacctgggccctgcccacctacaacaaccacctctacaagcaaatctccaacgggacctcgggaggcagcaccaacgacaacacctactttggctacagcaccccctgggggtattttgactttaacagattccactgccacttctcaccacgtgactggcagcgactcatcaacaacaactggggattccggcccaagagactcagcttcaagctcttcaacatccaggtcaaagaggtcacgcagaatgaaggcaccaagaccatcgccaataaccttaccagcacggttcaggtcttttcggactcggaataccagctgccctacgtcctcggctccgcacaccagggctgcctgcctccgttcccggcggacgtcttcatgattccccagtacggctacctgactctgaacaatggcagccaatcggtgggtcgttcctctttctactgcctggaatatttcccttctcaaatgctgagaacgggcaacaacttcaccttcagctacaccttcgaggacgttcccttccacagcagctacgcacacagccagagcctggaccggctgatgaatcctcttatcgaccagtacctgtattacctggccagaacacagagcaacgcaggaggcacagctggcaatcgggaactgcagttttatcagggcgggcctaccaccatggccgaacaagccaaaaactggctgcctggaccttgcttccggcaacaaagagtctccaagacgctggatcaaaacaacaacagcaactttgcttggactggtgccaccaaataccatctaaatggaagaaattcattggttaatcccggtgtcgccatggcaacccacaaggacgacgaggaacgcttcttcccttcgagcggagtcctgatttttggaaaaactggagcagctaataagactacactggaaaatgtgttaatgacaaatgaagaggaaattcgtcctaccaacccggtagccaccgaggaatacgggactgttagcagcaacctgcaggcggctaacactgcagcccagacacaagttgtcaacaaccagggagccttacctggtatggtctggcagaaccgggacgtgtacctgcagggtcccatctgggccaagattcctcacacggacggcaactttcacccgtctccgctgatgggcggctttggactgaagcatccgcctcctcagatcctgatcaaaaacactcctgttcctgctaatcccccggaggtgtttacgcctgccaagtttgcttctttcatcacacagtacagcaccggccaggtcagcgtggagatcgagtgggagctgcagaaggagaacagcaagcgctggaacccagagattcagtatacctccaattttgacaaacagactggtgtggactttgccgttgacagccagggtgtttattctgagcctcgccccattggtactcgttacctcacccgtaatctgtaa

SEQ ID NO: 450 - protein, 738 aa, Adeno-associated virus
MAADGYLPDWLEDNLSEGIREWWDLKPGAPKPKANQQKQDDGRGLVLPGYKHLGPFNGLDKGEPVNAADAAALEHDKAYDQQLKAGDNPYLRYNHADAEFQERLQEDTSFGGNLGRAVFQAKKRVLEPLGLVEEGAKTAPGKKRPVEPSPQRSPDSSTGIGKKGQQPARKRLNFGQTGDSESVPDPQPIGEPPAAPSSVGSGTMAAGGGAPMADNNEGADGVGSSSGNWHCDSTWLGDRVITTSTRTWALPTYNNHLYKQISNGTSGGSTNDNTYFGYSTPWGYFDFNRFHCHFSPRDWQRLINNNWGFRPKRLSFKLFNIQVKEVTQNEGTKTIANNLTSTVQVFSDSEYQLPYVLGSAHQGCLPPFPADVFMIPQYGYLTLNNGSQSVGRSSFYCLEYFPSQMLRTGNNFTFSYTFEDVPFHSSYAHSQSLDRLMNPLIDQYLYYLARTQSNAGGTAGNRELQFYQGGPTTMAEQAKNWLPGPCFRQQRVSKTLDQNNNSNFAWTGATKYHLNGRNSLVNPGVAMATHKDDEERFFPSSGVLIFGKTGAANKTTLENVLMTNEEEIRPTNPVATEEYGTVSSNLQAANTAAQTQVVNNQGALPGMVWQNRDVYLQGPIWAKIPHTDGNFHPSPLMGGFGLKHPPPQILIKNTPVPANPPEVFTPAKFASFITQYSTGQVSVEIEWELQKENSKRWNPEIQYTSNFDKQTGVDFAVDSQGVYSEPRPIGTRYLTRNL

SEQ ID NO: 451 - protein, 737 aa, Adeno-associated virus
MAADGYLPDWLEDNLSEGIREWWDLKPGAPKPKANQQKQDDGRGLVLPGYKYLGPFNGLDKGEPVNAADAAALEHDKAYDQQLKAGDNPYLRYNHADAEFQERLQEDTSFGGNLGRAVFQAKKRVLEPLGLVEEAAKTAPGKKRPVEPSPQRSPDSSTGIGKKGQQPARKRLNFGQTGDSESVPDPQPIGEPPAGPSGLGSGTMAAGGGAPMADNNKGADGVGNASGNWHCDSTWLGDRVITTSTRTWALPTYNNHLYKQISSQSAGSTNDNVYFGYSTPWGYFDFNRFHCHFSPRDWQRLINSNWGFRPKKLNFKLFNIQVKEVTTNDGVTTIANNLTSTVQVFSDSEYQLPYVLGSAHQGCLPPFPADVFMIPQYGYLTLNNGSQSVGRSSFYCLEYFPSQMLRTGNNFTFSYTFEDVPFHSSYAHSQSLDRLMNPLIDQYLYYLARTQSNAGGTAGNRELQFYQGGPTTMAEQAKNWLPGPCFRQQRVSKTLDQNNNSNFAWTGATKYHLNGRNSLVNPGVAMATHKDDEERFFPSSGVLIFGKTGAANKTTLENVLMTNEEEIRPTNPVATEEYGTVSSNLQAANTAAQTQVVNNQGALPGMVWQNRDVYLQGPIWAKIPHTDGNFHPSPLMGGFGLKHPPPQILIKNTPVPANPPEVFTPAKFASFITQYSTGQVSVEIEWELQKENSKRWNPEIQYTSNFDKQTGVDFAVDSQGVYSEPRPIGTRYLTRNL

SEQ ID NO: 452 - protein, 737 aa, Adeno-associated virus
MAADGYLPDWLEDNLSEGIREWWDLKPGAPKPKANQQKQDDGRGLVLPGYKYLGPFNGLDKGEPVNAADAAALEHDKAYDQQLKAGDNPYLRYNHADAEFQERLQEDTSFGGNLGRAVFQAKKRVLEPLGLVEEAAKTAPGKKRPVEPSPQRSPDSSTGIGKKGQQPARKRLNFGQTGDSESVPDPQPIGEPPAGPSGLGSGTMAAGGGAPMADNNEGADGVGNASGNWHCDSTWLGDRVITTSTRTWALPTYNNHLYKQISSQSAGSTNDNVYFGYSTPWGYFDFNRFHCHFSPRDWQRLINSNWGFRPKKLNFKLFNIQVKEVTTNDGVTTIANNLTSTVQVFSDSEYQLPYVLGSAHQGCLPPFPADVFMIPQYGYLTLNNGSQSVGRSSFYCLEYFPSQMLRTGNNFTFSYTFEDVPFHSSYAHSQSLDRLMNPLIDQYLYYLARTQSNAGGTAGNRELQFYQGGPTTMAEQAKNWLPGPCFRQQRVSKTLDQNNNSNFAWTGATKYHLNGRNSLVNPGVAMATHKDDEERFFPSSGVLIFGKTGAANKTTLENVLMTNEEEIRPTNPVATEEYGTVSSNLQAANTAAQTQVVNNQGALPGMVWQNRDVYLQGPIWAKIPHTDGNFHPSPLMGGFGLKHPPPQILIKNTPVPANPPEVFTPAKFASFITQYSTGQVSVEIEWELQKENSKRWNPEIQYTSNFDKQTGVDFAVDSQGVYSEPRPIGTRYLTRNL

SEQ ID NO: 453 - protein, 737 aa, Adeno-associated virus
MAADGYLPDWLEDNLSEGIREWWDLKPGAPKPKANQQKQDDGRGLVLPGYKYLGPFNGLDKGEPVNAADAAALEHDKAYDQQLKAGDNPYLRYNHADAEFQERLQEDTSFGGNLGRAVFQAKKRVLEPLGLVEEAAKTAPGKKRPVEPSPQRSPDSSTGIGKKGQQPARKRLNFGQTGDSESVPDPQPIGEPPAGPSGLGSGTMAAGGGAPMADNNEGADGVGNASGNWHCDSTWLGDRVITTSTRTWALPTYNNHLYKQISSQSAGSTNDNVYFGYSTPWGYFDFNRFHCHFSPRDWQRLINNNWGFRPKKLNFKLFNIQVKEVTTNDGVTTIANNLTSTVQVFSDSEYQLPYVLGSAHQGCLPPFPADVFMIPQYGYLTLNNGSQSVGRSSFYCLEYFPSQMLRTGNNFTFSYTFEDVPFHSSYAHSQSLDRLMNPLIDQYLYYLARTQSNAGGTAGNRELQFYQGGPTTMAEQAKNWLPGPCFRQQRVSKTLDQNNNSNFAWTGATKYHLNGRNSLVNPGVAMATHKDDEERFFPSSGVLIFGKTGAANKTTLENVLMTNEEEIRPTNPVATEEYGTVSSNLQAANTAAQTQVVNNQGALPGMVWQNRDVYLQGPIWAKIPHTDGNFHPSPLMGGFGLKHPPPQILIKNTPVPANPPEVFTPAKFASFITQYSTGQVSVEIEWELQKENSKRWNPEIQYTSNFDKQTGVDFAVDSQGVYSEPRPIGTRYLTRNL

SEQ ID NO: 454 - protein, 737 aa, Adeno-associated virus
MAADGYLPDWLEDNLSEGIREWWDLKPGAPKPKANQQKQDDGRGLVLPGYKYLGPFNGLDKGEPVNAADAAALEHDKAYDQQLKAGDNPYLRYNHADAEFQERLQEDTSFGGNLGRAVFQAKKRVLEPLGLVEEAAKTAPGKKRPVEPSPQRSPDSSTGIGKKGQQPARKRLNFGQTGDSESVPDPQPIGEPPAGPSGLGSGTMAAGGGAPMADNNKGADGVGNASGNWHCDSTWLGDRVITTSTRTWALPTYNNHLYKQISSQSAGSTNDNVYFGYSTPWGYFDFNRFHCHFSPRDWQRLINNNWGFRPKKLNFKLFNIQVKEVTTNDGVTTIANNLTSTVQVFSDSEYQLPYVLGSAHQGCLPPFPADVFMIPQYGYLTLNNGSQSVGRSSFYCLEYFPSQMLRTGNNFTFSYTFEDVPFHSSYAHSQSLDRLMNPLIDQYLYYLARTQSNAGGTAGNRELQFYQGGPTTMAEQAKNWLPGPCFRQQRVSKTLDQNNNSNFAWTGATKYHLNGRNSLVNPGVAMATHKDDEERFFPSSGVLIFGKTGAANKTTLENVLMTNEEEIRPTNPVATEEYGTVSSNLQAANTAAQTQVVNNQGALPGMVWQNRDVYLQGPIWAKIPHTDGNFHPSPLMGGFGLKHPPPQILIKNTPVPANPPEVFTPAKFASFITQYSTGQVSVEIEWELQKENSKRWNPEIQYTSNFDKQTGVDFAVDSQGVYSEPRPIGTRYLTRNL

SEQ ID NO: 455 - DNA, 2214 bp, Adeno-associated virus
atggctgctgacggttatcttccagattggctcgaggacaacctctctgagggcattcgcgagtggtgggacctgaaacctggagcccccaagcccaaggccaaccagcagaagcaggacgacggccggggtctggtgcttcctggctacaagtacctcggacccttcaacggactcgacaagggggagcccgtcaacgcggcggacgcagcggccctcgagcacgacaaggcctacgaccagcagctcaaagcgggtgacaatccgtacctgcggtataaccacgccgacgccgagtttcaggagcgtctgcaagaagatacgtcttttgggggcaacctcgggcgagcagtcttccaggccaagaagcgggttctcgaacctctcggtctggttgaggaagctgctaagacggctcctggaaagaagagaccggtagaaccgtcacctcagcgttcccccgactcctccacgggcatcggcaagaaaggccagcagcccgctagaaagagactgaactttgggcagactggcgactcagagtcagtccccgaccctcaaccaatcggagaaccaccagcaggcccctctggtctgggatctggtacaatggctgcaggcggtggcgcaccaatggctgacaataacaagggcgccgacggagtgggtaatgcctcaggaaattggcattgcgattccacatggctgggcgacagagtcatcaccaccagcacccgaacctgggctttgcccacctacaacaaccacctctacaagcaaatctccagtcagtcagcaggtagcaccaacgacaacgtctacttcggctacagcaccccctgggggtattttgacttcaacagattccactgtcacttctcaccacgtgactggcagcggctcatcaacagcaactggggattccggcccaagaagctcaacttcaagctgttcaacatccaggtcaaggaggtcacaacgaatgacggcgtcacgaccatcgccaataaccttaccagcacggttcaggtcttttcggactcggaataccagctgccctacgtcctcggctccgcacaccagggctgcctgcctccgttcccggcggacgtcttcatgattccccagtacggctacctgactctgaacaatggcagccaatcggtgggtcgttcctctttctactgcctggaatatttcccttctcaaatgctgagaacgggcaacaacttcaccttcagctacaccttcgaggacgttcccttccacagcagctacgcacacagccagagcctggaccggctgatgaatcctcttatcgaccagtacctgtattacctggccagaacacagagcaacgcaggaggcacagctggcaatcgggaactgcagttttatcagggcgggcctaccaccatggccgaacaagccaaaaactggctgcctggaccttgcttccggcaacaaagagtctccaagacgctggatcaaaacaacaacagcaactttgcttggactggtgccaccaaataccatctaaatggaagaaattcattggttaatcccggtgtcgccatggcaacccacaaggacgacgaggaacgcttcttcccttcgagcggagtcctgatttttggaaaaactggagcagctaataagactacactggaaaatgtgttaatgacaaatgaagaggaaattcgtcctaccaacccggtagccaccgaggaatacgggactgttagcagcaacctgcaggcggctaacactgcagcccagacacaagttgtcaacaaccagggagccttacctggtatggtctggcagaaccgggacgtgtacctgcagggtcccatctgggccaagattcctcacacggacggcaactttcacccgtctccgctgatgggcggctttggactgaagcatccgcctcctcagatcctgatcaaaaacactcctgttcctgctaatcccccggaggtgtttacgcctgccaagtttgcttctttcatcacacagtacagcaccggccaggtcagcgtggagatcgagtgggagctgcagaaggagaacagcaagcgctggaacccagagattcagtatacctccaattttgacaaacagactggtgtggactttgccgttgacagccagggtgtttattctgagcctcgccccattggtactcgttacctcacccgtaatctgtaa

SEQ ID NO: 456 - DNA, 2217 bp, Adeno-associated virus
atggctgccgatggttatcttccagattggctcgaggacaacctctctgagggcattcgcgagtggtgggacctgaaacctggagccccgaaacccaaagccaaccagcaaaagcaggacgacggccggggtctggtgcttcctggctacaagtacctcggacccttcaacggactcgacaagggggagcccgtcaacgcggcggacgcagcggccctcgagcacgacaaggcctacgaccagcagctcaaagcgggtgacaatccgcacctgcggtataatcacgccgacgccgagtttcaggagcgtctgcaagaagatacgtcttttgggggcaacctcgggcgagcagtcttccaggccaagaagcgggttctcgaacctctcggtctggttgaggaaggcgctaagacggctcctggaaagaagagaccggtagagccgtcaccacagcgttcccccgactcctccacgggcatcggcaagaaaggccagcagcccgccagaaagagactcaatttcggtcagactggcgactcagagtcagtccccgaccctcaacttatcggagaacctccagcagcgccctctagtgtgggatctggtacaatggctgcaggcggtggcgcaccaatggcagacaataacgaaggtgccgacggagtgggtagttcctcgggaaattggcattgcgattccacatggctgggcgacagagtcatcaccaccagcacccgaacctgggccctgcccacctacaacaaccacctctacaagcaaatctccaacgggacctcgggaggcagcaccaacgacaacacctactttggctacagcaccccctgggggtattttgactttaacagattccactgccacttctcaccacgtgactggcagcgactcatcaacaacaactggggattccggcccaagagactcagcttcaagctcttcaacatccaggtcaaagaggtcacgcagaatgaaggcaccaagaccatcgccaataacctcaccagcaccatccaggtgtttacggactcggagtaccagctgccgtacgtcctcggctctgcccaccagggctgcctgcctccgttcccggcggacgtcttcatgattcctcagtacggcaacctgactctcaacaacggtagtcaggccgtgggacgttcctccttctactgcctggagtacttcccctctcagatgctgagaacgggcaacaacttttccttcagctacactttcgaggacgtgcctttccacagcagctacgcgcacagccagagtttggacaggctgatgaatcctctcatcgaccagtacctgtactacctgtcaagaacccagtctacgggaggcacagcgggaacccagcagttgctgttttctcaggccgggcctagcaacatgtcggctcaggccagaaactggctgcctggaccctgctacagacagcagcgcgtctccacgacactgtcgcaaaacaacaacagcaactttgcctggactggtgccaccaagtatcatctgaacggcagagactctctggtgaatccgggcgtcgccatggcaaccaacaaggacgacgaggaccgcttcttcccatccagcggcatcctcatgtttggcaagcagggagctggaaaagacaacatgggctatagcaacgtgatgctaaccagcgaggaagaaatcaagaccaccaaccccgtggccacagaacagtatggcgtggtggctgataacctacagcagcaaaacaccgctcctattgtgggggccgtcaacagccagggagccttacctggcatggtctggcagaaccgggacgtgtacctgcagggtcctatttgggccaagattcctcacacagatggcaactttcacccgtctcctttaatgggcggctttggacttaaacatccgcctcctcagatcctcatcaaaaacactcctgttcctgcggatcctccaacagcgttcaaccaggccaagctgaattctttcatcacgcagtacggcaccggacaagtcagcgtggagatcgagtgggagctgcagaaggagaacagcaagcgctggaacccagagattcagtatacttccaactactacaaatctacaaatgtggactttgctgttaatactgagggtgtttactctgagcctcgccccattggcactcgttacctcacccgtaatctgtaa

SEQ ID NO: 457 - protein, 738 aa, Adeno-associated virus
MAADGYLPDWLEDNLSEGIREWWDLKPGAPKPKANQQKQDDGRGLVLPGYKYLGPFNGLDKGEPVNAADAAALEHDKAYDQQLKAGDNPHLRYNHADAEFQERLQEDTSFGGNLGRAVFQAKKRVLEPLGLVEEGAKTAPGKKRPVEPSPQRSPDSSTGIGKKGQQPARKRLNFGQTGDSESVPDPQLIGEPPAAPSSVGSGTMAAGGGAPMADNNEGADGVGSSSGNWHCDSTWLGDRVITTSTRTWALPTYNNHLYKQISNGTSGGSTNDNTYFGYSTPWGYFDFNRFHCHFSPRDWQRLINNNWGFRPKRLSFKLFNIQVKEVTQNEGTKTIANNLTSTIQVFTDSEYQLPYVLGSAHQGCLPPFPADVFMIPQYGNLTLNNGSQAVGRSSFYCLEYFPSQMLRTGNNFSFSYTFEDVPFHSSYAHSQSLDRLMNPLIDQYLYYLSRTQSTGGTAGTQQLLFSQAGPSNMSAQARNWLPGPCYRQQRVSTTLSQNNNSNFAWTGATKYHLNGRDSLVNPGVAMATNKDDEDRFFPSSGILMFGKQGAGKDNMGYSNVMLTSEEEIKTTNPVATEQYGVVADNLQQQNTAPIVGAVNSQGALPGMVWQNRDVYLQGPIWAKIPHTDGNFHPSPLMGGFGLKHPPPQILIKNTPVPADPPTAFNQAKLNSFITQYGTGQVSVEIEWELQKENSKRWNPEIQYTSNYYKSTNVDFAVNTEGVYSEPRPIGTRYLTRNL

SEQ ID NO: 458 - DNA, 2217 bp, Adeno-associated virus
atggctgccgatggttatcttccagattggctcgaggacaacctctctgagggcattcgcgagtggtgggacctgaaacctggagccccgaaacccaaagccaaccagcaaaagcaggacgacggccggggtctggtgcttcctggctacaagtacctcggacccttcaacggactcgacaagggggagcccgtcaacgcggcggacgcagcggccctcgagcacgacaaggcctacgaccagcagctcaaagcgggtgacaatccgtacctgcggtataatcacgccgacgccgagtttcaggagcgtctgcaagaagatacgtcttttgggggcaacctcgggcgagcagtcttccaggccaagaagcgggttctcgaacctctcggtctggttgaggaaggcgctaagacggctcctggaaagaagagaccggtagagccgtcaccacagcgttcccccgactcctccacgggcatcggcaagaaaggccagcagcccgccggaaagagactcaatttcggtcagactggcgactcagagtcagtccccgaccctcaacctatcggagaacctccagcagcgccctctagtgtgggatctggtacaatggctgcaggcggtggcgcaccaatggcagacaataacgaaggtgccgacggagtgggtagttcctcgggaaattggcattgcgattccacatggctgggcgacagagtcatcaccaccagcacccgaacctgggccctgcccacctacaacaaccacctctacaagcaaatctccaacgggacctcgggaggcagcaccaacgacaacacctactttggctacagcaccccctgggggtattttgactttaacagattccactgccacttctcaccacgtgactggcagcgactcatcaacaacaactggggattccggcccaagagactcagcttcaagctcttcaacatccaggtcaaagaggtcacgcagaatgaaggcaccaagaccatcgccaataacctcaccagcaccatccaggtgtttacggactcggaataccagctgccgtacgtcctcggctctgcccaccagggctgcctgcctccgttcccggcggacgtcttcatgattcctcagtacggctacctgactctcaacaacggtagtcaggccgtgggacgttcctccttctactgcctggagtacttcccctctcagatgctgagaacgggcaacaacttttccttcagctacactttcgaggacgtgcctttccacagcagctacgcgcacagccagagtttggacaggctgatgaatcctctcgtcgaccagtacctgtactacctgtcaagaacccagtctacgggaggcacagcgggaacccagcagttgctgttttctcaggccgggcctagcaacatgtcggctcaggccagaaactggctgcctggaccctgctacagacagcagcgcgtctccacgacactgtcgcaaaacaacaacagcaactttgcctggactggtgccaccaagtatcatctgaacggcagagactctctggtgaatccgggcgtcgccatggcaaccaacaaggacgacgaggaccgcttcttcccatccagcggcatcctcatgtttggcaagcagggagctggaaaagacaacgtggactatagcaacgtgatgctaaccagcgaggaagaaatcaagaccaccaaccccgtggccacagaacagtatggcgtggtggctgataacctacagcagcaaaacaccgctcctattgtgggggccgtcaacagccagggagccttacctggcatggtctggcagaaccgggacgtgtacctgcagggtcctatttgggccaagattcctcacacagatggcaactttcacccgtctcctttaatgggcggctttggacttaaacatccgcctcctcagatcctcatcaaaaacactcctgttcctgcggatcctccaacagcgttcaaccaggccaagctgaattctttcatcacgcagtacagcaccggacaagtcagcgtggagatcgagtgggagctgcagaaggagaacagcaagcgctggagcccagagattcagtatacttccaactactacaaatctacaaatgtggactttgctgttaatactgagggtgtttactctgagcctcgccccattggcactcgttacctcacccgtaatctgtaa

SEQ ID NO: 459 - protein, 738 aa, Adeno-associated virus
MAADGYLPDWLEDNLSEGIREWWDLKPGAPKPKANQQKQDDGRGLVLPGYKYLGPFNGLDKGEPVNAADAAALEHDKAYDQQLKAGDNPYLRYNHADAEFQERLQEDTSFGGNLGRAVFQAKKRVLEPLGLVEEGAKTAPGKKRPVEPSPQRSPDSSTGIGKKGQQPAGKRLNFGQTGDSESVPDPQPIGEPPAAPSSVGSGTMAAGGGAPMADNNEGADGVGSSSGNWHCDSTWLGDRVITTSTRTWALPTYNNHLYKQISNGTSGGSTNDNTYFGYSTPWGYFDFNRFHCHFSPRDWQRLINNNWGFRPKRLSFKLFNIQVKEVTQNEGTKTIANNLTSTIQVFTDSEYQLPYVLGSAHQGCLPPFPADVFMIPQYGYLTLNNGSQAVGRSSFYCLEYFPSQMLRTGNNFSFSYTFEDVPFHSSYAHSQSLDRLMNPLVDQYLYYLSRTQSTGGTAGTQQLLFSQAGPSNMSAQARNWLPGPCYRQQRVSTTLSQNNNSNFAWTGATKYHLNGRDSLVNPGVAMATNKDDEDRFFPSSGILMFGKQGAGKDNVDYSNVMLTSEEEIKTTNPVATEQYGVVADNLQQQNTAPIVGAVNSQGALPGMVWQNRDVYLQGPIWAKIPHTDGNFHPSPLMGGFGLKHPPPQILIKNTPVPADPPTAFNQAKLNSFITQYSTGQVSVEIEWELQKENSKRWSPEIQYTSNYYKSTNVDFAVNTEGVYSEPRPIGTRYLTRNL

SEQ ID NO: 460 - DNA, 2217 bp, Adeno-associated virus
atggttgccgatggttatcttccagattggctcgaggacaacctctctgagggcattcgcgagtggtgggacctgaaacctggagccccgaaacccaaagccaaccagcaaaagcagggcgacggccggggtctggtgcttcctggctacaagtacctcggacccttcaacggactcgacaagggggagcccgtcaacgcggcggacgcagcggccctcgagcacgacaaggcctacgaccagcagcttaaagcgggtgacaatccgtacctgcggtataatcacgccgacgccgagcttcaggagcgtctgcaagaagatacgtcttttgggggcaacctcgggcgagcagtcttccaggccaagaagcgggttctcgaacctctcggtctggttgaggaaggcgctaagacggctcctggaaagaagagaccggtagagccgtcaccacagcgttcccccgactcctccacgggcatcggcaagaaaggccagcagcccgccagaaagagactcaatttcggtcagactggcgactcagagtcagtccccgaccctcaacctatcggagaacctccagcagcgccctctagtgtgggatctggtacaatggctgcaggcggtggcgcgccaatggcagacaataacgaaggtgccgacggagtgggtagttcctcgggaaattggcattgcgattccacatggctgggcgacagagtcatcaccaccagcacccgaacctgggccctgcccacctacaacaaccacctctacaagcaaatctccaacgggacctcgggaggcagcaccaacgacaacacctactttggctacagcaccccctgggggtattttgactttaacagattccactgccacttctcaccacgtgactggcagcgactcatcaacaacaactggggattccggcccaagagactcagcttcaagctcttcaacatccaggtcaaagaggtcacgcagaatgaaggcaccaagaccatcgccaataacctcaccagcaccatccaggtgtttacggactcggaataccagctgccgtacgtcctcggctctgcccaccagggctgccagcctccgttcccggcggacgtcttcatgattcctcagtacggctacctgactctcaacaacggtagtcaggccgtgggacgttcctccttctactgcctggagtacttcccctctcagatgctgagaacgggcaacaacttttccttcagctacactttcgaggacgtgcctttccacagcagctacgcgcacagccagagtttggacaggctgatgaatcctctcatcgaccagtacctgtactacctgtcaagaacccagtctacgggaggcacagcgggaacccagcagttgctgttttctcaggccgggcctagcaacatgtcggctcaggccagaaactggctgcctggaccctgctacagacagcagcgcgtctccacgacactgtcgcaaaacaacaacagcaactttgcctggactggtgccaccaagtatcatctgaacggcagagactctctggtgaatccgggcgtcgccatggcaaccaacaaggacgacgaggaccgcttcttcccatccagcggcatcctcatgtttggcaagcagggagctggaaaagacaacgtggactatagcaacgtgatgctaaccagcgaggaagaaatcaagaccaccaaccccgtggccacagaacagtatggcgtggtggctgataacctacagcagcaaaacaccgctcctattgtgggggccgtcaacagccagggagccttacctggcatggtctggcagaaccgggacgtgtacctgcagggtcctatttgggccaagattcctcacacagatggcaactttcacccgtctcctttaatgggcggctttggacttaaacatccgcctcctcagatcctcatcaaaaacactcctgttcctgcggatcctccaacagcgttcaaccaggccaagctgaattctttcatcacgcagtacagcaccggacaagtcagcgtggagatcgagtgggagccgcagaaggagaacagcaagcgctggaacccagagattcagtatacttccaactactacaaatctacaaatgtggactttgctgttaatactgagggtgtttactctgagcctcgccccattggcactcgttacctcacccgtaatctgtaa

SEQ ID NO: 461 - protein, 738 aa, Adeno-associated virus
MVADGYLPDWLEDNLSEGIREWWDLKPGAPKPKANQQKQGDGRGLVLPGYKYLGPFNGLDKGEPVNAADAAALEHDKAYDQQLKAGDNPYLRYNHADAELQERLQEDTSFGGNLGRAVFQAKKRVLEPLGLVEEGAKTAPGKKRPVEPSPQRSPDSSTGIGKKGQQPARKRLNFGQTGDSESVPDPQPIGEPPAAPSSVGSGTMAAGGGAPMADNNEGADGVGSSSGNWHCDSTWLGDRVITTSTRTWALPTYNNHLYKQISNGTSGGSTNDNTYFGYSTPWGYFDFNRFHCHFSPRDWQRLINNNWGFRPKRLSFKLFNIQVKEVTQNEGTKTIANNLTSTIQVFTDSEYQLPYVLGSAHQGCQPPFPADVFMIPQYGYLTLNNGSQAVGRSSFYCLEYFPSQMLRTGNNFSFSYTFEDVPFHSSYAHSQSLDRLMNPLIDQYLYYLSRTQSTGGTAGTQQLLFSQAGPSNMSAQARNWLPGPCYRQQRVSTTLSQNNNSNFAWTGATKYHLNGRDSLVNPGVAMATNKDDEDRFFPSSGILMFGKQGAGKDNVDYSNVMLTSEEEIKTTNPVATEQYGVVADNLQQQNTAPIVGAVNSQGALPGMVWQNRDVYLQGPIWAKIPHTDGNFHPSPLMGGFGLKHPPPQILIKNTPVPADPPTAFNQAKLNSFITQYSTGQVSVEIEWEPQKENSKRWNPEIQYTSNYYKSTNVDFAVNTEGVYSEPRPIGTRYLTRNL

SEQ ID NO: 462 - DNA, 2217 bp, Adeno-associated virus
atggctgccgatggttatcttccagattggctcgaggacaacctctctgagggcattcgcgagtggtgggacctgaaacctggagccccgaaacccaaagccaaccagcaaaagcaggacgacggccggggtctggtgcttcctggctacaagtacctcggacccttcaacggactcgacaagggggagcccgtcaacgcggcggacgcagcggccctcgagcacgacaaggcctacgaccagcagctcaaagcgggtgacaatccgtacctgcggtataatcacgccgacgccgagtttcaggagcgtctgcaagaagatacgtcttttgggggcaacctcgggcgagcagtcttccaggccaagaagcgggttctcgaacctctcggtctggttgaggaaggcgctaagacggctcctggaaagaagagaccggtagagccgtcaccacagcgttcccccgactcctccacgggcatcggcaagaaaggccagcagcccgccagaaagagactcaatttcggtcagactggcgactcagagtcagtccccgaccctcaacctatcggagaacctccagcagcgccctctagtgtgggatctggtacaatggctgcaggcggtggcgcaccaatggcagacaataacgaaggtgccgacggagtgggtagttcctcgggaaattggcattgcgattccacatggctgggcgacagagtcatcaccaccagcacccgaacctgggccctgcccacctacaacaaccacctctacaagcaaatctccaacgggacctcgggaggcagcaccaacgacaacacctactttggctacagcaccccctgggggtattttgactttaacagattccactgccacttctcaccacgtgactggcagcgactcatcaacaacaactggggattccggcccaagagactcagcttcaagctcttcaacatccaggtcaaagaggtcacgcagaatgaaggcaccaagaccatcgccaatagcctcaccagcaccatccaggtgtttacggactcggaataccagctgccgtacgtcctcggctctgcccaccagggctgcctgcctccgttcccggcggacgtcttcatgattcctcagtacggctacctgactcccaacaacggtagtcaggccgtgggacgttcctccttctactgcctggagtacttcccctctcagatgctgagaacgggcaacaacttttccttcagctacactttcgaggacgtgcctttccacagcagctacgcgcacagccagagtttggacaggctgatgaatcctctcatcgaccagtacctgtactacctgtcaagaacccagtctacgggaggcacagcgggaacccagcagttgctgtcttctcaggccgggcctagcaacatgtcggctcaggccagaaactggctgcctggaccctgctacagacagcagcgcgtctccacgacactgtcgcaaaacaacaacagcaactttgcctggactggtgccaccaagtatcatctgaacggcagagactctctggtgaatccgggcgtcgccatggcaaccaacaaggacgacgaggaccgcttcttcccatccagcggcatcctcatgtttggcaagcagggagctggaaaagacaacgtggactatagcaacgtgatgctaaccagcgaggaagaaatcaagaccaccaaccccgtggccacagaacagtatggcgtggtggctgataacctacagcagcaaaacaccgctcctattgtgggggccgtcaacagccagggagccttacctggcatggtctggcagaaccgggacgtgtacttgcagggtcctatttgggccaagattcctcacacagatggcaactttcacccgtctcctttaatgggcggctttggacttaaacatccgcctcctcagatcctcatcaaaaacactcctgttcctgcggatcctccaacagcgttcaaccaggccaagctgaattctttcatcacgcagtacagcaccggacaagtcagcgtggagatcgagtgggagctgcagaaggagaacagcaagcgctggaacccagagattcagtatacttccaactactacaaatctacaaatgtggactttgctgttaatactgagggtgtttactctgagcctcgccccattggcactcgttacctcacccgtaatctgtaa

SEQ ID NO: 463 - protein, 738 aa, Adeno-associated virus
MAADGYLPDWLEDNLSEGIREWWDLKPGAPKPKANQQKQDDGRGLVLPGYKYLGPFNGLDKGEPVNAADAAALEHDKAYDQQLKAGDNPYLRYNHADAEFQERLQEDTSFGGNLGRAVFQAKKRVLEPLGLVEEGAKTAPGKKRPVEPSPQRSPDSSTGIGKKGQQPARKRLNFGQTGDSESVPDPQPIGEPPAAPSSVGSGTMAAGGGAPMADNNEGADGVGSSSGNWHCDSTWLGDRVITTSTRTWALPTYNNHLYKQISNGTSGGSTNDNTYFGYSTPWGYFDFNRFHCHFSPRDWQRLINNNWGFRPKRLSFKLFNIQVKEVTQNEGTKTIANSLTSTIQVFTDSEYQLPYVLGSAHQGCLPPFPADVFMIPQYGYLTPNNGSQAVGRSSFYCLEYFPSQMLRTGNNFSFSYTFEDVPFHSSYAHSQSLDRLMNPLIDQYLYYLSRTQSTGGTAGTQQLLSSQAGPSNMSAQARNWLPGPCYRQQRVSTTLSQNNNSNFAWTGATKYHLNGRDSLVNPGVAMATNKDDEDRFFPSSGILMFGKQGAGKDNVDYSNVMLTSEEEIKTTNPVATEQYGVVADNLQQQNTAPIVGAVNSQGALPGMVWQNRDVYLQGPIWAKIPHTDGNFHPSPLMGGFGLKHPPPQILIKNTPVPADPPTAFNQAKLNSFITQYSTGQVSVEIEWELQKENSKRWNPEIQYTSNYYKSTNVDFAVNTEGVYSEPRPIGTRYLTRNL

SEQ ID NO: 464 - protein, 738 aa, Adeno-associated virus
MAADGYLPDWLEDNLSEGIREWWDLKPGAPKPKANQQKQDDGRGLVLPGYKYLGPFNGLDKGEPVNAADAAALEHDKAYDQQLKAGDNPYLRYNHADAEFQERLQEDTSFGGNLGRAVFQAKKRVLEPLGLVEEGAKTAPGKKRPVEPSPQRSPDSSTGIGKKGQQPARKRLNFGQTGDSESVPDPQPIGEPPAAPSSVGSGTMAAGGGAPMADNNEGADGVGSSSGNWHCDSTWLGDRVITTSTRTWALPTYNNHLYKQISNGTSGGSTNDNTYFGYSTPWGYFDFNRFHCHFSPRDWQRLINNNWGFRPKRLSFKLFNIQVKEVTQNEGTKTIANNLTSTIQVFTDSEYQLPYVLGSAHQGCLPPFPADVFMIPQYGYLTLNNGSQAVGRSSFYCLEYFPSQMLRTGNNFSFSYTFEDVPFHSSYVHSQSLDRLMNPLIDQYLYYLSRTQSTGGTAGTQQLLFSQAGPSNMSAQARNWLPGPCYRQQRVSTTLSQNNNSNFAWTGATKYHLNGRDSLVNSGVAMATNKDDEDRFFPSSGILMFGKQGAGKDNVDYSNVMLTSEEEIKTTNPVATEQYGVVADNLQQQNTAPIVGAVNSQGALPGMVWQNRDVYLQGPIWAKIPHTDGNFHPSPLMGGFGLKHPPPQILIKNTPVPADPPTAFNQAKLNSFITQYSTGQVSVEIEWELQKENSKRWNPEIQYTSNYYKSTNVDFAVNTEGVYSEPRPIGTRYPTRNL

SEQ ID NO: 465 - DNA, 2217 bp, Adeno-associated virus
atggctgccgatggttatcttccagattggctcgaggacaacctctctgagggcattcgcgagtggtgggacctgaaacctggagccccgaaacccaaagccaaccagcaaaagcaggacgacggccggggtctggtgcttcctggctacaagtacctcggacccttcaacggactcgacaagggggagcccgtcaacgcggcggacgcagcggccctcgagcacgacaaggcctacgaccagcagctcaaagcgggtgacaatccgtacctgcggtataatcacgccgacgccgagtttcaggagcgtctgcaagaagatacgtcttttgggggcaacctcgggcgagcagtcttccaggccaagaagcgggttctcgaacctctcggtctggttgaggaaggcgctaagacggctcctggaaagaagagaccggtagagccgtcaccacagcgttcccccgactcctccacgggcatcggcaagaaaggccagcagcccgccagaaagagactcaatttcggtcagactggcgactcagagtcagtccccgaccctcaacctatcggagaacctccagcagcgccctctagtgtgggatctggtacaatggctgcaggcggtggcgcaccaatggcagacaataacgaaggtgccgacggagtgggtagttcctcgggaaattggcattgcgattccacatggctgggcgacagagtcatcaccaccagcacccgaacctgggccctgcccacctacaacaaccacctctacaagcaaatctccaacgggacctcgggaggcagcaccaacgacaacacctactttggctacagcaccccctgggggtattttgactttaacagattccactgccacttctcaccacgtgactggcagcgactcatcaacaacaactggggattccggcccaagagactcagcttcaagctcttcaacatccaggtcaaagaggtcacgcagaatgaaggcaccaagaccatcgccaataacctcaccagcaccatccaggtgtttacggactcggaataccagctgccgtacgtcctcggctctgcccaccagggctgcctgcctccgttcccggcggacgtcttcatgattcctcagtacggctacctgactctcaacaacggtagtcaggccgtgggacgttcctccttctactgcctggagtacttcccctctcagatgctgagaacgggcaacaacttttccttcagctacactttcgaggacgtgcctttccacagcagctacgtgcacagccagagtttggacaggctgatgaatcctctcatcgaccagtacctgtactacctgtcaagaacccagtctacgggaggcacagcgggaacccagcagttgctgttttctcaggccgggcctagcaacatgtcggctcaggccagaaactggctgcctggaccctgctacagacagcagcgcgtctccacgacactgtcgcaaaacaacaacagcaactttgcctggactggtgccaccaagtatcatctgaacggcagagactctctggtgaattcgggcgtcgccatggcaaccaacaaggacgacgaggaccgcttcttcccatccagcggcatcctcatgtttggcaagcagggagctggaaaagacaacgtggactatagcaacgtgatgctaaccagcgaggaagaaatcaagaccaccaaccccgtggccacagaacagtatggcgtggtggctgataacctacagcagcaaaacaccgctcctattgtgggggccgtcaacagccagggagccttacctggcatggtctggcagaaccgggacgtgtacctgcagggtcctatttgggccaagattcctcacacagatggcaactttcacccgtctcctttaatgggcggctttggacttaaacatccgcctcctcagatcctcatcaaaaacactcctgttcctgcggatcctccaacagcgttcaaccaggccaagctgaattctttcatcacgcagtacagcaccggacaagtcagcgtggagatcgagtgggagctgcagaaggagaacagcaagcgctggaacccagagattcagtatacttccaactactacaaatctacaaatgtggactttgctgttaatactgagggtgtttactctgagcctcgccccattggcactcgttaccccacccgtaatctgtaa

SEQ ID NO: 466 - protein, 734 aa, Adeno-associated virus; identical to SEQ ID NO: 291

SEQ ID NO: 467 - DNA, 2214 bp, Adeno-associated virus
atggctgctgacggttatcttccagattggctcgaggacaacctctctgagggcattcgcgagtggtgggacctgaaacctggagccccgaaacccaaagccaaccagcagaagcaggacgacggccggggtctggtgcttcctggctacaagtacctcggacccttcaacggactcgacaagggggagcccgtcaacgcggcggacgcagcggccctcgagcacgacaaggcctacgaccagcagctcaaagcgggtgacaatccgtacctgcggtataaccacgccgacgccgagtttcaggagcgtctgcaagaagatacgtcttttgggggcaacctcgggcgagcagtcttccaggccaagaagcgggttctcgaacctctcggtctggttgaggaagctgctaagacggctcctggaaagaagagaccggtagaaccgtcacctcagcgttcccccgactcctccacgggcatcggcaagaaaggccagcagcccgctagaaagagactgaactttgggcagactggcgactcagagtcagtccccgaccctcaacctctcggagaaccaccagcaggcccctctggtctgggatctggtacaatggctgcaggcggtggcgctccaatggcagacaataacgaaggcgccgacggagtgggtaatgcctcaggaaattggcattgcgattccacatggctgggcgacagagtcatcaccaccagcacccgaacctgggctttgcccacctacaacaaccacctctacaagcaaatctccagtcagtcagcaggtagcaccaacgacaacgtctacttcggctacagcaccccctgggggtattttgacttcaacagattccactgtcacttctcaccacgtgactggcagcgactcatcaacaacaactggggattccggcccaagaagctcaacttcaagctcttcaacatccaagtcaaggaggtcacgacgaatgacggcgtcacgaccatcgctaataaccttaccagcacggttcaggtcttttcggactcggagtaccagctgccgtacgtcctcggctctgcccaccagggctgcctgcctccgttcccggcggacgtcttcatgattcctcagtacggctacctgactctgaacaatggcagccaatcggtgggacgttcatccttctactgcctggaatacttcccttctcaggtgctgagaacgggtaacaacttcaccttcagttacaccttcgaggacgtgcctttccacagcagctacgcgcacagccagagcctagaccggctgatgaatcccctcatcgaccagtacctgtattacctggctagaacacagagtaacccaggaggcacatctggcaatcgggaactgcagttttaccagggcgggccttccaccatggccgaacaagccaagaactggttacctggaccttgcttccggcaacaaagagtttccaaaacactggatcaaaacaacaacagcaactttgcttggactggtgccaccaaatatcacctgaacggcagaaactcattggtgaatcctggtgtcgccatggcaactcacaaggacgacgaggaccgctttttcccatccagcggagtcctgatttttggaaaaactggagcaaccaacaagactacattggaaaacgtgttaatgacaaatgaagaagaaattcgtcctactaatcctgtggccacagaagaatacgggatagtcagcagcaatttacaagcggccaatactgcagcccagacacaagttgtcaacaaccagggagccttacctggcatggtctggcagaaccgggacgtgtacctgcagggtcccatctgggccaaaattcctcacacagacggcaactttcacccgtctccgctgatgggcggctttggactgaagcatccgcctcctcagatcctgatcaaaaacactcctgttcctgctaatcccccggaggtgtttacgcctgccaagtttgcttctttcatcacacagtacagcaccggccaggtcagcgtggagatcgagtgggagctgcagaaggagaacagcaagcgctggaacccagagattcagtatacctccaattttgacaaacagactggtgtggactttgccgttgacagccagggtgtttattctgagcctcgccccattggtactcgttacctcacccgtaatctgtaa

SEQ ID NO: 468 - protein, 737 aa, Adeno-associated virus
MAADGYLPDWLEDNLSEGIREWWDLKPGAPKPKANQQKQDDGRGLVLPGYKYLGPFNGLDKGEPVNAADAAALEHDKAYDQQLKAGDNPYLRYNHADAEFQERLQEDTSFGGNLGRAVFQAKKRVLEPLGLVEEAAKTAPGKKRPVEPSPQRSPDSSTGIGKKGQQPARKRLNFGQTGDSESVPDPQPLGEPPAGPSGLGSGTMAAGGGAPMADNNEGADGVGNASGNWHCDSTWLGDRVITTSTRTWALPTYNNHLYKQISSQSAGSTNDNVYFGYSTPWGYFDFNRFHCHFSPRDWQRLINNNWGFRPKKLNFKLFNIQVKEVTTNDGVTTIANNLTSTVQVFSDSEYQLPYVLGSAHQGCLPPFPADVFMIPQYGYLTLNNGSQSVGRSSFYCLEYFPSQVLRTGNNFTFSYTFEDVPFHSSYAHSQSLDRLMNPLIDQYLYYLARTQSNPGGTSGNRELQFYQGGPSTMAEQAKNWLPGPCFRQQRVSKTLDQNNNSNFAWTGATKYHLNGRNSLVNPGVAMATHKDDEDRFFPSSGVLIFGKTGATNKTTLENVLMTNEEEIRPTNPVATEEYGIVSSNLQAANTAAQTQVVNNQGALPGMVWQNRDVYLQGPIWAKIPHTDGNFHPSPLMGGFGLKHPPPQILIKNTPVPANPPEVFTPAKFASFITQYSTGQVSVEIEWELQKENSKRWNPEIQYTSNFDKQTGVDFAVDSQGVYSEPRPIGTRYLTRNL

SEQ ID NO: 469 - DNA, 2214 bp, Adeno-associated virus
atggctgccgatggttatcttccagattggctcgaggacaacctctctgagggcattcgcgagtggtgggacctgaaacctggagccccgaaacccaaagccaaccagcaaaagcaggacgacggccggggtctggtgcttcctggctacaagtacctcggacccttcaacggactcgacaagggggagcccgtcaacgcggcggacgcagcggccctcgagcacgacaaggcctacgaccagcagctcaaagcgggtgacaatccgtacctgcggtataatcacgccgacgccgagtttcaggagcgtctgcaagaagatacgtcttttgggggcaacctcgggcgagcagtcttccaggccaagaagcgggttctcgaacctctcggtctggttgaggaaggcgctaagacggctcctggaaagaagagaccggtagagccgtcaccacagcgttcccccgactcctccacgggcatcggcaagaaaggccagcagcccgccagaaagagactcaatttcggtcagactggcgactcagagtcagtccccgaccctcaacctatcggagaacctccagcagcgccctctagtgtgggatctggtacaatggctgcaggcggtggcgcaccaatggcagacaataacgaaggtgccgacggagtgggtagttcctcgggaaattggcattgcgattccacacggctgggcgacagagtcatcaccaccagcacccggacctgggctttgcccacctacaacaaccacctctacaagcaaatctccagtcagtcagcaggtagcaccaacgacaacgtctacttcggctacagcaccccctgggggtattttgacttcaacagattccactgtcacttctcaccacgtgactggcagcggctcatcaacaacaactggggattccggcccaagaagctcaacttcaagctgttcaacatccaggtcaaggaggtcacaacgaatgacggcgtcacgaccatcgccaataaccttaccagcacggttcaggtcttttcggactcggaataccagctgccctacgtcctcggctccgcacaccagggctgcctgcctccgttcccggcggacgtcttcatgattccccagtacggctacctgactctgaacaatggcagccaatcggtgggtcgttcctctttctactgcctggaatatttcccttctcaaatgctgagaacgggcaacaacttcaccttcagctacaccttcgaggacgttcccttccacagcagctacgcacacagccagagcctggaccggctgatgaatcctcttatcgaccagtacctgtattacctggccagaacacagagcaacgcaggaggcacagctggcaatcgggaactgcagttttatcagggcgggcctaccaccatggccgaacaagccaaaaactggctgcctggaccttgcttccggcaacgaagagtctccaagacgctggatcaaaacaacaacagcaactttgcttggactggtgccaccaaataccatctaaatggaagaaattcattggttaatcccggtgtcgccatggcaacccacaaggacgacgaggaacgcttcttcccttcgagcggagtcctgatttttggaaaaactggagcagctaataagactacactggaaaatgtgttaatgacaaatgaagaggaaattcgtcctaccaacccggtagccaccgaggaatacgggactgttagcagcaacctgcaggcggctaacactgcagcccagacacaagttgtcaacaaccagggagccttacctggtatggtctggcagaaccgggacgtgtacctgcagggtcccatctgggccaagattcctcacacggacggcaactttcacccgtctccgctgatgggcggctttggactgaagcatccgcctcctcagatcctgatcaaaaacactcctgttcctgctaatcccccggaggtgtttacgcctgccaagtttgcttctttcatcacacagtacagcaccggccaggtcagcgtggagatcgagtgggagctgcagaaggagaacagcaagcgctggaacccagagattcagtatacctccaattttgacaaacagactggtgtggactttgccgttgacagccagggtgtttattctgagcctcgccccattggtactcgttacctcacccgtaatctgtaa

SEQ ID NO: 470 - protein, 737 aa, Adeno-associated virus
MAADGYLPDWLEDNLSEGIREWWDLKPGAPKPKANQQKQDDGRGLVLPGYKYLGPFNGLDKGEPVNAADAAALEHDKAYDQQLKAGDNPYLRYNHADAEFQERLQEDTSFGGNLGRAVFQAKKRVLEPLGLVEEGAKTAPGKKRPVEPSPQRSPDSSTGIGKKGQQPARKRLNFGQTGDSESVPDPQPIGEPPAAPSSVGSGTMAAGGGAPMADNNEGADGVGSSSGNWHCDSTRLGDRVITTSTRTWALPTYNNHLYKQISSQSAGSTNDNVYFGYSTPWGYFDFNRFHCHFSPRDWQRLINNNWGFRPKKLNFKLFNIQVKEVTTNDGVTTIANNLTSTVQVFSDSEYQLPYVLGSAHQGCLPPFPADVFMIPQYGYLTLNNGSQSVGRSSFYCLEYFPSQMLRTGNNFTFSYTFEDVPFHSSYAHSQSLDRLMNPLIDQYLYYLARTQSNAGGTAGNRELQFYQGGPTTMAEQAKNWLPGPCFRQRRVSKTLDQNNNSNFAWTGATKYHLNGRNSLVNPGVAMATHKDDEERFFPSSGVLIFGKTGAANKTTLENVLMTNEEEIRPTNPVATEEYGTVSSNLQAANTAAQTQVVNNQGALPGMVWQNRDVYLQGPIWAKIPHTDGNFHPSPLMGGFGLKHPPPQILIKNTPVPANPPEVFTPAKFASFITQYSTGQVSVEIEWELQKENSKRWNPEIQYTSNFDKQTGVDFAVDSQGVYSEPRPIGTRYLTRNL

SEQ ID NO: 471 - DNA, 2208 bp, Adeno-associated virus
atggctgccgatggttatcttccagattggctcgaggacactctctctgaaggaataagacagtggtggaagctcaaacctggcccaccaccaccaaagcccgcagagcggcataaggacgacagcaggggtcttgtgcttcctgggtacaagtacctcggacccttcaacggactcgacaagggggagccggtcaacgaggcagacgccgcggccctcgagcacgacaaggcctacgaccggcagctcgacagcggagacaacccgtacctcaagtacaaccacgccgacgcggagtttcaggagcgtcttaaagaagatacgtcttttgggggcaacctcggacgagcagtcttccaggcgaaaaagagggttcttgaacctctgggcctggttgaggaacctgttaagacggctccgggaaaaaagaggccggtagagcactctcctgcggagccagactcctcctcgggaaccggaaaagcgggccagcagcctgcaagaaaaagattgaattttggtcagactggagacgcagactccgtacctgacccccagcctctcggacagccaccagcagccccctctggtttgggatctactacaatggctacaggcagtggcgcaccaatggcagacaataacgagggtgccgatggagtgggtaattcttcaggaaattggcattgcgattcccaatggctgggcgacagagtcatcaccaccagcacccgaacctgggcccagcccacctacaacaaccacctctacaagcaaatctcaagccaatcaggagcctcaaacgacaaccactactttggctacagcaccccttgggggtattttgacttcaacagattccactgccacttttcaccacgtgactggcaaagactcatcaacaacaactggggattccgacccaagagactcaacttcaagctctttaacattcaagtcaaagaggtcacgcagaatgacggtacgacgacgattgccaataaccttaccagcacggttcaggtgtttactgactcggagtaccagctcccgtacgtcctcgggtcggcgcatcaaggatgcctcccgccgtttccagcggacgtcttcatggtcccacagtatggatacctcaccctgaacaacgggagtcaggcggtaggacgctcttccttttactgcctggagtactttccttctcagatgcttcgtactggaaacaactttcagttcagctacacctttgaagacgttcctttccacagcagctacgctcacagccagagtctggatcggctgatgaatcctctgatcgaccagtacctgtattatctgaacaaaacacaatcaaatagtggagctcttcagcagtctcggctactgtttagtcaagctggacccaccagcatgtctcttcaagctaaaaactggctacctggaccttgctacagacagcagcgtctgtcaaagcaggcaaacgacaacaacaacagcaactttccctggactgcggctacaaagtaccacctaaatggccgggactcgttggttaatccaggaccagctatggccagtcacaaagacgatgaagaaaagtttttccccatgcatggaaccctgatatttggtaaacaaggaacaaatgctaacgacgcggatttggacaatgtcatgattacagatgaagaagaaatccgcaccaccaatcccgtggctacggagcagtacggatatgtgtcaaataatttgcaaaactcaaatactggtccaactactggaactgtcaatcaccgaggagcgttacctggcatggtgtggcaggatcgagacgtgtacctgcagggacccatttgggccaagattcctcacaccgatggacactttcatccttctccactgatgggaggttttgggctcaaacacccgcctcctcagatcatgatcaaaaacactcccgttccagccaatcctcccacaaacttcagttctgccaagtttgcttctttcatcacacagtattccacggggcaggtcagcgtggagatcgagtgggagctgcagaaagagaacagcaaacgctggaatcccgaaattcagtacacttccaactacaacaaatctgttaatgtggactttactgtggacactaatggcgtgtattcagagcctcgccccattggcaccagatacctgactcgtaatctgtaa

SEQ ID NO: 472 - protein, 735 aa, Adeno-associated virus
MAADGYLPDWLEDTLSEGIRQWWKLKPGPPPPKPAERHKDDSRGLVLPGYKYLGPFNGLDKGEPVNEADAAALEHDKAYDRQLDSGDNPYLKYNHADAEFQERLKEDTSFGGNLGRAVFQAKKRVLEPLGLVEEPVKTAPGKKRPVEHSPAEPDSSSGTGKAGQQPARKRLNFGQTGDADSVPDPQPLGQPPAAPSGLGSTTMATGSGAPMADNNEGADGVGNSSGNWHCDSQWLGDRVITTSTRTWAQPTYNNHLYKQISSQSGASNDNHYFGYSTPWGYFDFNRFHCHFSPRDWQRLINNNWGFRPKRLNFKLFNIQVKEVTQNDGTTTIANNLTSTVQVFTDSEYQLPYVLGSAHQGCLPPFPADVFMVPQYGYLTLNNGSQAVGRSSFYCLEYFPSQMLRTGNNFQFSYTFEDVPFHSSYAHSQSLDRLMNPLIDQYLYYLNKTQSNSGALQQSRLLFSQAGPTSMSLQAKNWLPGPCYRQQRLSKQANDNNNSNFPWTAATKYHLNGRDSLVNPGPAMASHKDDEEKFFPMHGTLIFGKQGTNANDADLDNVMITDEEEIRTTNPVATEQYGYVSNNLQNSNTGPTTGTVNHRGALPGMVWQDRDVYLQGPIWAKIPHTDGHFHPSPLMGGFGLKHPPPQIMIKNTPVPANPPTNFSSAKFASFITQYSTGQVSVEIEWELQKENSKRWNPEIQYTSNYNKSVNVDFTVDTNGVYSEPRPIGTRYLTRNL

SEQ ID NO: 473 - DNA, 2217 bp, Adeno-associated virus
atggctgccgatggttatcttccagattggctcgaggacaacctctctgagggcattcgcgagtggtgggcgctgaaacctggagccccgaagcccaaagccaaccagcaaaagcaggacgacggccggggtctggtgcttcctggctacaagtacctcggacccttcaacggactcgacaagggggagcccgtcaacgcggcggacgcagcggccctcgagcacgacaaggcctacgaccagcagctgcaggcgggtgacaatccgtacctgcggtataatcacgccgacgccgagtttcaggagcgtctgcaagaagatacgtcttttgggggcaacctcgggcgagcagtcttccaggccaagaagcgggttctcgaacctctcggtctggttgaggaaggcgctaagacggctcctggaaagaagagaccggtagagccgtcaccacagcgttcccccgactcctccacgggcatcggcaagaaaggccagcagcccgccagaaagagactcaatttcggtcagactggcgactcagagtcagtccccgaccctcaacctatcggagaacctccagcagcgccctctagtgtgggatctggtacaatggctgcaggcggtggcgcgccaatggcagacaataacgaaggtgccgacggagtgggtagttcctcgggaaattggcattgcgattccacatggctgggcgacagagtcatcaccaccagcacccgaacctgggccctgcccacctacaacaaccacctctacaagcaaacctccaacgggacctcgggaggcagcaccaacgacaacacctactttggctacagcaccccctgggggtattttgactttaacagattccactgccacttctcaccacgtgactggcagcgactcatcaacaacaactggggattccggcccaagagactcagcttcaagctcttcaacatccaggtcaaagaggtcacgcagaatgaaggcaccaagaccatcgccaataacctcaccagcaccatccaggtgtttacggactcggaataccagctgccgtacgtcctcggctctgcccaccagggctgcctgcctccgttcccggcggacgtcttcatgattcctcagtacggctacctgactctcaacaacggtagtcaggccgtgggacgttcctccttctactgcctggagtacttcccctctcagatgctgagaacgggcaacaacttttccttcagctacactttcgaggacgtgcctttccacagcagctacgcgcacagccagagtttggacaggctgatgaatcctctcatcgaccagtacctgtactacctgtcaagaacccagtctacgggaggcacagcgggaacccagcagttgctgttttctcaggccgggcctagcaacatgtcggctcaggccagaaactggctgcctggaccctgctacagacagcagcgcgtctccacgacactgtcgcaaaacaacaacagcaactttgcctggactggtgccaccaagtatcatctgaacggcagagactctctggtgaatccgggcgtcgccatggcaaccaacaaggacgacgaggaccgcttcttcccatccagcggcatcctcatgtttggcaagcagggagctggaaaagacaacgtggactatagcaacgtgatgctaaccagcgaggaagaaatcaagaccaccaaccccgtggccacagaacagtatggcgtggtggctgataacctacagcagcaaaacaccgctcctattgtgggggccgtcaacagccagggagccttacctggcatggtctggcagaaccgggacgtgtacctgcagggtcctatttgggccaagattcctcacacagatggcaactttcacccgtctcctttaatgggcggctttggacttaaacatccgcctcctcagatcctcatcaaaaacactcctgttcctgcggatcctccaacagcgttcaaccaggccaagctgaattctttcatcacgcagtacagcaccggacaagtcagcgcggagatcgagtgggagctgcagaaggagaacagcaagcgctggaacccagagattcagtatacttccaactactacaaatctacaaatgtggactttgctgttaatactgagggtgtttactctgagcctcgccccattggcactcgttacctcacccgtaatctgtaa

SEQ ID NO: 474 - protein, 738 aa, Adeno-associated virus
MAADGYLPDWLEDNLSEGIREWWALKPGAPKPKANQQKQDDGRGLVLPGYKYLGPFNGLDKGEPVNAADAAALEHDKAYDQQLQAGDNPYLRYNHADAEFQERLQEDTSFGGNLGRAVFQAKKRVLEPLGLVEEGAKTAPGKKRPVEPSPQRSPDSSTGIGKKGQQPARKRLNFGQTGDSESVPDPQPIGEPPAAPSSVGSGTMAAGGGAPMADNNEGADGVGSSSGNWHCDSTWLGDRVITTSTRTWALPTYNNHLYKQTSNGTSGGSTNDNTYFGYSTPWGYFDFNRFHCHFSPRDWQRLINNNWGFRPKRLSFKLFNIQVKEVTQNEGTKTIANNLTSTIQVFTDSEYQLPYVLGSAHQGCLPPFPADVFMIPQYGYLTLNNGSQAVGRSSFYCLEYFPSQMLRTGNNFSFSYTFEDVPFHSSYAHSQSLDRLMNPLIDQYLYYLSRTQSTGGTAGTQQLLFSQAGPSNMSAQARNWLPGPCYRQQRVSTTLSQNNNSNFAWTGATKYHLNGRDSLVNPGVAMATNKDDEDRFFPSSGILMFGKQGAGKDNVDYSNVMLTSEEEIKTTNPVATEQYGVVADNLQQQNTAPIVGAVNSQGALPGMVWQNRDVYLQGPIWAKIPHTDGNFHPSPLMGGFGLKHPPPQILIKNTPVPADPPTAFNQAKLNSFITQYSTGQVSAEIEWELQKENSKRWNPEIQYTSNYYKSTNVDFAVNTEGVYSEPRPIGTRYLTRNL

SEQ ID NO: 475 - DNA, 2217 bp, Adeno-associated virus
atggctgctgacggttatcttccagattggctcgaggacaacctctctgagggcattcgcgagtggtgggacctgaaacctggagcccccaagcccaaggccaaccagcagaagcaggacgacggccggggtctggtgcttcctggctacaagtacctcggacccttcaacggactcgacaagggggagcccgtcaacgcggcggacgcagcggccctcgagcacgacaaggcctacgaccagcagctcaaagcgggtgacaatccgtacctgcggtataatcacgccgacgccgagtttcaggagcgtctgcaagaagatacgtcttttgggggcaacctcgggcgagcagtcttccaggccaagaagcgggttctcgaacctctcggtctggttgaggaagctgctaagacggctcctggaaagaagagaccggtagaaccgtcacctcagcgttcccccgactcctccacgggcatcggcaagaaaggccagcagcccgctagaaagagactgaactttgggcagactggcgactcagagtcagtccccgaccctcaaccaatcggagaacctccagcagcgccctctagtgtgggatctggtacaatggccgcaggcggtggcgcaccaatggcagacaataacgaaggtgccgacggagtgggtagttcctcgggaaattggcattgcgattccacatggctgggcgacagagtcatcaccaccagcacccgaacctgggccctgcccacctacaacaaccacctctacaagcaaatctccaacgggacctcgggaggcagcaccaacgacaacacctactttggctacagcaccccctgggggtattttgactttaacagattccactgccacttctcaccacgtgactggcagcgactcatcaacaacaactggggattccggcccaagagactcagcttcaagctcttcaacatccaggtcaaagaggtcacgcagaatgaaggcaccaagaccatcgccaataacctcaccagcaccatccaggtgtttacggactcggaataccagctgccgtacgtcctcggctctgcccaccagggctgcctgcctccgttcccggcggacgtcttcatgattcctcagtacggctacctgactctcaacaacggtagtcaggccgtgggacgttcctccttctactgcctggagtacttcccctctcagatgctgagaacgggcaacaacttttccttcagctacactttcgaggacgtgcctttccacagcagctacgcgcacagccagagtttggacaggctgatgaatcctctcatcgaccagtacctgtactacctgtcaagaacccagtctacgggaggcacagcgggaacccagcagctgctgttttctcaggccgggcctagcaacatgtcggctcaggccagaaactggctgcctggaccctgctacagacagcagcgcgtctccacgacactgtcgcaaaacaacaacagcaactttgcctggactggtgccaccaagtatcatctgaacggcagagactctctggtgaatccgggcgtcgccatggcaaccaacaaggacgacgaggaccgcttcttcccatccagcggcatcctcatgtttggcaagcagggagctggaaaagacaacgtggactatagcaacgtgatgctaaccagcgaggaagaaatcaagaccaccaaccccgtggccacagaacagtatggcgtggtggctgataacctacagcagcaaaacaccgctcctattgtgggggccgtcaacagccagggagccttacctggcatggtctggcagaaccgggacgtgtacctgcagggtcctatttgggccaagattcctcacacagatggcaactttcacccgtctcctttaatgggcggctttggacttaaacatccgcctcctcagatcctcatcaaaagcactcctgttcctgcggatcctccaacagcgttcaaccaggccaagctgaattctttcatcacgcagtacagcaccggacaagtcagcgtggagatcgagtgggagctgcagaaggagaacagcaagtgctggaacccagagattcagtatacttccaactactacaaatctacaaatgtggactttgctgttaatactgagggtgtttactctgagcctcgccccattggcactcgttacctcacccgtaatctgtaa

SEQ ID NO: 476 - protein, 738 aa, Adeno-associated virus
MAADGYLPDWLEDNLSEGIREWWDLKPGAPKPKANQQKQDDGRGLVLPGYKYLGPFNGLDKGEPVNAADAAALEHDKAYDQQLKAGDNPYLRYNHADAEFQERLQEDTSFGGNLGRAVFQAKKRVLEPLGLVEEAAKTAPGKKRPVEPSPQRSPDSSTGIGKKGQQPARKRLNFGQTGDSESVPDPQPIGEPPAAPSSVGSGTMAAGGGAPMADNNEGADGVGSSSGNWHCDSTWLGDRVITTSTRTWALPTYNNHLYKQISNGTSGGSTNDNTYFGYSTPWGYFDFNRFHCHFSPRDWQRLINNNWGFRPKRLSFKLFNIQVKEVTQNEGTKTIANNLTSTIQVFTDSEYQLPYVLGSAHQGCLPPFPADVFMIPQYGYLTLNNGSQAVGRSSFYCLEYFPSQMLRTGNNFSFSYTFEDVPFHSSYAHSQSLDRLMNPLIDQYLYYLSRTQSTGGTAGTQQLLFSQAGPSNMSAQARNWLPGPCYRQQRVSTTLSQNNNSNFAWTGATKYHLNGRDSLVNPGVAMATNKDDEDRFFPSSGILMFGKQGAGKDNVDYSNVMLTSEEEIKTTNPVATEQYGVVADNLQQQNTAPIVGAVNSQGALPGMVWQNRDVYLQGPIWAKIPHTDGNFHPSPLMGGFGLKHPPPQILIKSTPVPADPPTAFNQAKLNSFITQYSTGQVSVEIEWELQKENSKCWNPEIQYTSNYYKSTNVDFAVNTEGVYSEPRPIGTRYLTRNL

SEQ ID NO: 477 - protein, 738 aa, Adeno-associated virus
MAADGYLPDWLEDNLSEGIREWWDLKPGAPKPKANQQKQDDGRGLVLPGYKYLGPFNGLDKGEPVNAADAAALEHDKAYDQQLKAGDNPYLRYNHADAEFQERLQEDTSFGGNLGRAVFQAKKRVLEPLGLVEEAAKTAPGKKRPVEPSPQRSPDSSTGIGKKGQQPARKRLNFGQTGDSESVPDPQPIGEPPAAPSSVGSGTMAAGGGAPMADNNEGADGVGSSSGNWHCDSTWLGDRVITTSTRTWALPTYNNHLYKQISNGTSGGSTNDNTYFGYSTPWGYFDFNRFHCHFSPRDWQRLINNNWGFRPKRLSFKLFNIQVKEVTQNEGTKTIANNLTSTIQVFTDSEYQLPYVLGSAHQGCLPPFPADVFMIPQYGYLTLNNGSQAVGRSSFYCLEYFPSQMLRTGNNFSFSYTFEDVPFHSSYAHSQSLDRLMNPLIDQYLYYLSRTQSTGGTAGTQQLLFSQAGPSNMSAQARNWLPGPCYRQQRVSTTLSQNNNSNFAWTGATKYHLNGRDSLVNPGVAMATNKDDEDRFFPSSGILMFGKQGAGKDNVDYSNVMLTSEEEIKTTNPVATEQYGVVADNLQQQNTAPIVGAVNSQGALPGMVWQNRDVYLQGPIWAKIPHTDGNFHPSPLMGGFGLKHPPPQILIKSTPVPADPPTAFNQAKLNSFITQYSTGQVSVEIEWELQKENSKRWNPEIQYTSNYYKSTNVDFAVNTEGVYSEPRPIGTRYLTRNL

SEQ ID NO: 478 - DNA, 2217 bp, Adeno-associated virus
atggctgctgacggttatcttccagattggctcgaggacaacctctctgagggcattcgcgagtggtgggacctgaaacctggagcccccaagcccaaggccaaccagcagaagcaggacgacggccggggtctggtgcttcctggctacaagtacctcggacccttcaacggactcgacaagggggagcccgtcaacgcggcggacgcagcggccctcgagcacgacaaggcctacgaccagcagctcaaagcgggtgacaatccgtacctgcggtataaccacgccgacgccgagtttcaggagcgtctgcaagaagatacgtcttttgggggcaacctcgggcgagcagtcttccaggccaagaagcgggttctcgaacctctcggtctggttgaggaagctgctaagacggctcctggaaagaagagaccggtagaaccgtcacctcagcgttcccccgactcctccacgggcatcggcaagaaaggccagcagcccgctagaaagagactgaactttgggcagactggcgactcagagtcagtccccgaccctcaaccaatcggagaaccaccagcaggcccctctggtctgggatctggtacaatggctgcaggcggtggcgcaccaatggctgacaataacgagggcgccgacggagtgggtaatgcctcaggaaattggcattgcgattccacatggctgggcgacagagtcatcaccaccagcacccgaacctgggctttgcccacctacaacaaccacctctacaagcaaatctccagtcagtcagcaggtagcaccaacgacaacgtctacttcggctacagcaccccctgggggtattttgacttcaacagattccactgtcacttctcaccacgtgactggcagcggctcatcaacaacaactggggattccggcccaagaagctcaacttcaagctgttcaacatccaggtcaaggaggtcacaacgaatgacggcgtcacgaccatcgccaataaccctaccagcacggttcaggtcttttcggactcggaataccagctgccctacgtcctcggctccgcacaccagggctgcctgcctccgttcccggcggacgtcttcatgattccccagtacggctacctgactctgaacaatggcagccaatcggtgggtcgttcctctttctactgcctggaatatttcccttctcaaatgctgagaacgggcaacaacttcaccttcagctacaccttcgaggacgttcccttccacagcagctacgcacacagccagagcctggaccggctgatgaatcctcttatcgaccagtacctgtattacctggccagaacacagagcaacgcaggaggcacagctggcaatcgggaactgcagttttatcagggcgggcctaccaccatggccgaacaagccaaaaactggctgcctggaccctgctacagacagcagcgcgtctccacgacactgtcgcaaaacaacaacagcaactttgcctggactggtgccaccaagtatcatctgaacggcagagactctctggtgaatccgggcgtcgccatggcaaccaacaaggacgacgaggaccgcttcttcccatccagcggcatcctcatgtttggcaagcagggagctggaaaagacaacgtggactatagcaacgtgatgctaaccagcgaggaagaaatcaagaccaccaaccccgtggccacagaacagtatggcgtggtggctgataacctacagcagcaaaacaccgctcctattgtgggggccgtcaacagccagggagccttacctggcatggtctggcagaaccgggacgtgtacctgcagggtcctatttgggccaagattcctcacacagatggcaactttcacccgtctcctttaatgggcggctttggacttaaacatccgcctcctcagatcctcatcaaaaacactcctgttcctgcggatcctccaacagcgttcaaccaggccaagctgaattctttcatcacgcagtacagcaccggacaagtcagcgtggagatcgagtgggagctgcagaaggagaacagcaagcgctggaacccagagattcagtatacttccaactactacaaatctacaaatgtggactttgctgttaatactgagggtgtttactctgagcctcgccccattggcactcgttacctcacccgtaatctgtaa

SEQ ID NO: 479 - protein, 738 aa, Adeno-associated virus
MAADGYLPDWLEDNLSEGIREWWDLKPGAPKPKANQQKQDDGRGLVLPGYKYLGPFNGLDKGEPVNAADAAALEHDKAYDQQLKAGDNPYLRYNHADAEFQERLQEDTSFGGNLGRAVFQAKKRVLEPLGLVEEAAKTAPGKKRPVEPSPQRSPDSSTGIGKKGQQPARKRLNFGQTGDSESVPDPQPIGEPPAGPSGLGSGTMAAGGGAPMADNNEGADGVGNASGNWHCDSTWLGDRVITTSTRTWALPTYNNHLYKQISSQSAGSTNDNVYFGYSTPWGYFDFNRFHCHFSPRDWQRLINNNWGFRPKKLNFKLFNIQVKEVTTNDGVTTIANNPTSTVQVFSDSEYQLPYVLGSAHQGCLPPFPADVFMIPQYGYLTLNNGSQSVGRSSFYCLEYFPSQMLRTGNNFTFSYTFEDVPFHSSYAHSQSLDRLMNPLIDQYLYYLARTQSNAGGTAGNRELQFYQGGPTTMAEQAKNWLPGPCYRQQRVSTTLSQNNNSNFAWTGATKYHLNGRDSLVNPGVAMATNKDDEDRFFPSSGILMFGKQGAGKDNVDYSNVMLTSEEEIKTTNPVATEQYGVVADNLQQQNTAPIVGAVNSQGALPGMVWQNRDVYLQGPIWAKIPHTDGNFHPSPLMGGFGLKHPPPQILIKNTPVPADPPTAFNQAKLNSFITQYSTGQVSVEIEWELQKENSKRWNPEIQYTSNYYKSTNVDFAVNTEGVYSEPRPIGTRYLTRNL

SEQ ID NO: 480 - DNA, 2208 bp, Adeno-associated virus
atggctgccgatggttatcttccagattggctcgaggacaacctctctgagggcattcacgagtggtgggacccgaaacctggagccccgaaacccaaagccaaccagcaaaagcaggacgacggccggggtctggtgcttcctggctacaagtacctcggacccttcaacggactcgacaagggggagcccgtcaacgcggcggacgcagcggccctcgagcacgacaaggcctacgaccagcagctcaaagcgggtgacaatccgtacctgcggtataatcacgccgacgccgagtttcaggagcgtctgcaagaagatacgtcttttgggggcaacctcgggcgagcagtcttccaggccaagaagcgggttctcgaacctctcggtctggttgaggaaggcgctaagacggctcctggaaagaagagaccggtagagccgtcaccacagcgttcccccgactcctccacgggcatcggcaagaaaggccagcagcccgccagaaagagactcaatttcggtcagactggcgactcagagtcagtccccgaccctcaacctatcggagaacctccagcagcgccctctagtgtgggatctggtacaatggctgcaggcggtggcgcaccaatggcagacaataacgaaggtgccgacggagtgggtagttcctcgggaaattggcattgcgattccacatggctgggcgacagagtcatcaccaccagcacccgaacctgggccctgcccacccacaacaaccacctctacaagcaaatctccaacgggacctcgggaggcagcaccaacgacaacgtctacttcggctacagcaccccctgggggtattttgacttcaacagattccactgtcacttctcaccacgtgaccggcagcgactcatcaacaacaactggggattccggcccaagagactcagcttcaagctcttcaacatccaggtcaaagaggtcacgcagaatgaaggcaccaagaccatcgccaataacctcaccagcaccatccaggtgtttacggactcggaataccagctgccgtacgtcctcggctctgcccaccagggctgcctgcctccgttcccggcggacgtcttcatgattcctcagtacggctacctgactctcaacaacggtagtcaggccgtgggacgttcctccttctactgcctggagtacttcccctctcagatgctgagaacgggcaacaacttttccttcagctacactttcgaggacgtgcctttccacagcagctacgcgcacagccagagtttggacaggctgatgaatcctctcatcgaccagtacctgtactacctgtcaagaacccagtctacggaaggcacagcgggaacccagcagttgctgttttctcaggccgggcctagcaacatgtcggctcaggccagaaactggctgcctggaccctgctacagacagcagcgcgtctccacgacactgtcgcaaaacaacaacagcaactttgcctggactggtgccaccaagtatcatctgaacggcagagactctctggtgaatccgggcgtcgccatggcaacccacaaggacgacgaggaacgcttcttcccttcgagcggagtcctgatttttggaaaaactggagcagctaataagactacactggaaaatgtgttaatgacaaatgaagaggaaattcgtcctaccaacccggtagccaccgaggaatacgggactgttagcagcaacctgcaggcggctaacactgcagcccagacacaagttgtcaacaaccagggagccttacctggtatggtctggcagaaccgggacgtgtacctgcagggtcccatctgggccaagattcctcacacggacggcaactttcacccgtctccgctgatgggcggctttggactgaagcatcctcagatcctgatcaaaaacactcctgttcctgctaatcccccggaggtgtttacgcctgccaagtttgcttctttcatcacacagtacagcaccggccaggtcagcgtggagatcgagtgggagctgcagaaggagaacagcaagcgctggaacccagagattcagtatacctccaattttgacaaacagactggtgtggactttgccgttgacagccagggtgtttattctgagcctcgccccattggtactcgttacctcacccgtaatctgtaa

SEQ ID NO: 481 - protein, 735 aa, Adeno-associated virus
MAADGYLPDWLEDNLSEGIHEWWDPKPGAPKPKANQQKQDDGRGLVLPGYKYLGPFNGLDKGEPVNAADAAALEHDKAYDQQLKAGDNPYLRYNHADAEFQERLQEDTSFGGNLGRAVFQAKKRVLEPLGLVEEGAKTAPGKKRPVEPSPQRSPDSSTGIGKKGQQPARKRLNFGQTGDSESVPDPQPIGEPPAAPSSVGSGTMAAGGGAPMADNNEGADGVGSSSGNWHCDSTWLGDRVITTSTRTWALPTHNNHLYKQISNGTSGGSTNDNVYFGYSTPWGYFDFNRFHCHFSPRDRQRLINNNWGFRPKRLSFKLFNIQVKEVTQNEGTKTIANNLTSTIQVFTDSEYQLPYVLGSAHQGCLPPFPADVFMIPQYGYLTLNNGSQAVGRSSFYCLEYFPSQMLRTGNNFSFSYTFEDVPFHSSYAHSQSLDRLMNPLIDQYLYYLSRTQSTEGTAGTQQLLFSQAGPSNMSAQARNWLPGPCYRQQRVSTTLSQNNNSNFAWTGATKYHLNGRDSLVNPGVAMATHKDDEERFFPSSGVLIFGKTGAANKTTLENVLMTNEEEIRPTNPVATEEYGTVSSNLQAANTAAQTQVVNNQGALPGMVWQNRDVYLQGPIWAKIPHTDGNFHPSPLMGGFGLKHPQILIKNTPVPANPPEVFTPAKFASFITQYSTGQVSVEIEWELQKENSKRWNPEIQYTSNFDKQTGVDFAVDSQGVYSEPRPIGTRYLTRNL

SEQ ID NO: 482 - protein, 738 aa, Adeno-associated virus
MAADGYLPDWLEDNLSEGIREWWDLKPGAPKPKANQQKQDDGRGLVLPGYKYLGPFNGLDKGEPVNAADAAALEHDKAYDQQLKAGDNPYLRYNHADAEFQERLQEDTSFGGNLGRAVFQAKKRVLEPLGLVEEGAKTAPGKKRPVEPSPQRSPDSSTGIGKKGQQPARKRLNFGQTGDSESVPDPQPIGEPPAAPSSVGSGTMAAGGGAPMADNNEGADGVGSSSGNWHCDSTWLGDRVITTSTRTWALPTYNNHLYKQISNGTSGGSTNDNTYFGYSTPWGYFDFNRFHCHFSPRDWQRPINNNWGFRPKRLSFKLFNIQVKEVTQNEGTKTIANNLTSTIQVFTDSEYQLPYVLGSAHQGCLPPFPADVFMIPQYGYLTLNNGSQAVGRSSFYCLEYFPSQMLRTGNNFSFSYPFEDVPFHSSYAHSQSLDRLMNPLIDQYLYYLSRTQSTGGTAGTQQLLFSQAGPSNMSAQARNWLPGPCYRQQRVSTTLSQNNNSNFAWTGATKYHLNGRDSLVNPGVAMATNKDDEDRFFPSSGILMFGKQGAGKDNVDYSNVMLTSEEEIKTTNPVATEQYGVVADNLQQQDTAPIVGAVNSQGALPGMVWQNRDVYLQGPIWAKIPHTDGNFHPSPLMGGFGLKHPPPQVLIKNTPVPADPPTAFNQAKLNSFITQYSTGQVSVEIEWELQKENSKRWNPEIQYTSNYYKSTNVDFAVNTEGVYSEPRPIGTRYLTRNL

SEQ ID NO: 483 - DNA, 2217 bp, Adeno-associated virus
atggctgccgatggttatcttccagattggctcgaggacaacctctctgagggcattcgcgagtggtgggacctgaaacctggagccccgaaacccaaggccaaccagcaaaagcaggacgacggccggggtctggtgcttcctggctacaagtacctcggacccttcaacggactcgacaagggggagcccgtcaacgcggcggacgcagcggccctcgagcacgacaaggcctacgaccagcagctcaaagcgggtgacaatccgtacctgcggtataatcacgccgacgccgagtttcaggagcgtctgcaagaagatacgtcttttgggggcaacctcgggcgagcagtcttccaggccaagaagcgggttctcgaacctctcggtctggttgaggaaggcgctaagacggctcctggaaagaagagaccggtagagccgtcaccacagcgttcccccgactcctccacgggcatcggcaagaaaggccagcagcccgccagaaagagactcaatttcggtcagactggcgactcagagtcagtccccgaccctcaacctatcggagaacctccagcagcgccctctagtgtgggatctggtacaatggctgcaggcggtggcgcaccaatggcagacaataacgaaggtgccgacggagtgggtagttcctcgggaaattggcattgcgattccacatggctgggcgacagagtcatcaccaccagcacccgaacctgggccctgcccacctacaacaaccacctctacaagcaaatctccaacgggacctcgggaggcagcaccaacgacaacacctactttggctacagcaccccctgggggtattttgactttaacagattccactgccacttctcaccacgtgactggcagcgacccatcaacaacaactggggattccggcccaagagactcagcttcaagctcttcaacatccaggtcaaagaggtcacgcagaatgaaggcaccaagaccatcgccaataacctcaccagcaccatccaggtgtttacggactcggaataccagctgccgtacgtcctcggctctgcccaccagggctgcctgcctccgttcccggcggacgtcttcatgattcctcagtacggctacctgactctcaacaacggtagtcaggccgtgggacgttcctccttctactgcctggagtacttcccctctcagatgctgagaacgggcaacaacttttccttcagctaccctttcgaggacgtgcctttccacagcagctacgcgcacagccagagtttggacaggctgatgaatcctctcatcgaccagtacctgtactacctgtcaagaacccagtctacgggaggcacagcgggaacccagcagttgctgttttctcaggccgggcctagcaacatgtcggctcaggccagaaactggctgcctggaccctgctacagacagcagcgcgtctccacgacactgtcgcaaaacaacaacagcaactttgcctggactggtgccaccaagtatcatctgaacggcagagactctctggtgaatccgggcgtcgccatggcaaccaacaaggacgacgaggaccgcttcttcccatccagcggcatcctcatgtttggcaagcagggagctggaaaagacaacgtggactatagcaacgtgatgctaaccagcgaggaagaaatcaagaccaccaaccccgtggccacagaacagtatggcgtggtggctgataacctacagcagcaagacaccgctcctattgtgggggccgtcaacagccagggagccttacctggcatggtctggcagaaccgggacgtgtacctgcagggtcctatttgggccaagattcctcacacagatggcaactttcacccgtctcctttaatgggcggctttggacttaaacatccgcctcctcaggtcctcatcaaaaacactcctgttcctgcggatcctccaacagcgttcaaccaggccaagctgaattctttcatcacgcagtacagcaccggacaagtcagcgtggagatcgagtgggagctgcagaaggagaacagcaagcgctggaacccagagattcagtatacttccaactactacaaatctacaaatgtggactttgctgttaatactgagggtgtttactctgagcctcgccccattggcactcgttacctcacccgtaatctgtaa

SEQ ID NO: 484 - DNA, 2214 bp, Adeno-associated virus
atggctgctgacggttatcttccagattggctcgaggacaacctctctgagggcattcgcgagtggtgggacctgaaacctggagcccccaagcccaaggccaaccagcagaagcaggacgacggccggggtctggtgcttcctggctacaagtacctcggacccttcaacggactcgacaagggggagcccgtcaacgcggcggacgcagcggccctcgagcacgacaaggcctacgaccagcagctcaaagcgggtgacaatccgtacctgcggtataaccacgccgacgccgagttccaggagcgtctgcaagaagatacgtcttttgggggcaacctcgggcgagcagtcttccaggccaagaagcgggttctcgaacctctcggtctggctgaggaagctgctaagacggctcctggaaagaagagaccggtagaaccgtcacctcagcgttcccccgactcctccacgggcatcggcaagaaaggccagcagcccgctagaaagagactgaactttgggcagactggcgactcagagtcagtccccgaccctcaaccaatcggagagccaccagcaggcccctctggtctgggatctggtacaatggctgcaggcggtggcgcaccaatggctgacaataacaagggcgccgacggagtgggtaatgcctcaggaaattggcattgcgattccacatggctgggcgacagagtcatcaccaccagcacccgaacctgggctttgcccacctacaacaaccacctctacaagcaaatctccagtcagtcagcaggtagcaccaacgacaacgtctacttcggctacagcaccccctgggggtattttgacttcaacagattccactgtcacttctcaccacgtgactggcagcggctcatcaacaacaactggggattccggcccaagaagctcaacttcaagctgttcaacatccaggtcaaggaggtcacaacgggtgacggcgtcacgaccatcgccaataaccttaccagcacggttcaggtcttttcggactcggaataccagctgccctacgtcctcggctccgcacaccagggctgcctgcctccgttcccggcggacgtcttcatgattccccagtacggctacctgactctgaacaatgacagccaatcggtgggtcgttcctctttctactgcctggaatatttcccttctcaaatgctgagaacgggcaacaacttcaccttcagctacaccttcgaggacgttcccttccacagcagctacgcacacagccagagcctggaccggctgatgaatcctcttatcgaccagtacctgtattacctggccagaacacagagcaacgcaggaggcacagctggcaatcgggaactgcagttttatcagggcgggcctaccaccatggccgaacaagccaaaaactggctgcctggaccttgcttccggcaacaaagagtctccaagacgctggatcaaaacaacaacagcaactttgcttggactggtgccaccaaataccatctaaatggaagaaattcattggttaatcccggtgtcgccatggcaacccacaaggacgacgaggaacgcttcttcccttcgagcggagtcctgatttttggaaaaactggagcagctaataagactacactggaaaatgtgttaatgacaaatgaagaggaaattcgtcctaccaacccggtagccaccgaggaatacgggactgttagcagcaacctgcaggcggctaacactgcagcccagacacaagttgtcaacaaccagggagccttacctggtatggtctggcagaaccgggacgtgtacctgcagggtcccatctgggccaagattcctcacacggacggcaactttcacccgtctccgctgatgggcggctttggactgaagcatccgcctcctcagatcctgatcaaaaacactcctgttcctgctaatcccccggaggtgtttacgcctgccaagtttgcttctttcatcacacagtacagcaccggccaggtcagcgtggagatcgagtgggagctgcagaaggagaacagcaagcgctggaacccagagattcagtatacctccaattttgacaaacagactggtgtggactttgccgttgacagccagggtgtttattctgagcctcgccccattggtactcgttacctcacccgtaatctgtaa

SEQ ID NO: 485 - protein, 737 aa, Adeno-associated virus
MAADGYLPDWLEDNLSEGIREWWDLKPGAPKPKANQQKQDDGRGLVLPGYKYLGPFNGLDKGEPVNAADAAALEHDKAYDQQLKAGDNPYLRYNHADAEFQERLQEDTSFGGNLGRAVFQAKKRVLEPLGLAEEAAKTAPGKKRPVEPSPQRSPDSSTGIGKKGQQPARKRLNFGQTGDSESVPDPQPIGEPPAGPSGLGSGTMAAGGGAPMADNNKGADGVGNASGNWHCDSTWLGDRVITTSTRTWALPTYNNHLYKQISSQSAGSTNDNVYFGYSTPWGYFDFNRFHCHFSPRDWQRLINNNWGFRPKKLNFKLFNIQVKEVTTGDGVTTIANNLTSTVQVFSDSEYQLPYVLGSAHQGCLPPFPADVFMIPQYGYLTLNNDSQSVGRSSFYCLEYFPSQMLRTGNNFTFSYTFEDVPFHSSYAHSQSLDRLMNPLIDQYLYYLARTQSNAGGTAGNRELQFYQGGPTTMAEQAKNWLPGPCFRQQRVSKTLDQNNNSNFAWTGATKYHLNGRNSLVNPGVAMATHKDDEERFFPSSGVLIFGKTGAANKTTLENVLMTNEEEIRPTNPVATEEYGTVSSNLQAANTAAQTQVVNNQGALPGMVWQNRDVYLQGPIWAKIPHTDGNFHPSPLMGGFGLKHPPPQILIKNTPVPANPPEVFTPAKFASFITQYSTGQVSVEIEWELQKENSKRWNPEIQYTSNFDKQTGVDFAVDSQGVYSEPRPIGTRYLTRNL

SEQ ID NO: 486 - DNA, 2217 bp, Adeno-associated virus
atggctgccgatggttatcttccagattggctcgaggacaacctctctgagggcattcgcgagtggtgggacctgaaacctggagccccgaaacccaaagccaaccagcaaaagcaggacgacggccggggtctggtgcttcctggctacaagtacctcggacccttcaacggactcgacaagggggagcccgtcaacgcggcggacgcagcggccctcgagcacgacaaggcctacgaccagcagctcaaagcgggtgacaatccgtacctgcggtataatcacgccgacgccgagtttcaggagcgtctgcaagaagatacgtcttttgggggcaacctcgggcgagcagtcttccaggccaagaagcgggttctcgaacctctcggtctggttgaggaaggcgctaagacggctcctggaaagaagagaccggtagagccgtcaccacagcgttcccccgactcctccacgggcatcggcaagaaaggccagcagcccgccagaaagagactcaatttcggtcagactggcgactcagagtcagtccccgaccctcaacctatcggagaacctccagcagcgccctctagtgtgggatctggtacaatggctgcaggcggtggcgcaccaatggcagacaataacgaaggtgccgacggagtgggtagttcctcgggaaattggcattgcgattccacatggctgggcgacagagtcatcaccaccagcacccgaacctgggccctgcccacctacaacaaccacctctacaagcaaatctccaacgggacctcgggaggcagcaccaacgacaacacctactttggctacagcaccccctgggggtattttgactttaacagattccactgccacttctcaccacgtgactggcagcgactcatcaacaacaactggggattccggcccaagagactcagcttcaagctcttcaacatccaggtcaaagaggtcacgcagaatgaaggcaccaagaccatcgccaataacctcaccagcaccatccaggtgtttacggactcggaataccagctgccgtacgtcctcggctctgcccaccagggctgcctgcctccgttcccggcggacgtcttcatgattcctcagtacggctacctgactctcaacaacggtagtcaggccgtgggacgttcctccttctactgcctggagtacttcccctctcagatgctgagaacgggcaacaacttttccttcagctacactttcgaggacgtgcctttccacagcagctacgcgcacagccagagtttggacaggctgatgaatcctctcatcgaccagtacctgtactacctgtcaagaacccagtctacgggaggcacagcgggaacccagcagttgctgttttctcaggccgggcctagcaacatgtcggctcaggccagaaactggctgcctggaccctgctacagacagcagcgcgtctccacgacactgtcgcaaaacaacaacagcaactttgcctggactggtgccaccaagtatcatctgaacggcagagactctctggtgaatccgggcgtcgccatggcaaccaacaaggacgacgaggaccgcttcttcccatccagcggcatcctcatgtttggcaagcagggagctggaaaagacaacgtggactatagcaacgtgatgctaaccagcgaggaagaaatcaagaccaccaaccccgtggccacagaacagtatggcgtggtggctgataacctacagcagcaaaacaccgctcctattgtgggggccgtcaacagccagggagccttacctggcatggtctggcagaaccgggacgtgtacctgcagggtcctatttgggccaagattcctcacacagatggcaactttcacccgtctcctttaatgggcggctttggacttaaacatccgcctcctcagatcctcatcaaaaacactcctgttcctgcggatcctccaacagcgttcaaccaggccaagctgaattctttcatcacgcagtacagcaccggacaagtcagcgtggagatcgtgtgggagctgcagaaggagaacagcaagcgcaggaacccagagattcagtatacttccaactactacaaatctacaaatgtggactttgctgttaatactgagggtgtttactctgagcctcgccccattggcactcgttacctcacccgtaatctgtaa

SEQ ID NO: 487 - protein, 738 aa, Adeno-associated virus
MAADGYLPDWLEDNLSEGIREWWDLKPGAPKPKANQQKQDDGRGLVLPGYKYLGPFNGLDKGEPVNAADAAALEHDKAYDQQLKAGDNPYLRYNHADAEFQERLQEDTSFGGNLGRAVFQAKKRVLEPLGLVEEGAKTAPGKKRPVEPSPQRSPDSSTGIGKKGQQPARKRLNFGQTGDSESVPDPQPIGEPPAAPSSVGSGTMAAGGGAPMADNNEGADGVGSSSGNWHCDSTWLGDRVITTSTRTWALPTYNNHLYKQISNGTSGGSTNDNTYFGYSTPWGYFDFNRFHCHFSPRDWQRLINNNWGFRPKRLSFKLFNIQVKEVTQNEGTKTIANNLTSTIQVFTDSEYQLPYVLGSAHQGCLPPFPADVFMIPQYGYLTLNNGSQAVGRSSFYCLEYFPSQMLRTGNNFSFSYTFEDVPFHSSYAHSQSLDRLMNPLIDQYLYYLSRTQSTGGTAGTQQLLFSQAGPSNMSAQARNWLPGPCYRQQRVSTTLSQNNNSNFAWTGATKYHLNGRDSLVNPGVAMATNKDDEDRFFPSSGILMFGKQGAGKDNVDYSNVMLTSEEEIKTTNPVATEQYGVVADNLQQQNTAPIVGAVNSQGALPGMVWQNRDVYLQGPIWAKIPHTDGNFHPSPLMGGFGLKHPPPQILIKNTPVPADPPTAFNQAKLNSFITQYSTGQVSVEIVWELQKENSKRRNPEIQYTSNYYKSTNVDFAVNTEGVYSEPRPIGTRYLTRNL

SEQ ID NO: 488 - protein, 738 aa, Adeno-associated virus
MAADGYLPDWLEDNLSEGIREWWDLKPGAPKPKANQQKQDDGRGLVLPGYKYLGPFNGLDKGEPVNAADAAALEHDKAYDQQLKAGDNPYLRYNHADAEFQERLQEDTSFGGNLGRAVFQAKKRVLEPLGLVEEGAKTAPGKKRPVEPSPQRSPDSSTGIGKKGQQPARKRLNFGQTGDSESVPDPQPIGEPPAAPSSVGSGTMAAGGGAPMADNNEGADGVGSSSGNWHCDSTWLGDRVITTSTRTWALPTYNNHLYKQISNGTSGGSTNDNTYFGYSTPWGYFDFNRFHCHFSPRDWQRLINNNWGFRPKRLSFKLFNIQVKEVTQNEGTKTIANNLTSTIQVFTDSEYQLPYVLGSAHQGCLPPFPADVFMIPQYGYLTLNNGSQAVGRSSFYCLEYFPSQMLRTGNNFSFSYTFEDVPFHSSYAHSQSLDRLMNPLIDQYLYYLSRTQSTGGTAGTQQLLFSQAGPSNMSAQARNWLPGPCYRQQRVSTTLSQNNNSNFAWTGATKYHLNGRDSLVNPGVAMATNKDDEDRFFPSSGILMFGKQGAGKDNVDYSNVMLTSEEEIKTTNPVATEQYGVVADNLQQQNTAPIVGAVNSQGALPGMVWQNRDVYLQGPIWAKIPHTDGNFHPSPLMGGFGLKHPPPQILIKNTPVPADPPTAFNQAKLNSFITQYSTGQVSVEIEWELQKENSKRWNPEIQYTSNYYKSTNVDFAVNTEGVYSEPRPIGTRYLTRNL

SEQ ID NO: 489 - protein, 738 aa, Adeno-associated virus
MAADGYLPDWLEDNLSEGIREWWDLKPGAPKPKANQQKQDDGRGLVLPGYKYLGPFNGLDKGEPVNAADAAALEHDKAYDQQLKAGDNPYLRYNHADAEFQERLQEDTSFGGNLGRAVFQAKKRVLEPLGLVEEGAKTAPGKKRPVEPSPQRSPDSSTGIGKKGQQPARKRLNFGQTGDSESVPDPQPIGEPPAAPSSVGSGTMAAGGGAPMADNNEGADGVGSSSGNWHCDSTWLGDRVITTSTRTWALPTYNNHLYKQISNGTSGGSTNDNTYFGYSTPWGYFDFNRFHCHFSPRDWQRLINNNWGFRPKRLSFKLFNIQVKEVTQNEGTKTIANNLTSTIQVFTDSEYQLPYVLGSAHQGCLPPFPADVFMIPQYGYLTLNNGSQAVGRSSFYCLEYFPSQMLRTGNNFSFSYTFEDVPFHSSYAHSQSLDRLMNPLIDQYLYYLSRTQSTGGTAGTQQLLFSQAGPSNMSAQARNWLPGPCYRQQRVSTTLSQNNNSNFAWTGATKYHLNGRDSLVNPGVAMATNKDDEDRFFPSSGILMFGKQGAGKDNVDYSNVMLTSEEEIKTTNPVATEQYGVVADNLQQQNTAPIVGAVNSQGALPGMVWQNRDVYLQGPIWAKIPHTDGNFHPSPLMGGFGLKHPPPQILIKNTPVPADPPTAFNQAKLNSFITQYSTGQVSVEIVWELQKENSKRWNPEIQYTSNYYKSTNVDFAVNTEGVYSEPRPIGTRYLTRNL

SEQ ID NO: 490 - protein, 738 aa, Adeno-associated virus; identical to SEQ ID NO: 488

SEQ ID NO: 491 - DNA, 2214 bp, Adeno-associated virus
atggctgctgacggttatcttccagattggctcgaggacaacctctctgagggcattcgcgagtggtgggacctgaaacctggagcccccaagcccaaggccaaccagcagaagcaggacgacggccggggtctggtgcttcctggctacaagtacctcggacccttcaacggactcgacaagggggagcccgtcaacgcggcggacgcagcggccctcgagcacgacaaggcctacgaccagcagctcaaagcgggtgacaatccgtacctgcggtataaccacgccgacgccgagtttcaggagcgtctgcaagaagatacgtcttttgggggcaacctcgggcgagcagtcttccaggccaagaagcgggttctcgaacctctcggtctggttgaggaagctgctaagacggctcctggaaagaagagaccggtagaaccgtcacctcagcgttcccccgactcctccacgggcatcggcaagaaaggccagcagcccgctagaaagagactgaactttgggcagactggcgactcagagtcagtccccgaccctcaaccaatcggagaaccaccagcaggcccctctggtctgggatctggtacaatggctgcaggcggtggcgctccaatggcagacaataacgaaggcgccgacggagtgggtaatgcctcaggaaattggcattgcgattccacatggctgggcgacagagtcatcaccaccagcacccgaacctgggctttgcccacctacaacaaccacctctacaagcaaatctccagtcagtcagcaggtagcaccaacgacaacgtctacttcggctacagcaccccctgggggtattttgacttcaacagattccactgtcacttctcaccacgtgactggcagcggctcatcaacaacaactggggattccggcccaagaagctcaacttcaagctgttcaacatccaggtcaaggaggtcacaacgaatgacggcgtcacgaccatcgccaataaccttaccagcacggttcaggtcttttcggactcggaataccagctgccctacgtcctcggctccgcacaccagggctgcctgcctccgttcccggcggacgtcttcatgattccccagtacggctacctgactctgaacaatggcagccaatcggtgggtcgttcctctttctactgcctggaatatttcccttctcaaatgctgagaacgggcaacaacttcaccttcagctacaccttcgaggacgttcccttccacagcagctacgcacacagccagagcctggaccggctgatgaatcctcttatcgaccagtacctgtattacctggccagaacacagagcaacgcaggaggcacagctggcaatcgggaactgcagttttatcagggcgggcctaccaccatggccgaacaagccaaaaactggctgcctagaccttgcttccggcaacaaagagtctccaagacgctggatcaaaacaacaacagcaactttgcttggactggtgccaccaaataccatctaaatggaagaaattcattggttaatcccggtgtcgccatggcaacccacaaggacgacgaggaacgcttcttcccttcgagcggagtcctgatttttggaaaaactggagcagctaataagactacactggaaaatgtgttaatgacaaatgaagaggaaattcgtcctaccaacccggtagccaccgaggaatacgggactgttagcagcaacctgcaggcggctaacactgcagcccagacacaagttgtcaacaaccagggagccttacctggtatggtctggcagaaccgggacgtgtacctgcagggtcccatctgggccaagattcctcacacggacggcaactttcacccgtctccgctgatgggcggctttggactgaagcatccgcctcctcagatcctgatcaaaaacactcctgttcctgctaatcccccggaggtgtttacgcctgccaagtttgcttctttcatcacacagtacagcaccggccaggtcagcgtggagatcgagtgggagctgcagaaggagaacagcaagcgctggaacccagagattcagtatacctccaattttgacaaacagactggtgtggactttgccgttgacagccagggtgtttattctgagcctcgccccattggtactcgttacctcacccgtaatctgtaa

SEQ ID NO: 492 - protein, 737 aa, Adeno-associated virus
MAADGYLPDWLEDNLSEGIREWWDLKPGAPKPKANQQKQDDGRGLVLPGYKYLGPFNGLDKGEPVNAADAAALEHDKAYDQQLKAGDNPYLRYNHADAEFQERLQEDTSFGGNLGRAVFQAKKRVLEPLGLVEEAAKTAPGKKRPVEPSPQRSPDSSTGIGKKGQQPARKRLNFGQTGDSESVPDPQPIGEPPAGPSGLGSGTMAAGGGAPMADNNEGADGVGNASGNWHCDSTWLGDRVITTSTRTWALPTYNNHLYKQISSQSAGSTNDNVYFGYSTPWGYFDFNRFHCHFSPRDWQRLINNNWGFRPKKLNFKLFNIQVKEVTTNDGVTTIANNLTSTVQVFSDSEYQLPYVLGSAHQGCLPPFPADVFMIPQYGYLTLNNGSQSVGRSSFYCLEYFPSQMLRTGNNFTFSYTFEDVPFHSSYAHSQSLDRLMNPLIDQYLYYLARTQSNAGGTAGNRELQFYQGGPTTMAEQAKNWLPRPCFRQQRVSKTLDQNNNSNFAWTGATKYHLNGRNSLVNPGVAMATHKDDEERFFPSSGVLIFGKTGAANKTTLENVLMTNEEEIRPTNPVATEEYGTVSSNLQAANTAAQTQVVNNQGALPGMVWQNRDVYLQGPIWAKIPHTDGNFHPSPLMGGFGLKHPPPQILIKNTPVPANPPEVFTPAKFASFITQYSTGQVSVEIEWELQKENSKRWNPEIQYTSNFDKQTGVDFAVDSQGVYSEPRPIGTRYLTRNL

SEQ ID NO: 493 - DNA, 2214 bp, Adeno-associated virus
atggctgctgacggttatcttccagattggctcgaggacaacctctctgagggcattcgcgagtggtgggacctgaaacctggagcccccaagcccaaggccaaccagcagaagcaggacgacggccggggtctggtgcttcctggctacaagtacctcggacccttcaacggactcgacaagggggagcccgtcaacgcggcggacgcagcggccctcgagcacgacaaggcctacgaccagcagctcaaagcgggtgacaatccgtacctgcggtataaccatgccgacgccgagtttcaggagcgtctgcaagaagatacgtcttttgggggcaacctcgggcgagcagtcctccaggccaagaagcgggttctcgaacctctcggtctggttgaggaagctgctaagacggctcctggaaagaagagaccggtagaaccgtcacctcagcgttcccccgactcctccacgggcatcggcaagaaaggccagcagcccgctagaaagagactgaactttgggcagactggcgactcagagtcagtccccgaccctcaaccaatcggagaaccaccagcaggcccctctggtctgggatctggtacaatggctgcaggcggtggcgctccaatggcagacaataacgaaggcgccgacggagtgggtaatgcctcaggaaattggcattgcgattccacatggctgggcgacagagtcatcaccaccagcacccgaacctgggctttgcccacctacaacaaccacctctacaagcaaatctccagtcagtcagcaggtagcaccaacgacaacgtctacttcggctacagcaccccctgggggtattttgacttcaacagattccactgtcacttctcaccacgtgactggcagcggctcatcaacaacaactggggattccggcccaagaagctcaacttcaagctgttcaacatccaggtcaaggaggtcacaacgaatgacggcgtcacgaccatcgccaataaccttaccagcacggttcaggtcttttcggactcggaataccagctgccctacgtcctcggctccgcacaccagggctgcctgcctccgttcccggcggacgtcttcatgattccccagtacggctacctgactctgaacaatggcagccaatcggtgggtcgttcctctttctactgcctggaatatttcccttctcaaatgctgagaacgggcaacaacttcaccttcagctacaccttcgaggacgttcccttccacagcagctacgcacacagccagagcctggaccggctgatgaatcctcttatcgaccagtacctgtattacctggccagaacacagagcaacgcaggaggcacagctggcaatcgggaactgcagttttatcagggcgggcctaccaccatggccgaacaagccaaaaactggctgcctggaccttgcttccggcaacaaagagtctccaagacgctggatcaaaacaacaacagcaactttgcttggactggtgccaccaaataccatctaaatggaagaaattcattggttaatcccggtgtcgccatggcaacccacaaggacgacgaggaacgcttcttcccttcgagcggagtcctgatttttggaaaaactggagcagctaataagactacactggaaaatgtgttaatgacaaatgaagaggaaattcgtcctaccaacccggtagccaccgaggaatacgggactgttagcagcaacctgcaggcggctaacactgcagcccagacacaagttgtcaacaaccagggagccttacctggtatggtctggcagaaccgggacgtgtacctgcagggtcccatctgggccaagattcctcacacggacggcaactttcacccgtctccgctgatgggcggctttggactgaagcatccgcctcctcagatcctgatcaaaaacactcctgttcctgctaatcccccggaggtgtttacgcctgccaagtttgcttctttcatcacacagtacagcaccggccaggtcagcgtggagatcgagtgggagctgcagaaggagaacagcaagcgctggaacccagagattcagtatacctccaattttgacaaacagactggtgtggactttgccgttgacagccagggtgtttattctgagcctcgccccattggtactcgttacctcacccgtaatctgtaa

SEQ ID NO: 494 - protein, 737 aa, Adeno-associated virus; identical to SEQ ID NO: 453

SEQ ID NO: 495 - protein, 737 aa, Adeno-associated virus
MAADGYLPDWLEDNLSEGIREWWDLKPGAPKPKANQQKQDDGRGLVLPGYKYLGPFNGLDKGEPVNAADAAALEHDKAYDQQLKAGDNPYLRYNHADAEFQERLQEDTSFGGNLGRAVLQAKKRVLEPLGLVEEAAKTAPGKKRPVEPSPQRSPDSSTGIGKKGQQPARKRLNFGQTGDSESVPDPQPIGEPPAGPSGLGSGTMAAGGGAPMADNNEGADGVGNASGNWHCDSTWLGDRVITTSTRTWALPTYNNHLYKQISSQSAGSTNDNVYFGYSTPWGYFDFNRFHCHFSPRDWQRLINNNWGFRPKKLNFKLFNIQVKEVTTNDGVTTIANNLTSTVQVFSDSEYQLPYVLGSAHQGCLPPFPADVFMIPQYGYLTLNNGSQSVGRSSFYCLEYFPSQMLRTGNNFTFSYTFEDVPFHSSYAHSQSLDRLMNPLIDQYLYYLARTQSNAGGTAGNRELQFYQGGPTTMAEQAKNWLPGPCFRQQRVSKTLDQNNNSNFAWTGATKYHLNGRNSLVNPGVAMATHKDDEERFFPSSGVLIFGKTGAANKTTLENVLMTNEEEIRPTNPVATEEYGTVSSNLQAANTAAQTQVVNNQGALPGMVWQNRDVYLQGPIWAKIPHTDGNFHPSPLMGGFGLKHPPPQILIKNTPVPANPPEVFTPAKFASFITQYSTGQVSVEIEWELQKENSKRWNPEIQYTSNFDKQTGVDFAVDSQGVYSEPRPIGTRYLTRNL

SEQ ID NO: 496 - DNA, 2217 bp, Adeno-associated virus
atggctgccgatggttatcttccagattggctcgaggacaacctctctgagggcattcgcgagtggtgggacctgaaacctggagccccgaaacccaaagccaaccagcaaaagcaggacgacggccggggtctggtgcttcctggctacaagtacctcggacccttcaacggactcgacaagggggagcccgtcaacgcggcggacgcagcggccctcgagcacgacaaggcctacgaccagcagctcaaagcgggtgacaatccgtacctgcggtataatcacgccgacgccgagtttcaggagcgtctgcaagaagatacgtcttttgggggcaacctcgggcgagcagtcttccaggccaagaagcgggttctcgaacctctcggtctggttgaggaaggcgctaagacggctcctggaaagaagagaccggtagagccgtcaccacagcgttcccccgactcctccacgggcatcggcaagaaaggccagcagcccgccagaaagagactcaatttcggtcagactggcgactcagagtcagtccccgaccctcaacctatcggagaacctccagcagcgccctctagtgtgggatctggtacaatggctgcaggcggtggcgcaccaatggcagacaataacgaaggtgccgacggagtgggtagttcctcgggaaattggcattgcgattccacatggctgggcgacagagtcatcaccaccagcacccgaacctgggccctgcccacctacaacaaccacctctacaagcaaatctccaacgggacctcgggaggcagcaccaacgacaacacctactttggctacagcaccccctgggggtattttgactttaacagattccactgccacttctcaccacgtgactggcagcgactcatcaacaacaactggggattccggcccaagagactcagcttcaagctcttcaacatccaggtcaaagaggtcacgcagaatgaaggcaccaagaccatcgccaataacctcaccagcaccatccaggtgtttacggactcggaataccagctgccgtacgtcctcggctctgcccaccagggctgcctgcctccgttcccggcggacgtcttcatgattcctcagtacggctacctgactctcaacaacggtagtcaggccgtgggacgttcctccttctactgcctggagtacttcccctctcagatgctgagaacgggcaacaacttttccttcagctacactttcgaggacgtgcctttccacagcagctacgcgcacagccagagtttggacaggctgatgaatcctctcatcgaccagtacctgtactacctgtcaagaacccagtctacgggaggcacagcgggaacccagcagttgctgttttctcaggccgggcctagcaacatgtcggctcaggccagaaactggctgcctggaccctgctacagacagcagcgcgtctccacgacactgtcgcaaaacaacaacagcaactttgcctggactggtgccaccaagtatcatctgaacggcagagactctctggtgaatccgggcgtcgccatggcaaccaacaaggacgacgaggaccgcttcttcccacccagcggcatcctcatgtttggcaagcagggagctggaaaagacaacgtggactatagcaacgtgatgctaaccagcgaggaagaaatcaagaccaccaaccccgtggccacagaacagtatggcgtggtggctgataacctacagcagcaaaacaccgctcctattgtgggggccgtcaacagccagggagccttacctggcatggtctggcagaaccgggacgtgtacctgcagggtcctatttgggccaagattcctcacacagatggcaactttcacccgtctcctttaatgggcggctttggacttaaacatccgcctcctcagatcctcatcaaaaacactcctgttcctgcggatcctccaacagcgttcaaccaggccaagctgaattctttcatcacgcagtacagcaccggacaagtcagcgtggtgatcgagtgggagctgcagaaggagaacagcaagcgctggaacccagagattcagtatacttccaactactacaaatctacaaatgtggactttgctgttaatactgagggtgtttactctgagcttcgccccattggcactcgttacctcacccgtaatctgtaa

SEQ ID NO: 497 - protein, 738 aa, Adeno-associated virus
MAADGYLPDWLEDNLSEGIREWWDLKPGAPKPKANQQKQDDGRGLVLPGYKYLGPFNGLDKGEPVNAADAAALEHDKAYDQQLKAGDNPYLRYNHADAEFQERLQEDTSFGGNLGRAVFQAKKRVLEPLGLVEEGAKTAPGKKRPVEPSPQRSPDSSTGIGKKGQQPARKRLNFGQTGDSESVPDPQPIGEPPAAPSSVGSGTMAAGGGAPMADNNEGADGVGSSSGNWHCDSTWLGDRVITTSTRTWALPTYNNHLYKQISNGTSGGSTNDNTYFGYSTPWGYFDFNRFHCHFSPRDWQRLINNNWGFRPKRLSFKLFNIQVKEVTQNEGTKTIANNLTSTIQVFTDSEYQLPYVLGSAHQGCLPPFPADVFMIPQYGYLTLNNGSQAVGRSSFYCLEYFPSQMLRTGNNFSFSYTFEDVPFHSSYAHSQSLDRLMNPLIDQYLYYLSRTQSTGGTAGTQQLLFSQAGPSNMSAQARNWLPGPCYRQQRVSTTLSQNNNSNFAWTGATKYHLNGRDSLVNPGVAMATNKDDEDRFFPPSGILMFGKQGAGKDNVDYSNVMLTSEEEIKTTNPVATEQYGVVADNLQQQNTAPIVGAVNSQGALPGMVWQNRDVYLQGPIWAKIPHTDGNFHPSPLMGGFGLKHPPPQILIKNTPVPADPPTAFNQAKLNSFITQYSTGQVSVVIEWELQKENSKRWNPEIQYTSNYYKSTNVDFAVNTEGVYSELRPIGTRYLTRNL

SEQ ID NO: 498 - DNA, 2214 bp, Adeno-associated virus
atggctgctgacggttatcttccagattggctcgaggacaacctctctgagggcattcgcgagtggtgggacctgaaacctggagcccccaagcccaaggccaaccagcagaagcaggacgacggccggggtctggtgcttcctggctacaagtacctcggacccttcaacggactcgacaagggggagcccgtcaacgcggcggacgcagcggccctcgagcacgacaaggcctacgaccagcagctcaaagcgggtgacaatccgtacctgcggtataaccacgccgacgccgagtttcaggagcgtctgcaagaagatacgtcttttgggggcaacctcgggcgagcagtcttccaggccaagaagcgggttctcgaacctctcggtctggttgaggaagctgctaagacggctcctggaaagaagagaccggtagaaccgtcacctcagcgttcccccgactcctccacgggcatcggcaagaaaggccagcagcccgctagaaagagactgaactttgggcagactggcgactcagagtcagtccccgaccctcaaccaatcggagaaccaccagcaggcccctctggtctgggatctggtacaatggctgcaggcggtggcgccccaatggcagacaataacgaaggcgccgacggagtgggtaatgcctcaggaaattggcattgcgattccacatggctgggcgacagagtcatcaccaccagcacccgaacctgggctttgcccacctacaacaaccacctctacaagcaaatctccagtcagtcagcaggtagcaccaacgacaacgtctacttcggctacagcaccccctgggggtattttgacttcaacagattccactgtcacttctcaccacgtgactggcagcggctcatcaacaacaactggggattccggcccaagaagctcaacttcaagctgttcaacatccaggtcaaggaggtcacaacgaatgacggcgtcacgaccatcgccaataaccttaccagcacggttcaggtcttttcggactcggaataccagctgccctacgtcctcggctccgcacaccagggctgcctgcctccgttcccggcggacgtcttcatgattccccagtacggctacctgactctgaacaatggcagccaatcggtgggtcgttcctctttctactgcctggaatatttcccttctcaaatgctgagaacgggcaacaacttcaccatcagctacaccttcgaggacgttcccttccacagcagctacgcacacagccagagcctggaccggctgatgaatcctcttatcgaccagtacctgtattacctggccagaacacagagcaacgcaggaggcacagctggcaatcaggaactgcagttttatcagggcgggcctaccaccatggccgaacaagccaaaaactggctgcctggaccttgcttccggcaacaaagagtctccaagacgctggatcaaaacaacaacagcaactttgcttggactggtgccaccaaataccatctaaatggaagaaattcattggttaatcccggtgtcgccatggcaacccacaaggacgacgaggaacgcttcttcccttcgagcggagtcctgatttttggaaaaactggagcagctaataagactacactggaaaatgtgttaatgacaaatgaagaggaaattcgtcctaccaacccggtagccaccgaggaatacgggactgttagcagcaacctgcaggcggctaacactgcagcccagacacaagttgtcaacaaccagggagccttacctggtatggtctggcagaaccgggacgtgtacctgcagggtcccatctgggccaagattcctcacacagatggcaactttcacccgtctcctttaatgggcggctttggacttaaacatccgcctcctcagatcctcatcaaaaacactcctgttcctgcggatcctccaacagcgttcaaccaggccaagctgaattctttcatcacgcagtacagcaccggacaagtcagcgtggagatcgagtgggagctgcagaaggagaacagcaagcgctggaacccagagattcagtatacttccaactactacaaatctacaaatgtggactttgctgttaatactgagggtgtttactctgagcctcgccccattggcactcgttacctcacccgtaatctgtaa

SEQ ID NO: 499 - protein, 737 aa, Adeno-associated virus
MAADGYLPDWLEDNLSEGIREWWDLKPGAPKPKANQQKQDDGRGLVLPGYKYLGPFNGLDKGEPVNAADAAALEHDKAYDQQLKAGDNPYLRYNHADAEFQERLQEDTSFGGNLGRAVFQAKKRVLEPLGLVEEAAKTAPGKKRPVEPSPQRSPDSSTGIGKKGQQPARKRLNFGQTGDSESVPDPQPIGEPPAGPSGLGSGTMAAGGGAPMADNNEGADGVGNASGNWHCDSTWLGDRVITTSTRTWALPTYNNHLYKQISSQSAGSTNDNVYFGYSTPWGYFDFNRFHCHFSPRDWQRLINNNWGFRPKKLNFKLFNIQVKEVTTNDGVTTIANNLTSTVQVFSDSEYQLPYVLGSAHQGCLPPFPADVFMIPQYGYLTLNNGSQSVGRSSFYCLEYFPSQMLRTGNNFTISYTFEDVPFHSSYAHSQSLDRLMNPLIDQYLYYLARTQSNAGGTAGNQELQFYQGGPTTMAEQAKNWLPGPCFRQQRVSKTLDQNNNSNFAWTGATKYHLNGRNSLVNPGVAMATHKDDEERFFPSSGVLIFGKTGAANKTTLENVLMTNEEEIRPTNPVATEEYGTVSSNLQAANTAAQTQVVNNQGALPGMVWQNRDVYLQGPIWAKIPHTDGNFHPSPLMGGFGLKHPPPQILIKNTPVPADPPTAFNQAKLNSFITQYSTGQVSVEIEWELQKENSKRWNPEIQYTSNYYKSTNVDFAVNTEGVYSEPRPIGTRYLTRNL

SEQ ID NO: 500 - DNA, 2217 bp, Adeno-associated virus
atggctgccgatggttatcttccagattggctcgaggacaacctctctgagggcattcgcgagtggtgggacctgaaacctggagccccgaaacccaaagccaaccagcaaaagcaggacgacggccggggtctggtgcttcctggctacaagtacctcggacccttcaacggactcgacaagggggagcccgtcaacgcggcggacgcagcggccctcgagcacgacaaggcctacgaccagcagctcaaagcgggtgacaatccgtacctgcggtataatcacgccgacgccgagtttcaggagcgtctgcaagaagatacgtcttttgggggcaacctcgggcgagcagtcttccaggccaagaagcgggttctcgaacctctcggtctggttgaggaaggcgctaagacggctcctggaaagaagagaccggtagagccgtcaccacagcgttcccccgactcctccacgggcatcggcaagaaaggccagcagcccgccagaaagagactcaatttcggtcagactggcgactcagagtcagtccccgaccctcaacctatcggagaacctccagcagcgccctctagtgtgggatctggtacaatggctgcaggcggtggcgcaccaatggcagacaataacgaaggtgccgacggagtgggtagttcctcgggaaattggcattgcgattccacatggctgggcgacagagtcatcaccaccagcacccgaacctgggccctgcccgcctacaacaaccacctctacaagcaaatctccaacgggacctcgggaggcagcaccaacgacaacacctactttggctacagcaccccctgggggtattttgactttaacagattccactgccacttctcaccacgtgactggcagcgactcatcaacaacaactggggattccggcccaagagactcagcttcaagctcttcaacatccaggtcaaagaggtcacgcagaatgaaggcaccaagaccatcgccaataacctcaccagcaccatccaggtgtttacggactcggaataccagctgccgtacgtcctcggctctgcccaccagggctgcctgcctccgttcccggcggatgtcttcatgattcctcagtacggctacctgactctcaacaacggtagtcaggccgtgggacgttcctccttctactgcctggagtacttcccctctcagatgctgagaacgggcaacaacttttccttcagctacactttcgaggacgtgcctttccacagcagctacgcgcacagccagagtttggacaggctgatgaatcctctcatcgaccagtacctgtactacctgtcaagaacccagtctacgggaggcacagcgggaacccagcagttgctgttttctcaggccgggcctagcaacatgtcggctcaggccagaaactggctgcctggaccctgctacagacagcagcgcgtctccacgacactgtcgcaaaacaacaacagcaactttgcctggactggtgccaccaagtatcatctgagcggcagagactctctggtgaatccgggcgtcgccatggcaaccaacaaggacgacgaggaccgcttcttcccatccagcggcatcctcatgtttggcaagcagggagctggaaaagacaacgtggactatagcaacgtgatgctaaccagcgaggaagaaatcaagaccaccaaccccgtggccacagaacagtatggcgtggtggctgataacctacagcagcaaaacaccgctcctattgtgggggccgtcaacagccagggagccttacctggcatggtctggcagaaccgggacgtgtacctgcagggtcctatttgggccaagattcctcacacagatggcaactttcacccgtctcctttaatgggcggctttggacttaaacatccgcctcctcagatcctcatcaaaaacactcctgttcctgcggatcctccaacagcgttcaaccaggccaagctgaattcttccatcacgcagtacagcaccggacaagtcagcgtggagatcgagtgggagctgcagaaggagaacagcaagcgctggaacccagagattcagtatacttccaactactacaaatctacaaatgtggactttgctgttaatactgagggtgtttactctgagcctcgccccattggcactcgttacctcacccgtaatttgtaa

SEQ ID NO: 501 - protein, 738 aa, Adeno-associated virus
MAADGYLPDWLEDNLSEGIREWWDLKPGAPKPKANQQKQDDGRGLVLPGYKYLGPFNGLDKGEPVNAADAAALEHDKAYDQQLKAGDNPYLRYNHADAEFQERLQEDTSFGGNLGRAVFQAKKRVLEPLGLVEEGAKTAPGKKRPVEPSPQRSPDSSTGIGKKGQQPARKRLNFGQTGDSESVPDPQPIGEPPAAPSSVGSGTMAAGGGAPMADNNEGADGVGSSSGNWHCDSTWLGDRVITTSTRTWALPAYNNHLYKQISNGTSGGSTNDNTYFGYSTPWGYFDFNRFHCHFSPRDWQRLINNNWGFRPKRLSFKLFNIQVKEVTQNEGTKTIANNLTSTIQVFTDSEYQLPYVLGSAHQGCLPPFPADVFMIPQYGYLTLNNGSQAVGRSSFYCLEYFPSQMLRTGNNFSFSYTFEDVPFHSSYAHSQSLDRLMNPLIDQYLYYLSRTQSTGGTAGTQQLLFSQAGPSNMSAQARNWLPGPCYRQQRVSTTLSQNNNSNFAWTGATKYHLSGRDSLVNPGVAMATNKDDEDRFFPSSGILMFGKQGAGKDNVDYSNVMLTSEEEIKTTNPVATEQYGVVADNLQQQNTAPIVGAVNSQGALPGMVWQNRDVYLQGPIWAKIPHTDGNFHPSPLMGGFGLKHPPPQILIKNTPVPADPPTAFNQAKLNSSITQYSTGQVSVEIEWELQKENSKRWNPEIQYTSNYYKSTNVDFAVNTEGVYSEPRPIGTRYLTRNL

SEQ ID NO: 502 - protein, 736 aa, Adeno-associated virus; identical to SEQ ID NO: 2

SEQ ID NO: 503 - DNA, 2217 bp, Adeno-associated virus
atggctgctgacggttatcttccagattggctcgaggacaacctctctgagggcattcgcgagtggtgggacctgaaacctggagcccccaagcccaaggccaaccagcagaagcaggacgacggccggggtctggtgcttcctggctacaagtacctcggacccttcaacggactcgacaagggggagcccgtcaacgcggcggacgcagcggccctcgagcacgacaaggcctacgaccagcagctcaaagcgggtgacaatccgtacctgcggtataaccacgccgacgccgagtttcaggagcgtctgcaagaagatacgtcttttgggggcaacctcgggcgagcagtcttccaggccaagaagcgggttctcgaacctctcggtctggttgaggaagctgctaagacggctcctggaaagaagagaccggtagaaccgtcacctcagcgttcccccgactcctccacgggcatcggcaagaaaggccagcagcccgctaaaaagagactgaactttggtcagactggcgactcagagtcagtccccgaccctcaaccaatcggagaaccaccagcaggcccctctggtctgggatctggtacaatggctgcaggcggtggcgctccaatggcagacaataacgaaggcgccgacggagtgggtagttcctcaggaaattggcattgcgattccacatggctgggcgacagagtcatcaccaccagcacccgaacctgggccctgcccacctacaacaaccacctctacaagcaaatatccaatgggacatcgggaggaagcaccaacgacaacacctacttcggctacagcaccccctgggggtattttgacttcaacagattccactgccacttctcaccacgtgactggcagcgactcatcaacaacaactggggattccggccaaaaagactcagcttcaagctcttcaacatccaggtcaaggaggtcacgcagaatgaaggcaccaagaccatcgccaataaccttaccagcacgattcaggtatttacggactcggaataccagctgccgtacgtcctcggctccgcgcaccagggctgcctgcctccgttcccggcggacgtcttcatgattccccagtacggctaccttacactgaacaatggaagtcaagccgtaggccgttcctccttctactgcctggaatattttccatctcaaatgctgcgaactggaaacaattttgaattcagctacaccttcgaggacgtgcctttccacagcagctacgcacacagccagagcttggaccgactgatgaatcctctcatcgaccagtacctgtactacttatccagaactcagtccacaggaggaactcaaggtacccagcaattgttattttctcaagctgggcctgcaaacatgtcggctcaggctaagaactggctacctggaccttgctaccggcagcagcgagtctctacgacactgtcgcaaaacaacaacagcaactttgcttggactggtgccaccaaatatcacctgaacggaagagactctttggtaaatcccggtgtcgccatggcaacccacaaggacgacgaggaacgcttcttcccgtcgagtggagtcctgatgtttggaaaacagggtgctggaagagacaatgtggactacagcagcgttatgctaaccagcgaagaagaaattaaaaccactaaccctgtagccacagaacaatacggtgtggtggctgacaacttgcagcaaaccaatacagggcctattgtgggaaatgtcaacagccaaggagccttacctggcatggtctggcagaaccgagacgtgtacctgcagggtcccatctgggccaagattcctcacacggacggcaacttccacccttcaccgctaatgggaggatttggactgaagcacccacctcctcagatcctgatcaagaacacgccggtacctgcggatcctccaacaacgttcagccaggcgaaattggcttccttcattacgcagtacagcaccggacaggtcagcgtggaaatcgagtgggagctgcagaaggagaacagcaaacgctggaacccagagattcagtacacttcaaactactacaaatctacaaatgtggactttgctgtcaatacagagggaacttattctgagcctcgccccattggtactcgttacctcacccgtaatctgtaa

SEQ ID NO: 504 - protein, 738 aa, Adeno-associated virus
MAADGYLPDWLEDNLSEGIREWWDLKPGAPKPKANQQKQDDGRGLVLPGYKYLGPFNGLDKGEPVNAADAAALEHDKAYDQQLKAGDNPYLRYNHADAEFQERLQEDTSFGGNLGRAVFQAKKRVLEPLGLVEEGAKTAPGKKRPVEPSPQRSPDSSTGIGKKGQQPARKRLNFGQTGDSESVPDPQPLGEPPAAPSSVGSGTMAAGGGAPMADNNEGADGVGSSSGNWHCDSTWLGDRVITTSTRTWALPTYNNHLYKQISNGTSGGSTNDNTYFGYSTPWGYFDFNRFHCHFSPRDWQRLINNNWGFRPKRLSFKLFNIQVKEVTQNEGTKTIANNLTSTIQVFTDSEYQLPYVLGSAHQGCLPPFPADVFMIPQYGYLTLNNGSQAVGRSSFYCLEYFPSQMLRTGNNFSFSYTFEDVPFHSSYAHSQSLDRLMNPLIDQYLYYLSRTQSTGGTAGTQQLLFSQAGPSNMSAQARNWLPGPCYRQQRVSTTLSQNNNSNFAWTGATKYHLNGRDSLVNPGVAMATNKDDEDRFFPSSGILMFGKQGAGKDNVDYSNVMLTSEEEIKTTNPVATEQYGVVADNLQRQNTAPIVGAVNSQGALPGMVWQNRDVYLQGPIWAKIPHTDGNFHPSPLMGGFGLKHPPPQILIKNTPVPADPPTAFNQAKLNSFITQYSTGQVSVEIEWELQKENSKRWNPEIQYTSNYYKSTNVDFAVNTEGVYSEPRPIGTRYLTRNL

SEQ ID NO: 505 - protein, 736 aa, Adeno-associated virus
MAADGYLPDWLEDNLSEGIREWLNLKPGAPQPKANQQKQDNARGLVLPGYKYLGPFNGLDKGDPVNEADAAALEHDKAYGQQLKAGDNPYLKYNHADAEFQERLQKDTSFGGNLGKAVFQAKKRILEPLGLVETPAKTAPGKKRPVDPSPQRSPDSSSGIGKKSPHPARKRLNFGQTGEAESVPDPQPIGEPPSDPSSVGSGTMAAGGGAPMADNNEGADGVGNSSGNWHCDSTWLGDRVITTSTRTWALPTYNNHLYKQISSQSGATNDNHYFGYSTPWGYFDFNRFHCHFSPRDWQRLINNNWGFRPKRLSFKLFNIQVKEVTQNDGTTTIANNLTSTVQVFTDSEYQLPYVLGSAHQGCLPPFPADVFMIPQYGYLTLNNGSQAVGRSSFYCLEYFPSQMLRTGNNFQFSYTFEDVPFHSSYAHSQSLDRLMNPLIDQYLYYLSKTQGTNATVQGAKLQFSQAGPSNMRDQARNWLPGPCYRQQRVSKTANDNNNSEYAWTGATKYHLNGRDSLVNPGPAMASHKDDEEKFFPMNGTLVFGKNGAGNSNVDIENVMITDEEEIRTTNPVATEQYGVVSDNLQSSNTRPITGDVDSQGVLPGMVWQDRDVYLQGPIWAKIPHTDGHFHPSPLMGGFGLKHPPPQILIKNTPVPANPATTFTPGKFASFITQYSTGQVSVQIEWELQKENSKRWNPEIQYTSNYNKSVNVDFTVDTNGVYSEPRPIGTRYLTRNL

SEQ ID NO: 506 - protein, 736 aa, Adeno-associated virus; identical to SEQ ID NO: 81

SEQ ID NO: 507 - protein, 736 aa, Adeno-associated virus
MAADGYLPDWLEDNLSEGIREWWDLKPGAPKPKANQQKQDDGRGLVLPGYKYLGPFNGLDKGEPVNAADAAALEHDKAYDQQLKAGDNPYLRYNHADAEFQERLQEDTSFGGNLGRAVFQAKKRVLEPLGLVEEGAKTAPGKKRPVEQSPQEPDSSSGIGKTGQQPAKKRLNFGQTGDSESVPDPQPLGEPPAAPSGLGPNTMASGGGAPMADNNEGADGVGNSSGNWHCDSTWLGDRVITTSTRTWALPTYNNHLYKQISNGTSGGSTNDNTYFGYSTPWGYFDFNRFHCHFSPRDWQRLINNNWGFRPKRLNFKLFNIQVKEVTTNEGTKTIANNLTSTVQVFTDSEYQLPYVLGSAHQGCLPPFPADVFMVPQYGYLTLNNGSQALGRSSFYCLEYFPSQMLRTGNNFQFSYTFEDVPFHSSYAHSQSLDRLMNPLIDQYLYYLVRTQTTGTGGTQTLAFSQAGPSSMANQARNWVPGPCYRQQRVSTTTNQNNNSNFAWTGAAKFKLNGRDSLMNPGVAMASHKDDEDRFFPSSGVLIFGKQGAGNDGVDYSQVLITDEEEIKATNPVATEEYGAVAINNQAANTQAQTGLVHNQGVIPGMVWQNRDVYLQGPIWAKIPHTDGNFHPSPLMGGFGLKHPPPQILIKNTPVPADPPLTFNQAKLNSFITQYSTGQVSVEIEWELQKENSKRWNPEIQYTSNYYKSTNVDFAVNTEGVYSEPRPIGTRYLTRNL

SEQ ID NO: 508 - protein, 736 aa, Artificial Sequence; identical to SEQ ID NO: 507
  Description of Artificial Sequence: Synthetic polypeptide

SEQ ID NO: 509 - protein, 736 aa, Artificial Sequence
  Description of Artificial Sequence: Synthetic polypeptide
MAADGYLPDWLEDNLSEGIREWWDLKPGAPKPKANQQKQDDGRGLVLPGYKYLGPFNGLDKGEPVNAADAAALEHDKAYDQQLKAGDNPYLRYNHADAEFQERLQEDTSFGGNLGRAVFQAKKRVLEPLGLVEEGAKTAPGKKRPVEQSPQEPDSSSGIGKTGQQPAKKRLNFGQTGDSESVPDPQPLGEPPAAPSGLGPNTMASGGGAPMADNNEGADGVGNSSGNWHCDSTWLGDRVITTSTRTWALPTYNNHLYKQISNGTSGGSTNDNTYFGYSTPWGYFDFNRFHCHFSPRDWQRLINNNWGFRPKRLNFKLFNIQVKEVTTNEGTKTIANNLTSTVQVFTDSEYQLPYVLGSAHQGCLPPFPADVFMVPQYGYLTLNNGSQALGRSSFYCLEYFPSQMLRTGNNFQFSYTFEDVPFHSSYAHSQSLDRLMNPLIDQYLYYLVRTQTTGTGGTQTLAFSQAGPSSMANQARNWVPGPCYRQQRVSTTTNQNNNSNFAWTGAAKFKLNGRDSLMNPGVAMASHKDDEDRFFPSSGVLIFGKQGAGNDGVDYSQVLITDEEEIKATNPVATEEYGAVAINNQRANTQAQTGLVHNQGVIPGMVWQNRDVYLQGPIWAKIPHTDGNFHPSPLMGGFGLKHPPPQILIKNTPVPADPPLTFNQAKLNSFITQYSTGQVSVEIEWELQKENSKRWNPEIQYTSNYYKSTNVDFAVNTEGVYSEPRPIGTRYLTRNL

SEQ ID NO: 510 - protein, 736 aa, Artificial Sequence
  Description of Artificial Sequence: Synthetic polypeptide
MAADGYLPDWLEDNLSEGIREWWDLKPGAPKPKANQQKQDDGRGLVLPGYKYLGPFNGLDKGEPVNAADAAALEHDKAYDQQLKAGDNPYLRYNHADAEFQERLQEDTSFGGNLGRAVFQAKKRVLEPLGLVEEGAKTAPGKKRPVEQSPQEPDSSSGIGKTGQQPAKKRLNFGQTGDSESVPDPQPLGEPPAAPSGLGPNTMASGGGAPMADNNEGADGVGNSSGNWHCDSTWLGDRVITTSTRTWALPTYNNHLYKQISNGTSGGSTNDNTYFGYSTPWGYFDFNRFHCHFSPRDWQRLINNNWGFRPKRLNFKLFNIQVKEVTTNEGTKTIANNLTSTVQVFTDSEYQLPYVLGSAHQGCLPPFPADVFMVPQYGYLTLNNGSQALGRSSFYCLEYFPSQMLRTGNNFQFSYTFEDVPFHSSYAHSQSLDRLMNPLIDQYLYYLVRTQTTGTGGTQTLAFSQAGPSSMANQARNWVPGPCYRQQRVSTTTNQNNNSNFAWTGAAKFKLNGRDSLMNPGVAMASHKDDEDAFFPSSGVLIFGKQGAGNDGVDYSQVLITDEEEIKATNPVATEEYGAVAINNQAANTQAQTGLVHNQGVIPGMVWQNRDVYLQGPIWAKIPHTDGNFHPSPLMGGFGLKHPPPQILIKNTPVPADPPLTFNQAKLNSFITQYSTGQVSVEIEWELQKENSKRWNPEIQYTSNYYKSTNVDFAVNTEGVYSEPRPIGTRYLTRNL

SEQ ID NO: 511 - DNA, 1803 bp, Bovine adeno-associated virus
acggcgcctgcggcaaaaaagaggcctctagagcagagtcctcaagagccagactcctcgagcggagttggcaagaaaggcaaacagcctgccagaaagagactcaactttgacgacgaacctggagccggagacgggcctcccccagaaggaccatcttccggagctatgtctactgagactgaaatgcgtgcagcagctggcggaaatggtggcgatgcgggacaaggtgccgagggagtgggtaatgcctccggtgattggcattgcgattccacttggtcagagagccacgtcaccaccacctcaacccgcacctgggtcctgccgacctacaacaaccacctgtacctgcggctcggctcgagcaacgccagcgacaccttcaacggattctccaccccctggggatactttgactttaaccgcttccactgccacttctcgccaagagactggcaaaggctcatcaacaaccactggggactgcgccccaaaagcatgcaagtccgcatcttcaacatccaagttaaggaggtcacgacgtctaacggggagacgaccgtatccaacaacctcaccagcacggtccagatctttgcggacagcacgtacgagctcccgtacgtgatggatgcaggtcaggagggcagcttgcctcctttccccaacgacgtgttcatggtgcctcagtacgggtactgcggactggtaaccggaggcagctctcaaaaccagacagacagaaatgccttctactgtctggagtactttcccagccagatgctgagaaccggaaacaactttgagatggtgtacaagtttgaaaacgtgcccttccactccatgtacgctcacagccagagcctggataggctgatgaacccgctgctggaccagtacctgtgggagctccagtctaccacctctggaggaactctcaaccagggcaattcagccaccaactttgccaagctgaccaaaacaaacttttctggctaccgcaaaaactggctcccggggcccatgatgaagcagcagagattctccaagactgccagtcaaaactacaagattccccagggaagaaacaacagtctgctccattatgagaccagaactaccctcgacggaagatggagcaattttgccccgggaacggccatggcaaccgcagccaacgacgccaccgacttctctcaggcccagctcatctttgcggggcccaacatcaccggcaacaccaccacagatgccaataacctgatgttcacttcagaagatgaacttagggccaccaacccccgggacactgacctgtttggccacctggcaaccaaccagcaaaacgccaccaccgttcctaccgtagacgacgtggacggagtcggcgtgtacccgggaatggtgtggcaggacagagacatttactaccaagggcccatttgggccaaaattccacacacggatggacactttcacccgtctcctctcattggcggatttggactgaaaagcccgcctccacaaatattcatcaaaaacactcctgtacccgccaatcccgcaacgaccttctctccggccagaatcaacagcttcatcacccagtacagcaccggacaggtggctgtcaaaatagaatgggaaatccagaaggagcggtccaagagatggaacccagaggtccagttcacgtccaactacggagcacaggactcgcttctctgggctcccgacaacgccggagcctacaaagagcccagggccattggatcccgatacctcaccaaccacctctag

SEQ ID NO: 512 - DNA, 1617 bp, Bovine adeno-associated virus
atgcgtgcagcagctggcggaaatggtggcgatgcgggacaaggtgccgagggagtgggtaatgcctccggtgattggcattgcgattccacttggtcagagagccacgtcaccaccacctcaacccgcacctgggtcctgccgacctacaacaaccacctgtacctgcggctcggctcgagcaacgccagcgacaccttcaacggattctccaccccctggggatactttgactttaaccgcttccactgccacttctcgccaagagactggcaaaggctcatcaacaaccactggggactgcgccccaaaagcatgcaagtccgcatcttcaacatccaagttaaggaggtcacgacgtctaacggggagacgaccgtatccaacaacctcaccagcacggtccagatctttgcggacagcacgtacgagctcccgtacgtgatggatgcaggtcaggagggcagcttgcctcctttccccaacgacgtgttcatggtgcctcagtacgggtactgcggactggtaaccggaggcagctctcaaaaccagacagacagaaatgccttctactgtctggagtactttcccagccagatgctgagaaccggaaacaactttgagatggtgtacaagtttgaaaacgtgcccttccactccatgtacgctcacagccagagcctggataggctgatgaacccgctgctggaccagtacctgtgggagctccagtctaccacctctggaggaactctcaaccagggcaattcagccaccaactttgccaagctgaccaaaacaaacttttctggctaccgcaaaaactggctcccggggcccatgatgaagcagcagagattctccaagactgccagtcaaaactacaagattccccagggaagaaacaacagtctgctccattatgagaccagaactaccctcgacggaagatggagcaattttgccccgggaacggccatggcaaccgcagccaacgacgccaccgacttctctcaggcccagctcatctttgcggggcccaacatcaccggcaacaccaccacagatgccaataacctgatgttcacttcagaagatgaacttagggccaccaacccccgggacactgacctgtttggccacctggcaaccaaccagcaaaacgccaccaccgttcctaccgtagacgacgtggacggagtcggcgtgtacccgggaatggtgtggcaggacagagacatttactaccaagggcccatttgggccaaaattccacacacggatggacactttcacccgtctcctctcattggcggatttggactgaaaagcccgcctccacaaatattcatcaaaaacactcctgtacccgccaatcccgcaacgaccttctctccggccagaatcaacagcttcatcacccagtacagcaccggacaggtggctgtcaaaatagaatgggaaatccagaaggagcggtccaagagatggaacccagaggtccagttcacgtccaactacggagcacaggactcgcttctctgggctcccgacaacgccggagcctacaaagagcccagggccattggatcccgatacctcaccaaccacctctag

SEQ ID NO: 513 - DNA, 1173 bp, Bovine adeno-associated virus
atggcgctggtaagctggctggtggaacatggcatcacttccgagaagcagtggattcaggagaatcaggagagctacctgtccttcaactccacgggaaactctcggagccagattaaagccgcgcttgacaacgcgtcaaaaattatgagtctgaccaaatctgcctcagactatctcgtgggacagactgttccagaggacatttctgaaaacagaatctggcagatttttgatctcaacggctacgacccggcatacgcgggctctgttctctacggctggtgcactcgcgcctttggaaagaggaacaccgtctggctgtatggacccgcgaccaccggaaagaccaacatcgcggaagccatctctcacaccgtgcccttttatggctgtgtgaactggactaatgagaactttccctttaatgactgtgtggaaaaaatgttgatctggtgggaggagggaaagatgaccagcaaggtggtggaacccgccaaggccatcttgggggggtctagagtacgagtggatcaaaaatgtaaatcctctgtacaagtagactctaccccggtgattatcacctccaatactaacatgtgtgtggtggtggatgggaactccacgacctttgaacaccagcagccgctggaagaccgcatgttcagatttgaactcatgcggcggctcccgccagattttggcaagattaccaagcaggaagtcaaagacttttttgcttgggcaaaggtcaaccaggtgccggtgactcacgagtttatggttcccaagaaagtggcgggaactgagagggcggagacttctagaaaacgcccactggatgacgtcaccaataccaactataaaagtccggagaagcgggcccggctctcagttgttcctgagacgcctcgcagttcagacgtgcctgtagagcccgctcctctgcgacctctcaactggtcttccaggtatgaatgcagatgtgactatcatgctaaatttgactctgtaacgggggaatgtgacgagtgtgaatatttgaatcggggcaaaaatggctgtatctttcataatgctacacattgtcaaatttgtcacgctgttcctccatgggaaaaggaaaatgtgtcagattttaatgattttgatgactgtaataaagagcagtaa

SEQ ID NO: 514 - DNA, 1833 bp, Bovine adeno-associated virus
atggctaccttctatgaagtcattgttcgcgttccatttgatgtggaagagcacctgcctggaatttctgacaactttgtagactgggtaactggtcaaatttgggagctgcctcccgagtcagatttgaatttgactctgattgagcagcctcagctgacggtggctgacagaattcgccgcgtgttcctgtacgagtggaacaaattttccaagcaggagagcaaattctttgtgcagtttgaaaagggatctgaatattttcatctgcacacgctcgtggagacctccggcatctcttctatggtccttggccgctacgtgagtcagattcgcgcccagctggtgaaggtggtgttccagaacattgagccgcggattaacgactgggtcgccatcaccaaggtaaagaagggcggagccaataaggtggtggattctgggtatattcccgcctacctgctgccgaaggtccaaccagagcttcagtgggcgtggactaacctcgaagagtataaattggccgccctcaatctggaggagcgcaaacggctcgtcgctcagtttcagcttgagtcctcgcagcgctcgcaagaggcatcttcccagagggacgtttcggctgacccggtcatcaagagcaagacttcccagaaatacatggcgctggtaagctggctggtggaacatggcatcacttccgagaagcagtggattcaggagaatcaggagagctacctgtccttcaactccacgggaaactctcggagccagattaaagccgcgcttgacaacgcgtcaaaaattatgagtctgaccaaatctgcctcagactatctcgtgggacagactgttccagaggacatttctgaaaacagaatctggcagatttttgatctcaacggctacgacccggcatacgcgggctctgttctctacggctggtgcactcgcgcctttggaaagaggaacaccgtctggctgtatggacccgcgaccaccggaaagaccaacatcgcggaagccatctctcacaccgtgcccttttatggctgtgtgaactggactaatgagaactttccctttaatgactgtgtggaaaaaatgttgatctggtgggaggagggaaagatgaccagcaaggtggtggaacccgccaaggccatcttgggggggtctagagtacgagtggatcaaaaatgtaaatcctctgtacaagtagactctaccccggtgattatcacctccaatactaacatgtgtgtggtggtggatgggaactccacgacctttgaacaccagcagccgctggaagaccgcatgttcagatttgaactcatgcggcggctcccgccagattttggcaagattaccaagcaggaagtcaaagacttttttgcttgggcaaaggtcaaccaggtgccggtgactcacgagtttatggttcccaagaaagtggcgggaactgagagggcggagacttctagaaaacgcccactggatgacgtcaccaataccaactataaaagtccggagaagcgggcccggctctcagttgttcctgagacgcctcgcagttcagacgtgcctgtagagcccgctcctctgcgacctctcaactggtcttccaggtatgaatgcagatgtgactatcatgctaaatttgactctgtaacgggggaatgtgacgagtgtgaatatttgaatcggggcaaaaatggctgtatctttcataatgctacacattgtcaaatttgtcacgctgttcctccatgggaaaaggaaaatgtgtcagattttaatgattttgatgactgtaataaagagcagtaa

SEQ ID NO: 515 - DNA, 2211 bp, Bovine adeno-associated virus
atgtcttttgttgaccaccctccagattggttggaatcgatcggcgacggctttcgtgaatttctcggccttgaggcgggtcccccgaaacccaaggccaatcaacagaagcaagataacgctcgaggtcttgtgcttcctgggtacaagtatcttggtcctgggaacggccttgataagggcgatcctgtcaattttgctgacgaggttgcccgagagcacgacctctcctaccagaaacagcttgaggcgggcgataacccttacctcaagtacaaccacgcggacgcagagtttcaggagaaactcgcttctgacacttcttttgggggaaaccttgggaaggctgttttccaggctaaaaagaggattctcgaacctcttggcctggttgagacgccggataaaacggcgcctgcggcaaaaaagaggcctctagagcagagtcctcaagagccagactcctcgagcggagttggcaagaaaggcaaacagcctgccagaaagagactcaactttgacgacgaacctggagccggagacgggcctcccccagaaggaccatcttccggagctatgtctactgagactgaaatgcgtgcagcagctggcggaaatggtggcgatgcgggacaaggtgccgagggagtgggtaatgcctccggtgattggcattgcgattccacttggtcagagagccacgtcaccaccacctcaacccgcacctgggtcctgccgacctacaacaaccacctgtacctgcggctcggctcgagcaacgccagcgacaccttcaacggattctccaccccctggggatactttgactttaaccgcttccactgccacttctcgccaagagactggcaaaggctcatcaacaaccactggggactgcgccccaaaagcatgcaagtccgcatcttcaacatccaagttaaggaggtcacgacgtctaacggggagacgaccgtatccaacaacctcaccagcacggtccagatctttgcggacagcacgtacgagctcccgtacgtgatggatgcaggtcaggagggcagcttgcctcctttccccaacgacgtgttcatggtgcctcagtacgggtactgcggactggtaaccggaggcagctctcaaaaccagacagacagaaatgccttctactgtctggagtactttcccagccagatgctgagaaccggaaacaactttgagatggtgtacaagtttgaaaacgtgcccttccactccatgtacgctcacagccagagcctggataggctgatgaacccgctgctggaccagtacctgtgggagctccagtctaccacctctggaggaactctcaaccagggcaattcagccaccaactttgccaagctgaccaaaacaaacttttctggctaccgcaaaaactggctcccggggcccatgatgaagcagcagagattctccaagactgccagtcaaaactacaagattccccagggaagaaacaacagtctgctccattatgagaccagaactaccctcgacggaagatggagcaattttgccccgggaacggccatggcaaccgcagccaacgacgccaccgacttctctcaggcccagctcatctttgcggggcccaacatcaccggcaacaccaccacagatgccaataacctgatgttcacttcagaagatgaacttagggccaccaacccccgggacactgacctgtttggccacctggcaaccaaccagcaaaacgccaccaccgttcctaccgtagacgacgtggacggagtcggcgtgtacccgggaatggtgtggcaggacagagacatttactaccaagggcccatttgggccaaaattccacacacggatggacactttcacccgtctcctctcattggcggatttggactgaaaagcccgcctccacaaatattcatcaaaaacactcctgtacccgccaatcccgcaacgaccttctctccggccagaatcaacagcttcatcacccagtacagcaccggacaggtggctgtcaaaatagaatgggaaatccagaaggagcggtccaagagatggaacccagaggtccagttcacgtccaactacggagcacaggactcgcttctctgggctcccgacaacgccggagcctacaaagagcccagggccattggatcccgatacctcaccaaccacctctag

SEQ ID NO: 516 - DNA, 4694 bp, Bovine adeno-associated virus
gtggcactcccccccctgtcgcgttcgctcgttcgctggctcgattgggggggtggcagctcaaagagctgccagacgacggccctctgggccgtcgcccccccaatcgagccagcgaacgagcgaacgcgacaggggggggagtgccacactctctagcaagggggttttgtaggtggtgatgtcattgttgatgtcattatagttgtcacgcgatagttaatgattaacagtcatgtgatgtgtgttatccaataggatgaaagcgcgcgaatgagatctcgcgagacttccggggtataaaaggggtgagtgaacgagcccgccgccattctctgctctggactgctagaggaccctcgctgccatggctaccttctatgaagtcattgttcgcgttccatttgatgtggaagagcacctgcctggaatttctgacaactttgtagactgggtaactggtcaaatttgggagctgcctcccgagtcagatttgaatttgactctgattgagcagcctcagctgacggtggctgacagaattcgccgcgtgttcctgtacgagtggaacaaattttccaagcaggagagcaaattctttgtgcagtttgaaaagggatctgaatattttcatctgcacacgctcgtggagacctccggcatctcttctatggtccttggccgctacgtgagtcagattcgcgcccagctggtgaaggtggtgttccagaacattgagccgcggattaacgactgggtcgccatcaccaaggtaaagaagggcggagccaataaggtggtggattctgggtatattcccgcctacctgctgccgaaggtccaaccagagcttcagtgggcgtggactaacctcgaagagtataaattggccgccctcaatctggaggagcgcaaacggctcgtcgctcagtttcagcttgagtcctcgcagcgctcgcaagaggcatcttcccagagggacgtttcggctgacccggtcatcaagagcaagacttcccagaaatacatggcgctggtaagctggctggtggaacatggcatcacttccgagaagcagtggattcaggagaatcaggagagctacctgtccttcaactccacgggaaactctcggagccagattaaagccgcgcttgacaacgcgtcaaaaattatgagtctgaccaaatctgcctcagactatctcgtgggacagactgttccagaggacatttctgaaaacagaatctggcagatttttgatctcaacggctacgacccggcatacgcgggctctgttctctacggctggtgcactcgcgcctttggaaagaggaacaccgtctggctgtatggacccgcgaccaccggaaagaccaacatcgcggaagccatctctcacaccgtgcccttttatggctgtgtgaactggactaatgagaactttccctttaatgactgtgtggaaaaaatgttgatctggtgggaggagggaaagatgaccagcaaggtggtggaacccgccaaggccatcttgggggggtctagagtacgagtggatcaaaaatgtaaatcctctgtacaagtagactctaccccggtgattatcacctccaatactaacatgtgtgtggtggtggatgggaactccacgacctttgaacaccagcagccgctggaagaccgcatgttcagatttgaactcatgcggcggctcccgccagattttggcaagattaccaagcaggaagtcaaagacttttttgcttgggcaaaggtcaaccaggtgccggtgactcacgagtttatggttcccaagaaagtggcgggaactgagagggcggagacttctagaaaacgcccactggatgacgtcaccaataccaactataaaagtccggagaagcgggcccggctctcagttgttcctgagacgcctcgcagttcagacgtgcctgtagagcccgctcctctgcgacctctcaactggtcttccaggtatgaatgcagatgtgactatcatgctaaatttgactctgtaacgggggaatgtgacgagtgtgaatatttgaatcggggcaaaaatggctgtatctttcataatgctacacattgtcaaatttgtcacgctgttcctccatgggaaaaggaaaatgtgtcagattttaatgattttgatgactgtaataaagagcagtaaataaagtgagtagtcatgtcttttgttgaccaccctccagattggttggaatcgatcggcgacggctttcgtgaatttctcggccttgaggcgggtcccccgaaacccaaggccaatcaacagaagcaagataacgctcgaggtcttgtgcttcctgggtacaagtatcttggtcctgggaacggccttgataagggcgatcctgtcaattttgctgacgaggttgcccgagagcacgacctctcctaccagaaacagcttgaggcgggcgataacccttacctcaagtacaaccacgcggacgcagagtttcaggagaaactcgcttctgacacttcttttgggggaaaccttgggaaggctgttttccaggctaaaaagaggattctcgaacctcttggcctggttgagacgccggataaaacggcgcctgcggcaaaaaagaggcctctagagcagagtcctcaagagccagactcctcgagcggagttggcaagaaaggcaaacagcctgccagaaagagactcaactttgacgacgaacctggagccggagacgggcctcccccagaaggaccatcttccggagctatgtctactgagactgaaatgcgtgcagcagctggcggaaatggtggcgatgcgggacaaggtgccgagggagtgggtaatgcctccggtgattggcattgcgattccacttggtcagagagccacgtcaccaccacctcaacccgcacctgggtcctgccgacctacaacaaccacctgtacctgcggctcggctcgagcaacgccagcgacaccttcaacggattctccaccccctggggatactttgactttaaccgcttccactgccacttctcgccaagagactggcaaaggctcatcaacaaccactggggactgcgccccaaaagcatgcaagtccgcatcttcaacatccaagttaaggaggtcacgacgtctaacggggagacgaccgtatccaacaacctcaccagcacggtccagatctttgcggacagcacgtacgagctcccgtacgtgatggatgcaggtcaggagggcagcttgcctcctttccccaacgacgtgttcatggtgcctcagtacgggtactgcggactggtaaccggaggcagctctcaaaaccagacagacagaaatgccttctactgtctggagtactttcccagccagatgctgagaaccggaaacaactttgagatggtgtacaagtttgaaaacgtgcccttccactccatgtacgctcacagccagagcctggataggctgatgaacccgctgctggaccagtacctgtgggagctccagtctaccacctctggaggaactctcaaccagggcaattcagccaccaactttgccaagctgaccaaaacaaacttttctggctaccgcaaaaactggctcccggggcccatgatgaagcagcagagattctccaagactgccagtcaaaactacaagattccccagggaagaaacaacagtctgctccattatgagaccagaactaccctcgacggaagatggagcaattttgccccgggaacggccatggcaaccgcagccaacgacgccaccgacttctctcaggcccagctcatctttgcggggcccaacatcaccggcaacaccaccacagatgccaataacctgatgttcacttcagaagatgaacttagggccaccaacccccgggacactgacctgtttggccacctggcaaccaaccagcaaaacgccaccaccgttcctaccgtagacgacgtggacggagtcggcgtgtacccgggaatggtgtggcaggacagagacatttactaccaagggcccatttgggccaaaattccacacacggatggacactttcacccgtctcctctcattggcggatttggactgaaaagcccgcctccacaaatattcatcaaaaacactcctgtacccgccaatcccgcaacgaccttctctccggccagaatcaacagcttcatcacccagtacagcaccggacaggtggctgtcaaaatagaatgggaaatccagaaggagcggtccaagagatggaacccagaggtccagttcacgtccaactacggagcacaggactcgcttctctgggctcccgacaacgccggagcctacaaagagcccagggccattggatcccgatacctcaccaaccacctctagcccaattctgttgcataccctcaataaaccgtgtattcgtttcagtaaaatactgcctcttgtggtcattcggcgtacaacagcttacaacaacaacaaaacccccttgctagagagtgtggcactcccccccctgtcgcgttcgctcgttcgctggctcgattgggggggtggcagctcaaagagctgccagacgacggccctctgggccgtcgcccccccaatcgagccagcgaacgagcgaacgcgacaggggggggagtgccac

SEQ ID NO: 517 - protein, 390 aa, Bovine adeno-associated virus
MALVSWLVEHGITSEKQWIQENQESYLSFNSTGNSRSQIKAALDNASKIMSLTKSASDYLVGQTVPEDISENRIWQIFDLNGYDPAYAGSVLYGWCTRAFGKRNTVWLYGPATTGKTNIAEAISHTVPFYGCVNWTNENFPFNDCVEKMLIWWEEGKMTSKVVEPAKAILGGSRVRVDQKCKSSVQVDSTPVIITSNTNMCVVVDGNSTTFEHQQPLEDRMFRFELMRRLPPDFGKITKQEVKDFFAWAKVNQVPVTHEFMVPKKVAGTERAETSRKRPLDDVTNTNYKSPEKRARLSVVPETPRSSDVPVEPAPLRPLNWSSRYECRCDYHAKFDSVTGECDECEYLNRGKNGCIFHNATHCQICHAVPPWEKENVSDFNDFDDCNKEQ

SEQ ID NO: 518 - protein, 610 aa, Bovine adeno-associated virus
MATFYEVIVRVPFDVEEHLPGISDNFVDWVTGQIWELPPESDLNLTLIEQPQLTVADRIRRVFLYEWNKFSKQESKFFVQFEKGSEYFHLHTLVETSGISSMVLGRYVSQIRAQLVKVVFQNIEPRINDWVAITKVKKGGANKVVDSGYIPAYLLPKVQPELQWAWTNLEEYKLAALNLEERKRLVAQFQLESSQRSQEASSQRDVSADPVIKSKTSQKYMALVSWLVEHGITSEKQWIQENQESYLSFNSTGNSRSQIKAALDNASKIMSLTKSASDYLVGQTVPEDISENRIWQIFDLNGYDPAYAGSVLYGWCTRAFGKRNTVWLYGPATTGKTNIAEAISHTVPFYGCVNWTNENFPFNDCVEKMLIWWEEGKMTSKVVEPAKAILGGSRVRVDQKCKSSVQVDSTPVIITSNTNMCVVVDGNSTTFEHQQPLEDRMFRFELMRRLPPDFGKITKQEVKDFFAWAKVNQVPVTHEFMVPKKVAGTERAETSRKRPLDDVTNTNYKSPEKRARLSVVPETPRSSDVPVEPAPLRPLNWSSRYECRCDYHAKFDSVTGECDECEYLNRGKNGCIFHNATHCQICHAVPPWEKENVSDFNDFDDCNKEQ

SEQ ID NO: 519 - protein, 538 aa, Bovine adeno-associated virus
MRAAAGGNGGDAGQGAEGVGNASGDWHCDSTWSESHVTTTSTRTWVLPTYNNHLYLRLGSSNASDTFNGFSTPWGYFDFNRFHCHFSPRDWQRLINNHWGLRPKSMQVRIFNIQVKEVTTSNGETTVSNNLTSTVQIFADSTYELPYVMDAGQEGSLPPFPNDVFMVPQYGYCGLVTGGSSQNQTDRNAFYCLEYFPSQMLRTGNNFEMVYKFENVPFHSMYAHSQSLDRLMNPLLDQYLWELQSTTSGGTLNQGNSATNFAKLTKTNFSGYRKNWLPGPMMKQQRFSKTASQNYKIPQGRNNSLLHYETRTTLDGRWSNFAPGTAMATAANDATDFSQAQLIFAGPNITGNTTTDANNLMFTSEDELRATNPRDTDLFGHLATNQQNATTVPTVDDVDGVGVYPGMVWQDRDIYYQGPIWAKIPHTDGHFHPSPLIGGFGLKSPPPQIFIKNTPVPANPATTFSPARINSFITQYSTGQVAVKIEWEIQKERSKRWNPEVQFTSNYGAQDSLLWAPDNAGAYKEPRAIGSRYLTNHL

SEQ ID NO: 520 - protein, 736 aa, Artificial Sequence
  Description of Artificial Sequence: Synthetic polypeptide
MSFVDHPPDWLESIGDGFREFLGLEAGPPKPKANQQKQDNARGLVLPGYKYLGPGNGLDKGDPVNFADEVAREHDLSYQKQLEAGDNPYLKYNHADAEFQEKLASDTSFGGNLGKAVFQAKKRILEPLGLVETPDKTAPAAKKRPLEQSPQEPDSSSGVGKKGKQPARKRLNFDDEPGAGDGPPPEGPSSGAMSTETEMRAAAGGNGGDAGQGAEGVGNASGDWHCDSTWSESHVTTTSTRTWVLPTYNNHLYLRLGSSNASDTFNGFSTPWGYFDFNRFHCHFSPRDWQRLINNHWGLRPKSMQVRIFNIQVKEVTTSNGETTVSNNLTSTVHIFADSTYELPYVMDAGQEGSLPPFPNDVFMVPQYGYCGLVTGGSSQNQTDRNAFYCLEYFPSQMLRTGNNFEMVYKFENVPFHSMYAHSQSLDRLMNPLLDQYLWELQSTTSGGTLNQGNSATNFAKLTNKNFSGYRKNWLPGPMMKQQRFSKTASQNYKIPQGGNNSLLHYETRTTLDRRWSNFAPGTAMATAANDATDFSQAQLIFAGPNITGNTTTDANNLMFTSEDELRATNPRDTDLFGHLATNQQNATTVPTVDDVDGVGVYPGMVWQDRDIYYQGPIWAKIPHTDGHFHPSPLIGGFGLKSPPPQIFIKNTPVPANPATTFSPARINSFITQYSTGQVAVKIEWEIQKERSKRWNPEVQFTSNYGAQDSLLWAPDNAGAYKEPRAIGSRYLTNHL

SEQ ID NO: 521 - protein, 736 aa, Artificial Sequence
  Description of Artificial Sequence: Synthetic polypeptide
MSFVDHPPDWLESIGDGFREFLGLEAGPPKPKANQQKQDNARGLVLPGYKYLGPGNGLDKGDPVNFADEVAREHDLSYQKQLEAGDNPYLKYNHADAEFQEKLASDTSFGGNLGKAVFQAKKRILEPLGLVETPDKTAPAAKKRPLEQSPQEPDSSSGVGKKGKQPARKRLNFDDEPGAGDGPPPEGPSSGAMSTETEMRAAAGGNGGDAGQGAEGVGNASGDWHCDSTWSESHVTTTSTRTWVLPTYNNHLYLRLGSSNASDTFNGFSTPWGYFDFNRFHCHFSPRDWQRLINNHWGLRPKSMQVRIFNIQVKEVTTSNGETTVSNNLTSTVQIFADSTYELPYVMDAGQEGSLPPFPNDVFMVPQYGYCGLVTGGSSQNQTDRNAFYCLEYFPSQMLRTGNNFEMVYKFENVPFHSMYAHSQSLDRLMNPLLDQYLWELQSTTSGGTLNQGNSATNFAKLTKTNFSGYRKNWLPGPMMKQQRFSKTASQNYKIPQGRNNSLLHYETRTTLDGRWSNFAPGTAMATAANDATDFSQAQLIFAGPNITGNTTTDANNLMFTSEDELRATNPRDTDLFGHLATNQQNATTVPTVDDVDGVGVYPGMVWQDRDIYYQGPIWAKIPHTDGHFHPSPLIGGFGLKSPPPQIFIKNTPVPANPATTFSPARINSFITQYSTGQVAVKIEWEIQKERSKRWNPEVQFTSNYGAQDSLLWAPDNAGAYKEPRAIGSRYLTNHL

SEQ ID NO: 522 - protein, 736 aa, Bovine adeno-associated virus; identical to SEQ ID NO: 521

SEQ ID NO: 523 - protein, 600 aa, Bovine adeno-associated virus
TAPAAKKRPLEQSPQEPDSSSGVGKKGKQPARKRLNFDDEPGAGDGPPPEGPSSGAMSTETEMRAAAGGNGGDAGQGAEGVGNASGDWHCDSTWSESHVTTTSTRTWVLPTYNNHLYLRLGSSNASDTFNGFSTPWGYFDFNRFHCHFSPRDWQRLINNHWGLRPKSMQVRIFNIQVKEVTTSNGETTVSNNLTSTVQIFADSTYELPYVMDAGQEGSLPPFPNDVFMVPQYGYCGLVTGGSSQNQTDRNAFYCLEYFPSQMLRTGNNFEMVYKFENVPFHSMYAHSQSLDRLMNPLLDQYLWELQSTTSGGTLNQGNSATNFAKLTKTNFSGYRKNWLPGPMMKQQRFSKTASQNYKIPQGRNNSLLHYETRTTLDGRWSNFAPGTAMATAANDATDFSQAQLIFAGPNITGNTTTDANNLMFTSEDELRATNPRDTDLFGHLATNQQNATTVPTVDDVDGVGVYPGMVWQDRDIYYQGPIWAKIPHTDGHFHPSPLIGGFGLKSPPPQIFIKNTPVPANPATTFSPARINSFITQYSTGQVAVKIEWEIQKERSKRWNPEVQFTSNYGAQDSLLWAPDNAGAYKEPRAIGSRYLTNHL

SEQ ID NO: 524 - DNA, 2214 bp, Artificial Sequence
  Description of Artificial Sequence: Synthetic polynucleotide
atggctgccgatggttatcttccagattggctcgaggacactctctctgaaggaataagacagtggtggaagctcaaacctggcccaccaccaccaaagcccgcagagcggcataaggacgacagcaggggtcttgtgcttcctgggtacaagtacctcggacccttcaacggactcgacaagggagagccggtcaacgaggcagacgccgcggccctcgagcacgacaaagcctacgaccggcagctcgacagcggagacaacccgtacctcaagtacaaccacgccgacgcggagtttcaggagcgccttaaagaagatacgtcttttgggggcaacctcgggcgagcagtcttccaggccaaaaagaggcttcttgaacctcttggtctggttgaggaagcggctaagacggctcctggaaagaagaggcctgtagagcagtctcctcaggaaccggactcctcctcgggcatcggcaagacaggccagcagcccgctaaaaagagactcaatttcggtcagactggcgacacagagtcagtcccagaccctcaaccaatcggagaacctcccgcagccccctcaggtgtgggatctcttacaatggcttcaggtggtggcgcaccagtggcagacaataacgaaggtgccgatggagtgggtagttcctcgggaaattggcattgcgattcccaatggctgggggacagagtcatcaccaccagcacccgaacctgggccctgcccacctacaacaatcacctctacaagcaaatctccaacgggacatcgggaggagccaccaacgacaacacctacttcggctacagcaccccctgggggtattttgactttaacagattccactgccacttttcaccacgtgactggcagcgactcatcaacaacaactggggattccggcccaagagactcagcttcaagctcttcaacatccaggtcaaggaggtcacgcagaatgaaggcaccaagaccatcgccaataaccttaccagcacggtccaggtcttcacggactcggagtaccagctgccgtacgttctcggctctgcccaccagggctgcctgcctccgttcccggcggacgtgttcatgattccccagtacggctacctaacactcaacaacggtagtcaggccgtgggacgctcctccttctactgcctggaatactttccttcgcagatgctgagaaccggcaacaacttccagtttacttacaccttcgaggacgtgcctttccacagcagctacgcccacagccagagcttggaccggctgatgaatcctctgattgaccagtacctgtactacttgtctcggactcaaacaacaggaggcacggcaaatacgcagactctgggcttcagccaaggtgggcctaatacaatggccaatcaggcaaagaactggctgccaggaccctgttaccgccaacaacgcgtctcaacgacaaccgggcaaaacaacaatagcaactttgcctggactgctgggaccaaataccatctgaatggaagaaattcattggctaatcctggcatcgctatggcaacacacaaagacgacaaggagcgtttttttcccagtaacgggatcctgatttttggcaaacaaaatgctgccagagacaatgcggattacagcgatgtcatgctcaccagcgaggaagaaatcaaaaccactaaccctgtggctacagaggaatacggtatcgtggcagataacttgcagcagcaaaacacggctcctcaaattggaactgtcaacagccagggggccttacccggtatggtttggcagaaccgggacgtgtacctgcagggtcccatctgggccaagattcctcacacggacggcaacttccacccgtctccgctgatgggcggctttggcctgaaacatcctccgcctcagatcctgatcaagaacacgcctgtacctgcggatcctccgaccaccttcaaccagtcaaagctgaactctttcatcacgcaatacagcaccggacaggtcagcgtggaaattgaatgggagctgcagaaggaaaacagcaagcgctggaaccccgagatccagtacacctccaactactacaaatctacaagtgtggactttgctgttaatacagaaggcgtgtactctgaaccccaccccattggcacccgttacctcacccgtcccctgtaa

SEQ ID NO: 525 - protein, 737 aa, Artificial Sequence
  Description of Artificial Sequence: Synthetic polypeptide
MAADGYLPDWLEDTLSEGIRQWWKLKPGPPPPKPAERHKDDSRGLVLPGYKYLGPFNGLDKGEPVNEADAAALEHDKAYDRQLDSGDNPYLKYNHADAEFQERLKEDTSFGGNLGRAVFQAKKRLLEPLGLVEEAAKTAPGKKRPVEQSPQEPDSSSGIGKTGQQPAKKRLNFGQTGDTESVPDPQPIGEPPAAPSGVGSLTMASGGGAPVADNNEGADGVGSSSGNWHCDSQWLGDRVITTSTRTWALPTYNNHLYKQISNGTSGGATNDNTYFGYSTPWGYFDFNRFHCHFSPRDWQRLINNNWGFRPKRLSFKLFNIQVKEVTQNEGTKTIANNLTSTVQVFTDSEYQLPYVLGSAHQGCLPPFPADVFMIPQYGYLTLNNGSQAVGRSSFYCLEYFPSQMLRTGNNFQFTYTFEDVPFHSSYAHSQSLDRLMNPLIDQYLYYLSRTQTTGGTANTQTLGFSQGGPNTMANQAKNWLPGPCYRQQRVSTTTGQNNNSNFAWTAGTKYHLNGRNSLANPGIAMATHKDDKERFFPSNGILIFGKQNAARDNADYSDVMLTSEEEIKTTNPVATEEYGIVADNLQQQNTAPQIGTVNSQGALPGMVWQNRDVYLQGPIWAKIPHTDGNFHPSPLMGGFGLKHPPPQILIKNTPVPADPPTTFNQSKLNSFITQYSTGQVSVEIEWELQKENSKRWNPEIQYTSNYYKSTSVDFAVNTEGVYSEPHPIGTRYLTRPL

SEQ ID NO: 526 - protein, 736 aa, Artificial Sequence
  Description of Artificial Sequence: Synthetic polypeptide
MAADGYLPDWLEDNLSEGIREWWDLKPGAPKPKANQQKQDDGRGLVLPGYKYLGPFNGLDKGEPVNAADAAALEHDKAYDQQLKAGDNPYLRYNHADAEFQERLQEDTSFGGNLGRAVFQAKKRVLEPLGLVEEGAKTAPGKKRPVEQSPQEPDSSSGIGKTGQQPAKKRLNFGQTGDTESVPDPQPIGEPPAAPSGVGSLTMASGGGAPVADNNEGADGVGSSSGNWHCDSQWLGDRVITTSTRTWALPTYNNHLYKQISSASTGASNDNHYFGYSTPWGYFDFNRFHCHFSPRDWQRLINNNWGFRPKRLNFKLFNIQVKEVTDNNGVKTIANNLTSTVQVFTDSDYQLPYVLGSAHQGCLPPFPADVFMIPQYGYLTLNNGSQAVGRSSFYCLEYFPSQMLRTGNNFQFTYTFEDVPFHSSYAHSQSLDRLMNPLIDQYLYYLSRTQTTGGTANTQTLGFSQGGPNTMANQAKNWLPGPCYRQQRVSTTTGQNNNSNFAWTAGTKYHLNGRNSLANPGIAMATHKDDKERFFPSNGILIFGKQNAARDNADYSDVMLTSEEEIKTTNPVATEEYGIVADNLQQQNTAPQIGTVNSQGALPGMVWQNRDVYLQGPIWAKIPHTDGNFHPSPLMGGFGLKHPPPQILIKNTPVPADPPTTFNQSKLNSFITQYSTGQVSVEIEWELQKENSKRWNPEIQYTSNYYKSTSVDFAVNTEGVYSEPHPIGTRYLTRPL

SEQ ID NO: 527 - protein, 736 aa, Artificial Sequence
  Description of Artificial Sequence: Synthetic polypeptide
MAADGYLPDWLEDTLSEGIRQWWKLKPGPPPPKPAERHKDDSRGLVLPGYKYLGPFNGLDKGEPVNEADAAALEHDKAYDRQLDSGDNPYLKYNHADAEFQERLQGDTSFGGNLGRAVFQAKKRVLEPLGLVEEGAKTAPGKKRPVEQSPQEPDSSSGIGETGQQPAKKRLNFGQTGDSESVPDPQPLGEPPATPAAVGPTTMASGGGAPMADNNEGADGVGSSSGNWHCDSQWLGDRVITTSTRTWALPTYNNHLYKQISSASTGASNDNHYFGYSTPWGYFDFNRFHCHFSPRDWQRLINNNWGFRPKRLSFKLFNIQVKEVTDNNGVKTIANNLTSTVQVFTDSEYQLPYVLGSAHQGCLPPFPADVFMIPQYGYLTLNNGSQAVGRSSFYCLEYFPSQMLRTGNNFTFSYTFEDVPFHSSYAHSQSLDRLMNPLIDQYLYYLSRTQTTGGTANTQTLGFSQGGPNTMANQAKNWLPGPCYRQQRVSTTTGQNNNSNFAWTAGTKYHLNGRNSLANPGIAMATHKDDKERFFPSNGILIFGKQNAARDNADYSDVMLTSEEEIKTTNPVATEEYGIVADNLQQQNTAPQIGTVNSQGALPGMVWQNRDVYLQGPIWAKIPHTDGNFHPSPLMGGFGLKHPPPQILIKNTPVPADPPTTFNQSKLNSFITQYSTGQVSVEIEWELQKENSKRWNPEIQYTSNYYKSTSVDFAVNTEGVYSEPHPIGTRYLTRPL

SEQ ID NO: 528 - DNA, 2181 bp, Artificial Sequence
  Description of Artificial Sequence: Synthetic polynucleotide
atgtcttttgttgatcaccctccagattggttggaagaagttggtgaaggtcttcgcgagtttttgggccttgaagcgggcccaccgaaaccaaaacccaatcagcagcatcaagatcaagcccgtggtcttgtgctgcctggttataactatctcggacccggaaacggtctcgatcgaggagagcctgtcaacagggcagacgaggtcgcgcgagagcacgacatctcgtacaacgagcagcttgaggcgggagacaacccctacctcaagtacaaccacgcggacgccgagtttcaggagaagctcgccgacgacacatccttcgggggaaacctcggaaaggcagtctttcaggccaagaaaagggttctcgaaccttttggcctggttgaagagggtgctaagacggcccctaccggaaagcggatagacgaccactttccaaaaagaaagaaggctcggaccgaagaggactccaagccttccacctcgtcagacgccgaagctggacccagcggatcccagcagctgcaaatcccagcacaaccagcctcaagtttgggagctgatacaatgtctgcgggaggtggcggcccattgggcgacaataaccaaggtgccgatggagtgggcaatgcctcgggagattggcattgcgattccacgtggatgggggacagagtcgtcaccaagtccacccgcacctgggtgctgcccagctacaacaaccaccagtaccgagagatcaaaagcggctccgtcgacggaagcaacgccaacgcctactttggatacagcaccccctgggggtactttgactttaaccgcttccacagccactggagcccccgagactggcaaagactcatcaacaactattggggcttcagaccccggtctctcagagtcaaaatcttcaacatccaagtcaaagaggtcacggtgcaggactccaccaccaccatcgccaacaacctcacctccaccgtccaagtgtttacggacgacgactaccaactcccgtacgtcgtcggcaacgggaccgagggatgcctgccggccttccccccgcaggtctttacgctgccgcagtacggctacgcgacgctgaaccgagacaacggagacaacccgacagagcggagcagcttcttttgcctagagtactttcccagcaagatgctgaggacgggcaacaactttgagtttacctacagctttgaagaggtgcccttccactgcagcttcgccccgagccagaacctctttaagctggccaacccgctggtggaccagtacctgtaccgcttcgtgagcacctcggccacgggcgccatccagttccaaaagaacctggcgggcagatacgccaacacctacaaaaactggttcccggggcccatgggccgaacccagggctggaacacgagctctggggtcagcagcaccaacagagtcagcgtcaacaacttttccgtctcaaaccggatgaacctggagggggccagctaccaagtgaacccccagcccaacgggatgacaaacacgctccaaggcagcaaccgctacgcgctggaaaacaccatgatcttcaacgctcaaaacgccacgccgggaactacctcggtgtacccagaggacaatctactgctgaccagcgagagcgagactcagcccgtcaaccgggtggcttacaacacgggcggtcagatggccaccaacgcccagaacgccaccacggctcccacggtcgggacctacaacctccaggaagtgcttcctggcagcgtatggatggagagggacgtgtacctccaaggacccatctgggccaagatcccagagacgggggcgcactttcacccctctccggccatgggcggattcggactcaaacacccgccgcccatgatgctcatcaaaaacacgccggtgcccggcaacatcaccagcttctcggacgtgcccgtcagcagcttcatcacccagtacagcaccgggcaggtcaccgtggagatggaatgggagctcaaaaaggaaaactccaagaggtggaacccagagatccagtacaccaacaactacaacgacccccagtttgtggactttgctccagacggctccggcgaatacagaaccaccagagccatcggaacccgatacctcacccgacccctt

SEQ ID NO: 529 - protein, 726 aa, Artificial Sequence
  Description of Artificial Sequence: Synthetic polypeptide
MSFVDHPPDWLEEVGEGLREFLGLEAGPPKPKPNQQHQDQARGLVLPGYNYLGPGNGLDRGEPVNRADEVAREHDISYNEQLEAGDNPYLKYNHADAEFQEKLADDTSFGGNLGKAVFQAKKRVLEPFGLVEEGAKTAPTGKRIDDHFPKRKKARTEEDSKPSTSSDAEAGPSGSQQLQIPAQPASSLGADTMSAGGGGPLGDNNQGADGVGNASGDWHCDSTWMGDRVVTKSTRTWVLPSYNNHQYREIKSGSVDGSNANAYFGYSTPWGYFDFNRFHSHWSPRDWQRLINNYWGFRPRSLRVKIFNIQVKEVTVQDSTTTIANNLTSTVQVFTDDDYQLPYVVGNGTEGCLPAFPPQVFTLPQYGYATLNRDNGDNPTERSSFFCLEYFPSKMLRTGNNFEFTYSFEEVPFHCSFAPSQNLFKLANPLVDQYLYRFVSTSATGAIQFQKNLAGRYANTYKNWFPGPMGRTQGWNTSSGSSTNRVSVNNFSVSNRMNLEGASYQVNPQPNGMTNTLQGSNRYALENTMIFNAQNATPGTTSVYPEDNLLLTSESETQPVNRVAYNTGGQMATNAQNATTAPTVGTYNLQEVLPGSVWMERDVYLQGPIWAKIPETGAHFHPSPAMGGFGLKHPPPMMLIKNTPVPGNITSFSDVPVSSFITQYSTGQVTVEMEWELKKENSKRWNPEIQYTNNYNDPQFVDFAPDGSGEYRTTRAIGTRYLTRPL

SEQ ID NO: 530 - protein, 735 aa, Artificial Sequence
  Description of Artificial Sequence: Synthetic polypeptide
MAADGYLPDWLEDTLSEGIRQWWKLKPGPPPPKPAERHKDDSRGLVLPGYKYLGPFNGLDKGEPVNEADAAALEHDKAYDRQLDSGDNPYLKYNHADAEFQERLKEDTSFGGNLGRAVFQAKKRILEPLGLVEEPVKTAPGKKRPVEHSPAEPDSSSGTGKSGQQPARKRLNFGQTGDADSVPDPQPLGQPPAAPSGLGTNTMASGSGAPMADNNEGADGVGNSSGNWHCDSTWMGDRVITTSTRTWALPTYNNHLYKQISSQSGASNDNHYFGYSTPWGYFDFNRFHCHFSPRDWQRLINNNWGFRPKRLSFKLFNIQVKEVTQNDGTTTIANNLTSTVQVFTDSEYQLPYVLGSAHQGCLPPFPADVFMVPQYGYLTLNNGSQAVGRSSFYCLEYFPSQMLRTGNNFTFSYTFEDVPFHSSYAHSQSLDRLMNPLIDQYLYYLSRTNTPSGTTTMSRLQFSQAGASDIRDQSRNWLPGPCYRQQRVSKTAADNNNSDYSWTGATKYHLNGRDSLVNPGPAMASHKDDEEKYFPQSGVLIFGKQDSGKTNVDIEKVMITDEEEIRTTNPVATEQYGSVSTNLQSGNTQAATSDVNTQGVLPGMVWQDRDVYLQGPIWAKIPHTDGHFHPSPLMGGFGLKHPPPQILIKNTPVPANPSTTFSAAKFASFITQYSTGQVSVEIEWELQKENSKRWNPEIQYTSNYNKSVNVDFTVDTNGVYSEPRPIGTRYLTRNL

SEQ ID NO: 531 - DNA, 1797 bp, Artificial Sequence
  Description of Artificial Sequence: Synthetic polynucleotide
acggctccgaccggagacaagcggaaaggcgaagacgaacctcgtttgcccgacacttcttcacagactcccaagaaaaacaagaagcctcgcaaggaaagaccttccggcggggcagaagatccgggcgaaggcacctcttccaacgctggagcagcagcacccgcctctagtgtgggatcatctatcatggctgaaggaggtggcggcccagtgggcgatgcaggccagggtgccgatggagtgggcaattcctccggaaattggcattgcgattcccaatggctggaaaacggagtcgtcactcgaaccacccgaacctgggtcttgcccagctacaacaaccacctgtacaaacgaatccaaggacccagcggaggcgacaacaacaacaaattctttggattcagcaccccctggggatactttgactacaatcgattccactgccacttttccccgcgagactggcaacgactcatcaacaacaactggggcatccgtcccaaagcgatgcgctttagactctttaacatccaggttaaagaggtcacggtccaagacttcaacaccaccatcggcaacaacctcaccagtacggtccaggtctttgcggacaaggactaccaactgccgtacgtcctcggatcggctaccgaaggcaccttcccgccgttcccagcggatatctacacgatcccgcagtacgggtactgcacgctaaactacaacaacgaggcggtggatcgttcggccttctactgtctggactactttccctcagacatgctgcggacaggaaataactttgagtttacttacaccttcgaggacgttcctttccatagcatgtttgcccacaaccagacgctagaccggctgatgaatcccctcgtggatcagtacctctgggctttcagctccgtcagccaagcaggctcatctggacgagctcttcattactcgcgggcgactaaaaccaacatggcggctcaatataggaactggttacctgggcctttcttccgtgatcagcaaatctttacgggcgctagcaacatcactaaaaataacgtctttagcgtttgggaaaaaggcaagcaatgggaactcgacaatcggaccaacctaatgcagcccggtcctgcggcagcgaccacctttagcggagaacctgaccgtcaagccatgcaaaacacgctggcttttagcaggaccgtctacgatcaaacgaccgccacgaccgatcgtaaccagatactcatcaccaacgaagacgaaatcagacccaccaactcggtcggtatcgacgcgtggggagcagttcccaccaacaaccagtcgatcgtgacccccggcactcgcgcggccgtcaacaatcaaggggcgcttcccgggatggtgtggcaaaacagagacatttaccctacagggacccatttggccaaaattcccgacactgacaatcacttccatccgtccccgcttattgggcggtttggctgcaagcatccccctccccagattttcattaaaaacacacccgtccctgccaacccttcggaaacgttccagacggccaaagtggcctccttcatcaaccagtactcgaccggacagtgcaccgtcgaaatcttttgggaactcaagaaggaaacctccaagcgctggaaccccgaaatccagttcacctccaactttggcaacgcggccgacatccagtttgccgtctccgacacgggatcctattccgaacctcgtcccatcggtacccgttaccttaccaaacctctgtaa

SEQ ID NO: 532 - DNA, 1989 bp, Artificial Sequence
  Description of Artificial Sequence: Synthetic polynucleotide
atgaggtcgtactacgaggtcatcgttcagctgcccaacgacgtcgagagtcaggtacctggaatctccgattcgttcgtcaactggattacgtcgcgagaatggacgttgcctgaggacgccgattgggatttggaccaggtcgatcaagttcaactgacgctcggcgacaaaatccaacgggagattcgaactcattgggggacgatggccaaagaaccggactttcactattttatccaactggaacaaggtgaggtgttctttcatttacacgtcctgctggaaacgtgttccgtaaagccgatggtactcggaagatatatccgacatattcaacaaaaaattgtgagtaaagtctactgcgccacgagcctacgatggaaggatggatgcgtggtgaccaagaccaaaaatttcgggggcgcgaacaaggtccgggccgagtcgtatattcccgcctacctgatcccgaaacagcaaccggaagtgcagtgggcgtggactaacgtgcccgagtatataaaagcgtgcttgcaccgagaactgcgtgccagtctcgcgcgacttcacttcgaggaggcgggcgtctcgcaatccaaggaaaatctcgcgagaactgcagacggcgctcccgtgatgccgacccgcgtcagcaaacgctacatggagctcgtggattggctcgtggagaaggggatcaccaccgagaaggaatggctgctggaaaacagagaaagctttcggagctttcaggcctcgagcaactcggcgcgtcagatcaagacggccctgcaaggcgccattcaggagatgcttctgaccaagacggcggaggactacctcgtcggaaaggatcccgtctcggacgacgacatccgtcagaaccgcatctacaagattctggaactgaaccactacgacccagcgtacgtggggagtattttggtcgggtggtgccagaagaaatggggcaagcgaaacacgctgtggctgttcggacatgcgaccaccggcaagaccaacatcgcggaggctattgcccatgctgtgccgttctatggatgcgttaactggaccaacgagaactttccgttcaacgactgcgtcgaaaaaatgattatctggtgggaggagggcaaaatgaccgccaaagtggtggaaacagccaaggcgattctgggaggatctcgggtgagagtggaccaaaaatgcaaagcttcggttccgatcgaaccgacgccggtcattattaccagtaacaccaacatgtgttatgtcatcgacgggaacacgaccacgttcgagcataagcagccgttggaggacaggatgtttaagctcgaattgctgactcggttgcctgatgactttggtaaggtgaccaaacaggaggtgcgtcaattcttcaggtggtctcaggatcacctgacccctgtgatcccagaattcctagtgcggaaggcggagtctcgcaaaagacccgccccttccggggaaggctatataagcccgacaaagcggcccgcgctcgcagagcagcagcaggcgtcggagagcgcggacccggttcccaccaggtatcgtatcaaatgctcgaaacattgcggtatggataaaatgttgtttccttgccaaatttgtgaatcgatgaacagagatattaatatttgtgctattcataaaacgaccgactgtaaagagtgtttccccgactacggggataaagatgatgtagaactacccccctgtacagaacacaacgtgtctcgttgttatcaatgtcattcgggcgaattgtatcgcgtgacttcggactctgacgagaaacctgcccccgagagtgatgaaggcaccgagccatcctatgctccctgcacgattcaccacctgatgggcaagagtcacgggttagtcacttgcgcggcgtgtcggttgaaaaatagtacgttgcatgatgacttggatgacggtgatctcgaacaataa

SEQ ID NO: 533 - DNA, 1626 bp, Artificial Sequence
  Description of Artificial Sequence: Synthetic polynucleotide
atgaggtcgtactacgaggtcatcgttcagctgcccaacgacgtcgagagtcaggtacctggaatctccgattcgttcgtcaactggattacgtcgcgagaatggacgttgcctgaggacgccgattgggatttggaccaggtcgatcaagttcaactgacgctcggcgacaaaatccaacgggagattcgaactcattgggggacgatggccaaagaaccggactttcactattttatccaactggaacaaggtgaggtgttctttcatttacacgtcctgctggaaacgtgttccgtaaagccgatggtactcggaagatatatccgacatattcaacaaaaaattgtgagtaaagtctactgcgccacgagcctacgatggaaggatggatgcgtggtgaccaagaccaaaaatttcgggggcgcgaacaaggtccgggccgagtcgtatattcccgcctacctgatcccgaaacagcaaccggaagtgcagtgggcgtggactaacgtgcccgagtatataaaagcgtgcttgcaccgagaactgcgtgccagtctcgcgcgacttcacttcgaggaggcgggcgtctcgcaatccaaggaaaatctcgcgagaactgcagacggcgctcccgtgatgccgacccgcgtcagcaaacgctacatggagctcgtggattggctcgtggagaaggggatcaccaccgagaaggaatggctgctggaaaacagagaaagctttcggagctttcaggcctcgagcaactcggcgcgtcagatcaagacggccctgcaaggcgccattcaggagatgcttctgaccaagacggcggaggactacctcgtcggaaaggatcccgtctcggacgacgacatccgtcagaaccgcatctacaagattctggaactgaaccactacgacccagcgtacgtggggagtattttggtcgggtggtgccagaagaaatggggcaagcgaaacacgctgtggctgttcggacatgcgaccaccggcaagaccaacatcgcggaggctattgcccatgctgtgccgttctatggatgcgttaactggaccaacgagaactttccgttcaacgactgcgtcgaaaaaatgattatctggtgggaggagggcaaaatgaccgccaaagtggtggaaacagccaaggcgattctgggaggatctcgggtgagagtggaccaaaaatgcaaagcttcggttccgatcgaaccgacgccggtcattattaccagtaacaccaacatgtgttatgtcatcgacgggaacacgaccacgttcgagcataagcagccgttggaggacaggatgtttaagctcgaattgctgactcggttgcctgatgactttggtaaggtgaccaaacaggaggtgcgtcaattcttcaggtggtctcaggatcacctgacccctgtgatcccagaattcctagtgcggaaggcggagtctcgcaaaagacccgccccttccggggaaggctatataagcccgacaaagcggcccgcgctcgcagagcagcagcaggcgtcggagagcgcggacccggttcccaccagattggttggagcggttggtcaaaaagggagtgaatgctgcagctga

SEQ ID NO: 534 - DNA, 1323 bp, Artificial Sequence
  Description of Artificial Sequence: Synthetic polynucleotide
atggagctcgtggattggctcgtggagaaggggatcaccaccgagaaggaatggctgctggaaaacagagaaagctttcggagctttcaggcctcgagcaactcggcgcgtcagatcaagacggccctgcaaggcgccattcaggagatgcttctgaccaagacggcggaggactacctcgtcggaaaggatcccgtctcggacgacgacatccgtcagaaccgcatctacaagattctggaactgaaccactacgacccagcgtacgtggggagtattttggtcgggtggtgccagaagaaatggggcaagcgaaacacgctgtggctgttcggacatgcgaccaccggcaagaccaacatcgcggaggctattgcccatgctgtgccgttctatggatgcgttaactggaccaacgagaactttccgttcaacgactgcgtcgaaaaaatgattatctggtgggaggagggcaaaatgaccgccaaagtggtggaaacagccaaggcgattctgggaggatctcgggtgagagtggaccaaaaatgcaaagcttcggttccgatcgaaccgacgccggtcattattaccagtaacaccaacatgtgttatgtcatcgacgggaacacgaccacgttcgagcataagcagccgttggaggacaggatgtttaagctcgaattgctgactcggttgcctgatgactttggtaaggtgaccaaacaggaggtgcgtcaattcttcaggtggtctcaggatcacctgacccctgtgatcccagaattcctagtgcggaaggcggagtctcgcaaaagacccgccccttccggggaaggctatataagcccgacaaagcggcccgcgctcgcagagcagcagcaggcgtcggagagcgcggacccggttcccaccaggtatcgtatcaaatgctcgaaacattgcggtatggataaaatgttgtttccttgccaaatttgtgaatcgatgaacagagatattaatatttgtgctattcataaaacgaccgactgtaaagagtgtttccccgactacggggataaagatgatgtagaactacccccctgtacagaacacaacgtgtctcgttgttatcaatgtcattcgggcgaattgtatcgcgtgacttcggactctgacgagaaacctgcccccgagagtgatgaaggcaccgagccatcctatgctccctgcacgattcaccacctgatgggcaagagtcacgggttagtcacttgcgcggcgtgtcggttgaaaaatagtacgttgcatgatgacttggatgacggtgatctcgaacaataa

SEQ ID NO: 535 - DNA, 960 bp, Artificial Sequence
  Description of Artificial Sequence: Synthetic polynucleotide
atggagctcgtggattggctcgtggagaaggggatcaccaccgagaaggaatggctgctggaaaacagagaaagctttcggagctttcaggcctcgagcaactcggcgcgtcagatcaagacggccctgcaaggcgccattcaggagatgcttctgaccaagacggcggaggactacctcgtcggaaaggatcccgtctcggacgacgacatccgtcagaaccgcatctacaagattctggaactgaaccactacgacccagcgtacgtggggagtattttggtcgggtggtgccagaagaaatggggcaagcgaaacacgctgtggctgttcggacatgcgaccaccggcaagaccaacatcgcggaggctattgcccatgctgtgccgttctatggatgcgttaactggaccaacgagaactttccgttcaacgactgcgtcgaaaaaatgattatctggtgggaggagggcaaaatgaccgccaaagtggtggaaacagccaaggcgattctgggaggatctcgggtgagagtggaccaaaaatgcaaagcttcggttccgatcgaaccgacgccggtcattattaccagtaacaccaacatgtgttatgtcatcgacgggaacacgaccacgttcgagcataagcagccgttggaggacaggatgtttaagctcgaattgctgactcggttgcctgatgactttggtaaggtgaccaaacaggaggtgcgtcaattcttcaggtggtctcaggatcacctgacccctgtgatcccagaattcctagtgcggaaggcggagtctcgcaaaagacccgccccttccggggaaggctatataagcccgacaaagcggcccgcgctcgcagagcagcagcaggcgtcggagagcgcggacccggttcccaccagattggttggagcggttggtcaaaaagggagtgaatgctgcagctga

SEQ ID NO: 536 - DNA, 1608 bp, Artificial Sequence
  Description of Artificial Sequence: Synthetic polynucleotide
atggctgaaggaggtggcggcccagtgggcgatgcaggccagggtgccgatggagtgggcaattcctccggaaattggcattgcgattcccaatggctggaaaacggagtcgtcactcgaaccacccgaacctgggtcttgcccagctacaacaaccacctgtacaaacgaatccaaggacccagcggaggcgacaacaacaacaaattctttggattcagcaccccctggggatactttgactacaatcgattccactgccacttttccccgcgagactggcaacgactcatcaacaacaactggggcatccgtcccaaagcgatgcgctttagactctttaacatccaggttaaagaggtcacggtccaagacttcaacaccaccatcggcaacaacctcaccagtacggtccaggtctttgcggacaaggactaccaactgccgtacgtcctcggatcggctaccgaaggcaccttcccgccgttcccagcggatatctacacgatcccgcagtacgggtactgcacgctaaactacaacaacgaggcggtggatcgttcggccttctactgtctggactactttccctcagacatgctgcggacaggaaataactttgagtttacttacaccttcgaggacgttcctttccatagcatgtttgcccacaaccagacgctagaccggctgatgaatcccctcgtggatcagtacctctgggctttcagctccgtcagccaagcaggctcatctggacgagctcttcattactcgcgggcgactaaaaccaacatggcggctcaatataggaactggttacctgggcctttcttccgtgatcagcaaatctttacgggcgctagcaacatcactaaaaataacgtctttagcgtttgggaaaaaggcaagcaatgggaactcgacaatcggaccaacctaatgcagcccggtcctgcggcagcgaccacctttagcggagaacctgaccgtcaagccatgcaaaacacgctggcttttagcaggaccgtctacgatcaaacgaccgccacgaccgatcgtaaccagatactcatcaccaacgaagacgaaatcagacccaccaactcggtcggtatcgacgcgtggggagcagttcccaccaacaaccagtcgatcgtgacccccggcactcgcgcggccgtcaacaatcaaggggcgcttcccgggatggtgtggcaaaacagagacatttaccctacagggacccatttggccaaaattcccgacactgacaatcacttccatccgtccccgcttattgggcggtttggctgcaagcatccccctccccagattttcattaaaaacacacccgtccctgccaacccttcggaaacgttccagacggccaaagtggcctccttcatcaaccagtactcgaccggacagtgcaccgtcgaaatcttttgggaactcaagaaggaaacctccaagcgctggaaccccgaaatccagttcacctccaactttggcaacgcggccgacatccagtttgccgtctccgacacgggatcctattccgaacctcgtcccatcggtacccgttaccttaccaaacctctgtaa

SEQ ID NO: 537 - DNA, 2232 bp, Artificial Sequence
  Description of Artificial Sequence: Synthetic polynucleotide
atgtctctcatttctgatgcgattccagattggttggagcggttggtcaaaaagggagtgaatgctgcagctgatttctaccatttggaaagcggtcctcctcgtcctaaggcaaatcagcaaactcaagaatctcttgaaaaggacgattcgagaggtctcgtgttcccaggctacaattatctaggccctttcaacggtctagataaaggagaacccgtcaacgaggcagacgctgccgccttagaacacgacaaggcttacgacctcgaaatcaaggacgggcacaacccgtactttgagtacaacgaggccgacagacgtttccaggaacgtctcaaagacgatacctcctttggaggcaatttaggtaaagccatcttccaggccaaaaagagggttctcgaaccctttggtctggtggaagactcaaagacggctccgaccggagacaagcggaaaggcgaagacgaacctcgtttgcccgacacttcttcacagactcccaagaaaaacaagaagcctcgcaaggaaagaccttccggcggggcagaagatccgggcgaaggcacctcttccaacgctggagcagcagcacccgcctctagtgtgggatcatctatcatggctgaaggaggtggcggcccagtgggcgatgcaggccagggtgccgatggagtgggcaattcctccggaaattggcattgcgattcccaatggctggaaaacggagtcgtcactcgaaccacccgaacctgggtcttgcccagctacaacaaccacctgtacaaacgaatccaaggacccagcggaggcgacaacaacaacaaattctttggattcagcaccccctggggatactttgactacaatcgattccactgccacttttccccgcgagactggcaacgactcatcaacaacaactggggcatccgtcccaaagcgatgcgctttagactctttaacatccaggttaaagaggtcacggtccaagacttcaacaccaccatcggcaacaacctcaccagtacggtccaggtctttgcggacaaggactaccaactgccgtacgtcctcggatcggctaccgaaggcaccttcccgccgttcccagcggatatctacacgatcccgcagtacgggtactgcacgctaaactacaacaacgaggcggtggatcgttcggccttctactgtctggactactttccctcagacatgctgcggacaggaaataactttgagtttacttacaccttcgaggacgttcctttccatagcatgtttgcccacaaccagacgctagaccggctgatgaatcccctcgtggatcagtacctctgggctttcagctccgtcagccaagcaggctcatctggacgagctcttcattactcgcgggcgactaaaaccaacatggcggctcaatataggaactggttacctgggcctttcttccgtgatcagcaaatctttacgggcgctagcaacatcactaaaaataacgtctttagcgtttgggaaaaaggcaagcaatgggaactcgacaatcggaccaacctaatgcagcccggtcctgcggcagcgaccacctttagcggagaacctgaccgtcaagccatgcaaaacacgctggcttttagcaggaccgtctacgatcaaacgaccgccacgaccgatcgtaaccagatactcatcaccaacgaagacgaaatcagacccaccaactcggtcggtatcgacgcgtggggagcagttcccaccaacaaccagtcgatcgtgacccccggcactcgcgcggccgtcaacaatcaaggggcgcttcccgggatggtgtggcaaaacagagacatttaccctacagggacccatttggccaaaattcccgacactgacaatcacttccatccgtccccgcttattgggcggtttggctgcaagcatccccctccccagattttcattaaaaacacacccgtccctgccaacccttcggaaacgttccagacggccaaagtggcctccttcatcaaccagtactcgaccggacagtgcaccgtcgaaatcttttgggaactcaagaaggaaacctccaagcgctggaaccccgaaatccagttcacctccaactttggcaacgcggccgacatccagtttgccgtctccgacacgggatcctattccgaacctcgtcccatcggtacccgttaccttaccaaacctctgtaa

SEQ ID NO: 538 - protein, 535 aa, Artificial Sequence
  Description of Artificial Sequence: Synthetic polypeptide
MAEGGGGPVGDAGQGADGVGNSSGNWHCDSQWLENGVVTRTTRTWVLPSYNNHLYKRIQGPSGGDNNNKFFGFSTPWGYFDYNRFHCHFSPRDWQRLINNNWGIRPKAMRFRLFNIQVKEVTVQDFNTTIGNNLTSTVQVFADKDYQLPYVLGSATEGTFPPFPADIYTIPQYGYCTLNYNNEAVDRSAFYCLDYFPSDMLRTGNNFEFTYTFEDVPFHSMFAHNQTLDRLMNPLVDQYLWAFSSVSQAGSSGRALHYSRATKTNMAAQYRNWLPGPFFRDQQIFTGASNITKNNVFSVWEKGKQWELDNRTNLMQPGPAAATTFSGEPDRQAMQNTLAFSRTVYDQTTATTDRNQILITNEDEIRPTNSVGIDAWGAVPTNNQSIVTPGTRAAVNNQGALPGMVWQNRDIYPTGTHLAKIPDTDNHFHPSPLIGRFGCKHPPPQIFIKNTPVPANPSETFQTAKVASFINQYSTGQCTVEIFWELKKETSKRWNPEIQFTSNFGNAADIQFAVSDTGSYSEPRPIGTRYLTKPL

SEQ ID NO: 539 - protein, 440 aa, Artificial Sequence
  Description of Artificial Sequence: Synthetic polypeptide
MELVDWLVEKGITTEKEWLLENRESFRSFQASSNSARQIKTALQGAIQEMLLTKTAEDYLVGKDPVSDDDIRQNRIYKILELNHYDPAYVGSILVGWCQKKWGKRNTLWLFGHATTGKTNIAEAIAHAVPFYGCVNWTNENFPFNDCVEKMIIWWEEGKMTAKVVETAKAILGGSRVRVDQKCKASVPIEPTPVIITSNTNMCYVIDGNTTTFEHKQPLEDRMFKLELLTRLPDDFGKVTKQEVRQFFRWSQDHLTPVIPEFLVRKAESRKRPAPSGEGYISPTKRPALAEQQQASESADPVPTRYRIKCSKHCGMDKMLFPCQICESMNRDINICAIHKTTDCKECFPDYGDKDDVELPPCTEHNVSRCYQCHSGELYRVTSDSDEKPAPESDEGTEPSYAPCTIHHLMGKSHGLVTCAACRLKNSTLHDDLDDGDLEQ

SEQ ID NO: 540 - protein, 319 aa, Artificial Sequence
  Description of Artificial Sequence: Synthetic polypeptide
MELVDWLVEKGITTEKEWLLENRESFRSFQASSNSARQIKTALQGAIQEMLLTKTAEDYLVGKDPVSDDDIRQNRIYKILELNHYDPAYVGSILVGWCQKKWGKRNTLWLFGHATTGKTNIAEAIAHAVPFYGCVNWTNENFPFNDCVEKMIIWWEEGKMTAKVVETAKAILGGSRVRVDQKCKASVPIEPTPVIITSNTNMCYVIDGNTTTFEHKQPLEDRMFKLELLTRLPDDFGKVTKQEVRQFFRWSQDHLTPVIPEFLVRKAESRKRPAPSGEGYISPTKRPALAEQQQASESADPVPTRLVGAVGQKGSECCS

SEQ ID NO: 541 - protein, 662 aa, Artificial Sequence
  Description of Artificial Sequence: Synthetic polypeptide
MRSYYEVIVQLPNDVESQVPGISDSFVNWITSREWTLPEDADWDLDQVDQVQLTLGDKIQREIRTHWGTMAKEPDFHYFIQLEQGEVFFHLHVLLETCSVKPMVLGRYIRHIQQKIVSKVYCATSLRWKDGCVVTKTKNFGGANKVRAESYIPAYLIPKQQPEVQWAWTNVPEYIKACLHRELRASLARLHFEEAGVSQSKENLARTADGAPVMPTRVSKRYMELVDWLVEKGITTEKEWLLENRESFRSFQASSNSARQIKTALQGAIQEMLLTKTAEDYLVGKDPVSDDDIRQNRIYKILELNHYDPAYVGSILVGWCQKKWGKRNTLWLFGHATTGKTNIAEAIAHAVPFYGCVNWTNENFPFNDCVEKMIIWWEEGKMTAKVVETAKAILGGSRVRVDQKCKASVPIEPTPVIITSNTNMCYVIDGNTTTFEHKQPLEDRMFKLELLTRLPDDFGKVTKQEVRQFFRWSQDHLTPVIPEFLVRKAESRKRPAPSGEGYISPTKRPALAEQQQASESADPVPTRYRIKCSKHCGMDKMLFPCQICESMNRDINICAIHKTTDCKECFPDYGDKDDVELPPCTEHNVSRCYQCHSGELYRVTSDSDEKPAPESDEGTEPSYAPCTIHHLMGKSHGLVTCAACRLKNSTLHDDLDDGDLEQ

SEQ ID NO: 542 - protein, 541 aa, Artificial Sequence
  Description of Artificial Sequence: Synthetic polypeptide
MRSYYEVIVQLPNDVESQVPGISDSFVNWITSREWTLPEDADWDLDQVDQVQLTLGDKIQREIRTHWGTMAKEPDFHYFIQLEQGEVFFHLHVLLETCSVKPMVLGRYIRHIQQKIVSKVYCATSLRWKDGCVVTKTKNFGGANKVRAESYIPAYLIPKQQPEVQWAWTNVPEYIKACLHRELRASLARLHFEEAGVSQSKENLARTADGAPVMPTRVSKRYMELVDWLVEKGITTEKEWLLENRESFRSFQASSNSARQIKTALQGAIQEMLLTKTAEDYLVGKDPVSDDDIRQNRIYKILELNHYDPAYVGSILVGWCQKKWGKRNTLWLFGHATTGKTNIAEAIAHAVPFYGCVNWTNENFPFNDCVEKMIIWWEEGKMTAKVVETAKAILGGSRVRVDQKCKASVPIEPTPVIITSNTNMCYVIDGNTTTFEHKQPLEDRMFKLELLTRLPDDFGKVTKQEVRQFFRWSQDHLTPVIPEFLVRKAESRKRPAPSGEGYISPTKRPALAEQQQASESADPVPTRLVGAVGQKGSECCS

SEQ ID NO: 543 - protein, 743 aa, Artificial Sequence
  Description of Artificial Sequence: Synthetic polypeptide
MSLISDAIPDWLERLVKKGVNAAADFYHLESGPPRPKANQQTQESLEKDDSRGLVFPGYNYLGPFNGLDKGEPVNEADAAALEHDKAYDLEIKDGHNPYFEYNEADRRFQERLKDDTSFGGNLGKAIFQAKKRVLEPFGLVEDSKTAPTGDKRKGEDEPRLPDTSSQTPKKNKKPRKERPSGGAEDPGEGTSSNAGAAAPASSVGSSIMAEGGGGPVGDAGQGADGVGNSSGNWHCDSQWLENGVVTRTTRTWVLPSYNNHLYKRIQGPSGGDNNNKFFGFSTPWGYFDYNRFHCHFSPRDWQRLINNNWGIRPKAMRFRLFNIQVKEVTVQDFNTTIGNNLTSTVQVFADKDYQLPYVLGSATEGTFPPFPADIYTIPQYGYCTLNYNNEAVDRSAFYCLDYFPSDMLRTGNNFEFTYTFEDVPFHSMFAHNQTLDRLMNPLVDQYLWAFSSVSQAGSSGRALHYSRATKTNMAAQYRNWLPGPFFRDQQIFTGASNITKNNVFSVWEKGKQWELDNRTNLMQPGPAAATTFSGEPDRQAMQNTLAFSRTVYDQTTATTDRNQILITNEDEIRPTNSVGIDAWGAVPTNNQSIVTPGTRAAVNNQGALPGMVWQNRDIYPTGTHLAKIPDTDNHFHPSPLIGRFGCKHPPPQIFIKNTPVPANPSETFQTAKVASFINQYSTGQCTVEIFWELKKETSKRWNPEIQFTSNFGNAADIQFAVSDTGSYSEPRPIGTRYLTKPL

SEQ ID NO: 544 - protein, 598 aa, Artificial Sequence
  Description of Artificial Sequence: Synthetic polypeptide
TAPTGDKRKGEDEPRLPDTSSQTPKKNKKPRKERPSGGAEDPGEGTSSNAGAAAPASSVGSSIMAEGGGGPVGDAGQGADGVGNSSGNWHCDSQWLENGVVTRTTRTWVLPSYNNHLYKRIQGPSGGDNNNKFFGFSTPWGYFDYNRFHCHFSPRDWQRLINNNWGIRPKAMRFRLFNIQVKEVTVQDFNTTIGNNLTSTVQVFADKDYQLPYVLGSATEGTFPPFPADIYTIPQYGYCTLNYNNEAVDRSAFYCLDYFPSDMLRTGNNFEFTYTFEDVPFHSMFAHNQTLDRLMNPLVDQYLWAFSSVSQAGSSGRALHYSRATKTNMAAQYRNWLPGPFFRDQQIFTGASNITKNNVFSVWEKGKQWELDNRTNLMQPGPAAATTFSGEPDRQAMQNTLAFSRTVYDQTTATTDRNQILITNEDEIRPTNSVGIDAWGAVPTNNQSIVTPGTRAAVNNQGALPGMVWQNRDIYPTGTHLAKIPDTDNHFHPSPLIGRFGCKHPPPQIFIKNTPVPANPSETFQTAKVASFINQYSTGQCTVEIFWELKKETSKRWNPEIQFTSNFGNAADIQFAVSDTGSYSEPRPIGTRYLTKPL

SEQ ID NO: 545 - DNA, 4694 bp, Artificial Sequence
  Description of Artificial Sequence: Synthetic polynucleotide
tggccagtttccaagacaggctcgctcgctcactcgggccggggccccaaaggggcccctagcgaccgcttcgcggtcgcggcccgagtgagcgagcgagcctgtcttggaaactggccagcactccggtgaggtaatgccgtcacgtggtcgggaatgggaacgggaaatctcgcgagaacgtaaacaaatataagacggcgccacacggcgctgcgtcatacgcgcgcgcgcaccggcgagatgaggtcgtactacgaggtcatcgttcagctgcccaacgacgtcgagagtcaggtacctggaatctccgattcgttcgtcaactggattacgtcgcgagaatggacgttgcctgaggacgccgattgggatttggaccaggtcgatcaagttcaactgacgctcggcgacaaaatccaacgggagattcgaactcattgggggacgatggccaaagaaccggactttcactattttatccaactggaacaaggtgaggtgttctttcatttacacgtcctgctggaaacgtgttccgtaaagccgatggtactcggaagatatatccgacatattcaacaaaaaattgtgagtaaagtctactgcgccacgagcctacgatggaaggatggatgcgtggtgaccaagaccaaaaatttcgggggcgcgaacaaggtccgggccgagtcgtatattcccgcctacctgatcccgaaacagcaaccggaagtgcagtgggcgtggactaacgtgcccgagtatataaaagcgtgcttgcaccgagaactgcgtgccagtctcgcgcgacttcacttcgaggaggcgggcgtctcgcaatccaaggaaaatctcgcgagaactgcagacggcgctcccgtgatgccgacccgcgtcagcaaacgctacatggagctcgtggattggctcgtggagaaggggatcaccaccgagaaggaatggctgctggaaaacagagaaagctttcggagctttcaggcctcgagcaactcggcgcgtcagatcaagacggccctgcaaggcgccattcaggagatgcttctgaccaagacggcggaggactacctcgtcggaaaggatcccgtctcggacgacgacatccgtcagaaccgcatctacaagattctggaactgaaccactacgacccagcgtacgtggggagtattttggtcgggtggtgccagaagaaatggggcaagcgaaacacgctgtggctgttcggacatgcgaccaccggcaagaccaacatcgcggaggctattgcccatgctgtgccgttctatggatgcgttaactggaccaacgagaactttccgttcaacgactgcgtcgaaaaaatgattatctggtgggaggagggcaaaatgaccgccaaagtggtggaaacagccaaggcgattctgggaggatctcgggtgagagtggaccaaaaatgcaaagcttcggttccgatcgaaccgacgccggtcattattaccagtaacaccaacatgtgttatgtcatcgacgggaacacgaccacgttcgagcataagcagccgttggaggacaggatgtttaagctcgaattgctgactcggttgcctgatgactttggtaaggtgaccaaacaggaggtgcgtcaattcttcaggtggtctcaggatcacctgacccctgtgatcccagaattcctagtgcggaaggcggagtctcgcaaaagacccgccccttccggggaaggctatataagcccgacaaagcggcccgcgctcgcagagcagcagcaggcgtcggagagcgcggacccggttcccaccaggtatcgtatcaaatgctcgaaacattgcggtatggataaaatgttgtttccttgccaaatttgtgaatcgatgaacagagatattaatatttgtgctattcataaaacgaccgactgtaaagagtgtttccccgactacggggataaagatgatgtagaactacccccctgtacagaacacaacgtgtctcgttgttatcaatgtcattcgggcgaattgtatcgcgtgacttcggactctgacgagaaacctgcccccgagagtgatgaaggcaccgagccatcctatgctccctgcacgattcaccacctgatgggcaagagtcacgggttagtcacttgcgcggcgtgtcggttgaaaaatagtacgttgcatgatgacttggatgacggtgatctcgaacaataaatgattgaaatgtagccatgtctctcatttctgatgcgattccagattggttggagcggttggtcaaaaagggagtgaatgctgcagctgatttctaccatttggaaagcggtcctcctcgtcctaaggcaaatcagcaaactcaagaatctcttgaaaaggacgattcgagaggtctcgtgttcccaggctacaattatctaggccctttcaacggtctagataaaggagaacccgtcaacgaggcagacgctgccgccttagaacacgacaaggcttacgacctcgaaatcaaggacgggcacaacccgtactttgagtacaacgaggccgacagacgtttccaggaacgtctcaaagacgatacctcctttggaggcaatttaggtaaagccatcttccaggccaaaaagagggttctcgaaccctttggtctggtggaagactcaaagacggctccgaccggagacaagcggaaaggcgaagacgaacctcgtttgcccgacacttcttcacagactcccaagaaaaacaagaagcctcgcaaggaaagaccttccggcggggcagaagatccgggcgaaggcacctcttccaacgctggagcagcagcacccgcctctagtgtgggatcatctatcatggctgaaggaggtggcggcccagtgggcgatgcaggccagggtgccgatggagtgggcaattcctccggaaattggcattgcgattcccaatggctggaaaacggagtcgtcactcgaaccacccgaacctgggtcttgcccagctacaacaaccacctgtacaaacgaatccaaggacccagcggaggcgacaacaacaacaaattctttggattcagcaccccctggggatactttgactacaatcgattccactgccacttttccccgcgagactggcaacgactcatcaacaacaactggggcatccgtcccaaagcgatgcgctttagactctttaacatccaggttaaagaggtcacggtccaagacttcaacaccaccatcggcaacaacctcaccagtacggtccaggtctttgcggacaaggactaccaactgccgtacgtcctcggatcggctaccgaaggcaccttcccgccgttcccagcggatatctacacgatcccgcagtacgggtactgcacgctaaactacaacaacgaggcggtggatcgttcggccttctactgtctggactactttccctcagacatgctgcggacaggaaataactttgagtttacttacaccttcgaggacgttcctttccatagcatgtttgcccacaaccagacgctagaccggctgatgaatcccctcgtggatcagtacctctgggctttcagctccgtcagccaagcaggctcatctggacgagctcttcattactcgcgggcgactaaaaccaacatggcggctcaatataggaactggttacctgggcctttcttccgtgatcagcaaatctttacgggcgctagcaacatcactaaaaataacgtctttagcgtttgggaaaaaggcaagcaatgggaactcgacaatcggaccaacctaatgcagcccggtcctgcggcagcgaccacctttagcggagaacctgaccgtcaagccatgcaaaacacgctggcttttagcaggaccgtctacgatcaaacgaccgccacgaccgatcgtaaccagatactcatcaccaacgaagacgaaatcagacccaccaactcggtcggtatcgacgcgtggggagcagttcccaccaacaaccagtcgatcgtgacccccggcactcgcgcggccgtcaacaatcaaggggcgcttcccgggatggtgtggcaaaacagagacatttaccctacagggacccatttggccaaaattcccgacactgacaatcacttccatccgtccccgcttattgggcggtttggctgcaagcatccccctccccagattttcattaaaaacacacccgtccctgccaacccttcggaaacgttccagacggccaaagtggcctccttcatcaaccagtactcgaccggacagtgcaccgtcgaaatcttttgggaactcaagaaggaaacctccaagcgctggaaccccgaaatccagttcacctccaactttggcaacgcggccgacatccagtttgccgtctccgacacgggatcctattccgaacctcgtcccatcggtacccgttaccttaccaaacctctgtaaattaaacccttcaataaaccgtttatgcgtaactgtatttccgtctcctgtcgttattcagtcacatgatgcggcattacctcaccggagtgctggccagtttccaagacaggctcgctcgctcactcgggccggggccccaaaggggcccctagcgaccgcttcgcggtcgcggcccgagtgagcgagcgagcctgtcttggaaactggcca

SEQ ID NO: 546 - DNA, 2211 bp, Artificial Sequence
  Description of Artificial Sequence: Synthetic polynucleotide
atggctgctgatggttatcttccagattggctcgaggacactctctctgaaggaataagacagtggtggaagctcaaacctggcccaccaccaccaaagcccgcagagcggcataaggacgacagcaggggtcttgtgcttcctgggtacaagtacctcggacccttcaacggactcgacaagggagagccggtcaacgaggcagacgcagcggccctcgagcacgacaaggcctacgaccagcagctcaaggccggtgacaacccctacctcaagtacaaccacgccgacgcggagttccagcagcggcttcagggcgacacatcgtttgggggcaacctcggcagagcagtcttccaggccaaaaagagggttcttgaacctcttggtctggttgagcaagcgggtgagacggctcctggaaagaagagaccgttgattgaatccccccagcagcccgactcctccacgggtatcggcaaaaaaggcaagcagccggctaaaaagagactcaattttggtcagactggcgactcagagtcagtccccgacccacaacctctcggagaacctccagcaacccccgctgctgtgggacctactacaatggcttcaggtggtggcgcaccaatggcagacaataacgaaggcgccgacggagtgggtaatgcctcaggaaattggcattgcgattccacatggctgggcgacagagtcatcaccaccagcacccgcacctgggccttgcccacctacaataaccacctctacaagcaaatctccagtgcttcaacgggggccagcaacgacaaccactacttcggctacagcaccccctgggggtattttgacttcaacagattccactgccacttttcaccacgtgactggcagcgactcatcaacaacaattggggattccggcccaagagactcaacttcaaactcttcaacatccaagtcaaggaggtcacgacgaatgatggcgtcacaaccatcgctaataaccttaccagcacggttcaagtcttctcggactcagactatcagctcccgtacgtgctcgggtcggctcacgagggctgcctcccgccgttcccagcagacgtcttcatggtgccacagtatggatacctcaccctgaacaacgggagtcaggcagtaggacgctcttcattttactgcctggagtactttccttctcagatgctgcgtaccggaaacaactttaccttcagctacacttttgaggacgttcctttccacagcagctacgctcacagccagagtctggaccgtctcatgaatcctctcatcgaccagtacctgtattacctgaacagaactcagaatcagtccggaagtgcccaaaacaaggacttgctgtttagccgggggtctccagctggcatgtctgttcagcccaaaaactggctacctggaccctgttatcggcagcagcgcgtttctaaaacaaaaacagacaacaacaacagcaactttacctggactggtgcttcaaaatataaccttaatgggcgtgaatctataatcaaccctggcactgctatggcctcacacaaagacgacaaagacaagttctttcccatgagcggtgtcatgatttttggaaaggagagcgccggagcttcaaacactgcattggacaatgtcatgatcacagacgaagaggaaatcaaagccactaaccccgtggccaccgaaagatttgggactgtggcagtcaatctccagagcagcagcacagaccctgcgaccggagatgtgcatgttatgggagccttacctggaatggtgtggcaagacagagacgtatacctgcagggtcccatttgggccaaaattcctcacacagatggacactttcacccgtctcctcttatgggcggctttggactcaagaacccgcctcctcagatcctcatcaaaaacacgcctgttcctgcgaatcctccggcggagttttcagctacaaagtttgcttcattcatcacccaatactccacaggacaagtgagtgtggaaattgaatgggagctgcagaaagaaaacagcaagcgctggaatcccgaagtgcagtacacatccaattatgcaaaatctgccaacgttgattttactgtggacaacaatggactttatactgagcctcgccccattggcacccgttacctcacccgtcccctgtaa

SEQ ID NO: 547 - protein, 736 aa, Artificial Sequence
  Description of Artificial Sequence: Synthetic polypeptide
MAADGYLPDWLEDTLSEGIRQWWKLKPGPPPPKPAERHKDDSRGLVLPGYKYLGPFNGLDKGEPVNEADAAALEHDKAYDQQLKAGDNPYLKYNHADAEFQQRLQGDTSFGGNLGRAVFQAKKRVLEPLGLVEQAGETAPGKKRPLIESPQQPDSSTGIGKKGKQPAKKRLNFGQTGDSESVPDPQPLGEPPATPAAVGPTTMASGGGAPMADNNEGADGVGNASGNWHCDSTWLGDRVITTSTRTWALPTYNNHLYKQISSASTGASNDNHYFGYSTPWGYFDFNRFHCHFSPRDWQRLINNNWGFRPKRLNFKLFNIQVKEVTTNDGVTTIANNLTSTVQVFSDSDYQLPYVLGSAHEGCLPPFPADVFMVPQYGYLTLNNGSQAVGRSSFYCLEYFPSQMLRTGNNFTFSYTFEDVPFHSSYAHSQSLDRLMNPLIDQYLYYLNRTQNQSGSAQNKDLLFSRGSPAGMSVQPKNWLPGPCYRQQRVSKTKTDNNNSNFTWTGASKYNLNGRESIINPGTAMASHKDDKDKFFPMSGVMIFGKESAGASNTALDNVMITDEEEIKATNPVATERFGTVAVNLQSSSTDPATGDVHVMGALPGMVWQDRDVYLQGPIWAKIPHTDGHFHPSPLMGGFGLKNPPPQILIKNTPVPANPPAEFSATKFASFITQYSTGQVSVEIEWELQKENSKRWNPEVQYTSNYAKSANVDFTVDNNGLYTEPRPIGTRYLTRPL

SEQ ID NO: 548 - DNA, 2211 bp, Artificial Sequence
  Description of Artificial Sequence: Synthetic polynucleotide
atggcttccgatggttatcttccagattggctcgaggacaacctctctgagggcatccgcgagtggtgggacttgaaacctggagccccgaaacccaaagccaaccagcaaaagcaggacgacggccggggtctggtgcttcctggctacaagtacctcggacccttcaacggactcgacaagggggagcccgtcaacgcggcggatgcagcggccctcgagcacgacaaggcctacgaccagcagctcagagcgggtgacaatccgtacctgcggtataaccacgccgacgccgagtttcaggagcgtctgcaagaagatacgtcttttgggggcaacctcgggcgagcagtcttccaggccaagaagagggttctcgaaccttttggtctggttgaggaaggtgctaagacggctcctggaaagaaacgtccggtagagcagtcgccacaagagccagactcctcctcgggcattggcaagacaggccagcagcccgctaaaaagagactcaattttggtcagactggcgactcagagtcagtccccgacccacaacctctcggagaacctccagcaacccccgctgctgtgggacctactacaatggcttcaggcggtggcgcaccaatggcagacaataacgaaggcgccgacggagtgggtaatgcctcaggaaattggcattgcgattccacatggctgggcgacagagtcatcaccaccagcacccgaacatgggccttgcccacctataacaaccacctctacaagcaaatctccagtgcttcaacgggggccagcaacgacaaccactacttcggctacagcaccccctgggggtattttgatttcaacagattccactgccatttctcaccacgtgactggcagcgactcatcaacaacaattggggattccggcccaagagactcaacttcaaactcttcaacatccaagtcaaggaggtcacgacgaatgatggcgtcacaaccatcgctaataaccttaccagcacggttcaagtcttctcggactcggagtaccagcttccgtacgtcctcggctctgcgcaccagggctgcctccctccgttcccggcggacgtgttcatgattccgcagtacggctacctaacgctcaacaatggcagccaggcagtgggacggtcatccttttactgcctggaatatttcccatcgcagatgctgagaacgggcaataactttaccttcagctacaccttcgaggacgtgcctttccacagcagctacgcgcacagccagagcctggaccggctgatgaatcctctcatcgaccagtacctgtattacctgaacagaactcagaatcagtccggaagtgcccaaaacaaggacttgctgtttagccgggggtctccagctggcatgtctgttcagcccaaaaactggctacctggaccctgttaccggcagcagcgcgtttctaaaacaaaaacagacaacaacaacagcaactttacctggactggtgcttcaaaatataaccttaatgggcgtgaatctataatcaaccctggcactgctatggcctcacacaaagacgacaaagacaagttctttcccatgagcggtgtcatgatttttggaaaggagagcgccggagcttcaaacactgcattggacaatgtcatgatcacagacgaagaggaaatcaaagccactaaccccgtggccaccgaaagatttgggactgtggcagtcaatctccagagcagcagcacagaccctgcgaccggagatgtgcatgttatgggagccttacctggaatggtgtggcaagacagagacgtatacctgcagggtcccatttgggccaaaattcctcacacagatggacactttcacccgtctcctcttatgggcggctttggacttaagcacccgcctcctcagatcctcatcaaaaacacgcctgttcctgcgaatcctccggcagagttttcggctacaaagtttgcttcattcatcacccagtattctactggccaagtcagcgtggagattgaatgggagctgcagaaagaaaacagcaaacgctggaatcccgaagtgcagtatacatctaactatgcaaaatctgccaacgttgatttcactgtggacaacaatggactttatactgagcctcgtcccattggcacccgttacctcacccgtcccctgtaa

SEQ ID NO: 549 - protein, 736 aa, Artificial Sequence
  Description of Artificial Sequence: Synthetic polypeptide
MASDGYLPDWLEDNLSEGIREWWDLKPGAPKPKANQQKQDDGRGLVLPGYKYLGPFNGLDKGEPVNAADAAALEHDKAYDQQLRAGDNPYLRYNHADAEFQERLQEDTSFGGNLGRAVFQAKKRVLEPFGLVEEGAKTAPGKKRPVEQSPQEPDSSSGIGKTGQQPAKKRLNFGQTGDSESVPDPQPLGEPPATPAAVGPTTMASGGGAPMADNNEGADGVGNASGNWHCDSTWLGDRVITTSTRTWALPTYNNHLYKQISSASTGASNDNHYFGYSTPWGYFDFNRFHCHFSPRDWQRLINNNWGFRPKRLNFKLFNIQVKEVTTNDGVTTIANNLTSTVQVFSDSEYQLPYVLGSAHQGCLPPFPADVFMIPQYGYLTLNNGSQAVGRSSFYCLEYFPSQMLRTGNNFTFSYTFEDVPFHSSYAHSQSLDRLMNPLIDQYLYYLNRTQNQSGSAQNKDLLFSRGSPAGMSVQPKNWLPGPCYRQQRVSKTKTDNNNSNFTWTGASKYNLNGRESIINPGTAMASHKDDKDKFFPMSGVMIFGKESAGASNTALDNVMITDEEEIKATNPVATERFGTVAVNLQSSSTDPATGDVHVMGALPGMVWQDRDVYLQGPIWAKIPHTDGHFHPSPLMGGFGLKHPPPQILIKNTPVPANPPAEFSATKFASFITQYSTGQVSVEIEWELQKENSKRWNPEVQYTSNYAKSANVDFTVDNNGLYTEPRPIGTRYLTRPL

SEQ ID NO: 550 - DNA, 2211 bp, Artificial Sequence
  Description of Artificial Sequence: Synthetic polynucleotide
atggctgctgatggttatcttccagattggctcgaggacactctctctgaaggaataagacagtggtggaagctcaaacctggcccaccaccaccaaagcccgcagagcggcataaggacgacagcaggggtcttgtgcttcctgggtacaagtacctcggacccttcaacggactcgacaagggagagccggtcaacgaggcagacgcagcggccctcgagcacgacaaggcctacgaccagcagctcaaggccggtgacaacccctacctcaagtacaaccacgccgacgcggagttccagcagcggcttcagggcgacacatcgtttgggggcaacctcggcagagcagtcttccaggccaaaaagagggttcttgaacctcttggtctggttgagcaagcgggtgagacggctcctggaaagaagagaccgttgattgaatccccccagcagcccgactcctccacgggtatcggcaaaaaaggcaagcagccggctaaaaagagactcaattttggtcagactggcgactcagagtcagtccccgacccacaacctctcggagaacctccagcaacccccgctgctgtgggacctactacaatggcttcaggtggtggcgcaccaatggcagacaataacgaaggcgccgacggagtgggtaatgcctcaggaaattggcattgcgattccacatggctgggcgacagagtcatcaccaccagcacccgcacctgggccttgcccacctacaataaccacctctacaagcaaatctccagtgcttcaacgggggccagcaacgacaaccactacttcggctacagcaccccctgggggtattttgacttcaacagattccactgccacttttcaccacgtgactggcagcgactcatcaacaacaattggggattccggcccaagagactcaacttcaaactcttcaacatccaagtcaaggaggtcacgacgaatgatggcgtcacaaccatcgctaataaccttaccagcacggttcaagtcttctcggactcagactatcagctcccgtacgtgctcgggtcggctcacgagggctgcctcccgccgttcccagcagacgtcttcatggtgccacagtatggatacctcaccctgaacaacgggagtcaggcagtaggacgctcttcattttactgcctggagtactttccttctcagatgctgcgtaccggaaacaactttaccttcagctacacttttgaggacgttcctttccacagcagctacgctcacagccagagtctggaccgtctcatgaatcctctcatcgaccagtacctgtattacctgaacagaactcagaatcagtccggaagtgcccaaaacaaggacttgctgtttagccgggggtctccaactggcatgtctgttcagcccaaaaactggctacctggaccctgttatcggcagcagcgcgtttctaaaacaaaaacagacaacaacaacagcaactttacctggactggtgcttcaaaatataaccttaatgggcgtgaatctataatcaaccctggcactgctatggcctcacacaaagacgacaaagacaagttctttcccatgagcggtgtcatgatttttggaaaggagagcgccggagcttcaaacactgcattggacaatgtcatgatcacagacgaagaggaaatcaaagccactaaccccgtggccactgaaagatttgggactgtggcagtcaatctccagagcagcagcacagaccctgcgaccggagatgtgcatgccatgggagccttacctggaatggtgtggcaagacagagacgtatacctgcagggtcctatttgggccaaaattcctcacacggatggacactttcacccgtctcctctcatgggcggctttggactcaagaacccgcctcctcagatcctcatcaaaaacacgcctgttcctgcgaatcctccggcggagttttcagctacaaagtttgcttcattcatcacccagtattccacaggacaagtgagcgtggagattgaatgggagctgcagaaagaaaacagcaaacgctggaatcccgaagtgcagtatacatctaactatgcaaaatctgccaacgttgatttcactgtggacaacaatggactttatactgagcctcgccccattggcacccgttacctcacccgtcccctgtaa

SEQ ID NO: 551 - protein, 736 aa, Artificial Sequence
  Description of Artificial Sequence: Synthetic polypeptide
MAADGYLPDWLEDTLSEGIRQWWKLKPGPPPPKPAERHKDDSRGLVLPGYKYLGPFNGLDKGEPVNEADAAALEHDKAYDQQLKAGDNPYLKYNHADAEFQQRLQGDTSFGGNLGRAVFQAKKRVLEPLGLVEQAGETAPGKKRPLIESPQQPDSSTGIGKKGKQPAKKRLNFGQTGDSESVPDPQPLGEPPATPAAVGPTTMASGGGAPMADNNEGADGVGNASGNWHCDSTWLGDRVITTSTRTWALPTYNNHLYKQISSASTGASNDNHYFGYSTPWGYFDFNRFHCHFSPRDWQRLINNNWGFRPKRLNFKLFNIQVKEVTTNDGVTTIANNLTSTVQVFSDSDYQLPYVLGSAHEGCLPPFPADVFMVPQYGYLTLNNGSQAVGRSSFYCLEYFPSQMLRTGNNFTFSYTFEDVPFHSSYAHSQSLDRLMNPLIDQYLYYLNRTQNQSGSAQNKDLLFSRGSPTGMSVQPKNWLPGPCYRQQRVSKTKTDNNNSNFTWTGASKYNLNGRESIINPGTAMASHKDDKDKFFPMSGVMIFGKESAGASNTALDNVMITDEEEIKATNPVATERFGTVAVNLQSSSTDPATGDVHAMGALPGMVWQDRDVYLQGPIWAKIPHTDGHFHPSPLMGGFGLKNPPPQILIKNTPVPANPPAEFSATKFASFITQYSTGQVSVEIEWELQKENSKRWNPEVQYTSNYAKSANVDFTVDNNGLYTEPRPIGTRYLTRPL

SEQ ID NO: 552 - DNA, 2211 bp, Artificial Sequence
  Description of Artificial Sequence: Synthetic polynucleotide
atggctgccgatggttatcttccagattggctcgaggacaacctctctgagggcattcgcgagtggtgggcgctgaaacctggagccccgaagcccaaagccaaccagcaaaagcaggacgacggccggggtctggtgcttcctggctacaagtacctcggacccttcaacggactcgacaagggggagcccgtcaacgcggcggatgcagcggccctcgagcacgacaaggcctacgaccagcagctcaaagcgggtgacaatccgtacctgcggtataaccacgccgacgccgagtttcaggagcgtctgcaagaagatacgtcttttgggggcaacctcgggcgagcagtcttccaggccaagaagcgggttctcgaacctctcggtctggttgaggaaggcgctaagacggctcctggaaagaaacgtccggtagagcaatcgccacaagagccagactcctcctcgggcatcggcaagacaggccagcagcccgctaaaaagagactcaattttggtcagactggcgactcagagtcagtccccgacccacaacctctcggagaacctccagcaacccccgctgctgtgggacctactacaatggcttcaggcggtggcgcaccaatggcagacaataacgaaggcgccgacggagtgggtaatgcctcaggaaattggcattgcgattccacatggctgggcgacagagtcatcaccaccagcacccgaacatgggccttgcccacctataacaaccacctctacaagcaaatctccagtgcttcgacgggggccagcaacgacaaccactacttcggctacagcaccccctgggggtattttgactttaacagattccactgccacttttcaccacgtgactggcagcgactcatcaacaacaactggggattccggcccaagagactcagcttcaagctcttcaacatccaggtcaaggaggtcacgacgaatgatggcgtcacaaccatcgctaataaccttaccagcacggttcaagtcttctcggactcggagtaccagcttccgtacgtcctcggctctgcgcaccagggctgcctccctccgttcccggcggacgtgttcatgattccgcaatacggctacctgacgctcaacaatggcagccaagccgtgggacgttcatccttttactgcctggaatatttcccttctcagatgctgagaacgggcaacaactttaccttcagctacacctttgaggaagtgcctttccacagcagctacgcgcacagccagagcctggaccggctgatgaatcctctcatcgatcaatacctgtattacctgaacagaactcaaaatcagtccggaagtgcccaaaacaaggacttgctgtttagccgtgggtctccagctggcatgtctgttcagcccaaaaactggctacctggaccctgttatcggcagcagcgcgtttctaaaacaaaaacagacaacaacaacagcaattttacctggactggtgcttcaaaatataacctcaatgggcgtgaatccatcatcaaccctggcactgctatggcctcacataaagacgacgaagacaagttctttcccatgagcggtgtcatgatttttggaaaagagagcgccggagcttcaaacactgcattggacaatgtcatgattacagacgaagaggaaattaaagccactaaccctgtggccaccgaaagatttgggaccgtggcagtcaatttccagagcagcagcacagaccctgcgaccggagatgtgcatgctatgggagcattacctggcatggtgtggcaagatagagacgtgtacctgcagggtcccatttgggccaaaattcctcacacagatggacactttcacccgtctcctcttatgggcggctttggactcaagaacccgcctcctcagatcctcatcaaaaacacgcctgttcctgcgaatcctccggcggagttttcagctacaaagtttgcttcattcatcacccaatactccacaggacaagtgagcgtggagattgaatgggagctgcagaaagaaaacagcaaacgctggaatcccgaagtgcagtatacatctaactatgcaaaatctgccaacattgatttcactgtggacaacaatggactttatactgagcctcgccccattggcacccgttacctcacccgtccccagtaa

SEQ ID NO: 553 - protein, 736 aa, Artificial Sequence
  Description of Artificial Sequence: Synthetic polypeptide
MAADGYLPDWLEDNLSEGIREWWALKPGAPKPKANQQKQDDGRGLVLPGYKYLGPFNGLDKGEPVNAADAAALEHDKAYDQQLKAGDNPYLRYNHADAEFQERLQEDTSFGGNLGRAVFQAKKRVLEPLGLVEEGAKTAPGKKRPVEQSPQEPDSSSGIGKTGQQPAKKRLNFGQTGDSESVPDPQPLGEPPATPAAVGPTTMASGGGAPMADNNEGADGVGNASGNWHCDSTWLGDRVITTSTRTWALPTYNNHLYKQISSASTGASNDNHYFGYSTPWGYFDFNRFHCHFSPRDWQRLINNNWGFRPKRLSFKLFNIQVKEVTTNDGVTTIANNLTSTVQVFSDSEYQLPYVLGSAHQGCLPPFPADVFMIPQYGYLTLNNGSQAVGRSSFYCLEYFPSQMLRTGNNFTFSYTFEEVPFHSSYAHSQSLDRLMNPLIDQYLYYLNRTQNQSGSAQNKDLLFSRGSPAGMSVQPKNWLPGPCYRQQRVSKTKTDNNNSNFTWTGASKYNLNGRESIINPGTAMASHKDDEDKFFPMSGVMIFGKESAGASNTALDNVMITDEEEIKATNPVATERFGTVAVNFQSSSTDPATGDVHAMGALPGMVWQDRDVYLQGPIWAKIPHTDGHFHPSPLMGGFGLKNPPPQILIKNTPVPANPPAEFSATKFASFITQYSTGQVSVEIEWELQKENSKRWNPEVQYTSNYAKSANIDFTVDNNGLYTEPRPIGTRYLTRPQ

SEQ ID NO: 554 - DNA, 2211 bp, Artificial Sequence
  Description of Artificial Sequence: Synthetic polynucleotide
atggctgccgatggttatcttccagattggctcgaggacaacctctctgagggcattcgcgagtggtgggacttgaaacctggagccccgaaacccaaagccaaccagcaaaagcaggacgacggccggggtctggtgcttcctggctacaagtacctcggacccttcaacggactcgacaagggggagcccgtcaacgcggcggatgcagcggccctcgagcacgacaaggcctacgaccagcagctcaaagcgggtgacaatccgtaccttcggtataaccacgccgacgccgagtttcaggagcgtctgcaagaagatacgtcttttgggggcaacctcgggcgagcagtcttccaggccaaaaagagggttctcgaacctctcggtctggttgaggaagcggctaagacggctcctggaaagaaacgtccggtagagcagtcgccacaagagccagactcctcctcgggcattggcaagacaggccagcagcccgctaaaaagagactcaattttggtcagactggcgactcagagtcagtccccgacccacaacctctcggagaacctcccgcagccccctcaggtgtgggatctcttacaatggcttcaggtggtggcgcaccaatggcagacaataacgaaggcgccgacggagtgggtaatgcctcaggaaattggcattgcgattccacatggctgggcgacagagtcatcaccaccagcacccgcacctgggccttgcccacctacaataaccacctctacaagcaaatctccagtgcttcaacgggggccagcaacgacaaccactacttcggctacagcaccccctgggggtattttgacttcaacagattccactgccacttttcaccacgtgactggcaaagactcatcaacaacaattggggattccggcccaagagactcaacttcaagctcttcaacatccaagtcaaggaggtcacgacgaatgatggcgtcacgaccatcgctaataaccttaccagcacggttcaagtcttctcggactcggagtaccagttgccgtacgtcctcggctctgcgcaccagggctgcctccctccgttcccggcggacgtgttcatgattccgcagtacggctacctaacgctcaacaatggcagccaggcagtgggacggtcatccttttactgcctggaatatttcccatcgcagatgctgagaacgggcaacaactttaccttcagctacacctttgaggaagtgcctttccacagcagctacgcgcacagccagagcctggaccggctgatgaatcctctcatcgaccagtacctgtattacctgaacagaactcaaaatcagtccggaagtgcccaaaacaaggacttgctgtttagccgtgggtctccagctggcatgtctgttcagcccaaaaactggctacctggaccctgttaccggcagcagtgcgtttctaaaacaaaaacagacaacaacaacagcaactttacctggactggtgcttcaaaatataaccttaatgggcgtgaatctataatcaaccctggcactgctatggcctcacacaaagacgacaaagacaagttctttcccatgagcggtgtcatgatttttggaaaggagagcgccggagcttcaaacactgcattggacaatgtcatgatcacagacgaagaggaaatcaaagccactaaccccgtggccaccgaaagatttgggactgtggcagtcaatctccagagcagcagcacagaccctgcgaccggagatgtgcatgttatgggagccttacctggaatggtgtggcaagacagagacgtatacctgcagggtcctatttgggccaaaattcctcacacagatggacactttcacccgtctcctcttatgggcggctttggactcaagaacccgcctcctcagatcctcatcaaaaacacgcctgttcctgcgaatcctccggcggagttttcagctacaaagtttgcttcattcatcacccaatactccacaggacaagtgagcgtggagattgaatgggagctgcagaaagaaaacagcaagcgctggaatcccgaagtgcagtacacatccaattatgcaaaatctgccaacgttgatttcactgtggacaacaatggactttatactgagcctcgccccattggcacccgttacctcacccgtcccctgtaa

SEQ ID NO: 555 - protein, 736 aa, Artificial Sequence
  Description of Artificial Sequence: Synthetic polypeptide
MAADGYLPDWLEDNLSEGIREWWDLKPGAPKPKANQQKQDDGRGLVLPGYKYLGPFNGLDKGEPVNAADAAALEHDKAYDQQLKAGDNPYLRYNHADAEFQERLQEDTSFGGNLGRAVFQAKKRVLEPLGLVEEAAKTAPGKKRPVEQSPQEPDSSSGIGKTGQQPAKKRLNFGQTGDSESVPDPQPLGEPPAAPSGVGSLTMASGGGAPMADNNEGADGVGNASGNWHCDSTWLGDRVITTSTRTWALPTYNNHLYKQISSASTGASNDNHYFGYSTPWGYFDFNRFHCHFSPRDWQRLINNNWGFRPKRLNFKLFNIQVKEVTTNDGVTTIANNLTSTVQVFSDSEYQLPYVLGSAHQGCLPPFPADVFMIPQYGYLTLNNGSQAVGRSSFYCLEYFPSQMLRTGNNFTFSYTFEEVPFHSSYAHSQSLDRLMNPLIDQYLYYLNRTQNQSGSAQNKDLLFSRGSPAGMSVQPKNWLPGPCYRQQCVSKTKTDNNNSNFTWTGASKYNLNGRESIINPGTAMASHKDDKDKFFPMSGVMIFGKESAGASNTALDNVMITDEEEIKATNPVATERFGTVAVNLQSSSTDPATGDVHVMGALPGMVWQDRDVYLQGPIWAKIPHTDGHFHPSPLMGGFGLKNPPPQILIKNTPVPANPPAEFSATKFASFITQYSTGQVSVEIEWELQKENSKRWNPEVQYTSNYAKSANVDFTVDNNGLYTEPRPIGTRYLTRPL

SEQ ID NO: 556 - DNA, 2211 bp, Artificial Sequence
  Description of Artificial Sequence: Synthetic polynucleotide
atggctgccgatggttatcttccagattggctcgaggacaacctctctgagggcattcgcgaatggtgggacttgaaacctggagccccgaaacccaaagtcaaccagcaaaagcaggacaacgctcggggtcttgtgcttccgggttacaaatacctcggacccttcaacggactcgacaagggggagcccgtcaacgcggcggacgcagcggccctcgagcacgacaaggcctacgaccagcagctcaaagcgggtgacaatccgtaccttcggtataaccacgccgacgccgagtttcaggagcgtctgcaagaagatacgtcttttgggggcaaccttggacgagcagtcttccaggccaagaagagggttctcgaaccttttggtctggttgaggaaggtgctaagacggctcctggaaagaaacgtccggtagagcagtcgccacaagagccagactcctcctcgggcattggcaagacaggccagcagcccgctaaaaagagactcaattttggtcagactggcgactcagagtcagtccccgacccacaacctctcggagaacctccagcaacccccgctgctgtgggacctactacaatggcttcaggcggtggcgcaccaatggcagacaataacgaaggcgccgacggagtgggtaatgcctcaggaaattggcattgcgattccacatggctgggcgacagagtcatcaccaccagcacccgcacctgggccttgcccacctacaataaccacctctacaagcaaatctccagtgcttcaacgggggccagcaacgacaaccactacttcggctacagcaccccctgggggtattttgacttcaacagattccactgccacttttcaccacgtgactggcaaagactcatcaacaacaattggggattccggcccaagagactcaacttcaagctcttcaacatccaagtcaaggaggtcacgacgaatgatggcgtcacgaccatcgctaataaccttaccagcacggttcaagtcttctcggactcggagtaccagttgccgtacgtcctcggctctgcgcaccagggctgcctccctccgttcccggcggacgtgttcatgattccgcaatacggctacctgacgctcaacaatggcagccaggcagtgggacggtcatccttttactgcctggaatatttcccatcgcagatgctgagaacgggcaataactttaccttcagctacacttttgaggacgttcctttccacagcagctacgctcacagccagagcctggaccggctgatgaatcctctcatcgaccagtacctgtattacctgaacagaactcagaatcagtccggaagtgcccaaaacaaggacttgctgtttagccgtgggtctccaactggcatgtctgttcagcccaaaaactggctacctggaccctgttatcggcagcagcgcgtttctaaaacaaaaacagacaacaacaacagcaactttacctggactggtgcttcaaaatataaccttaatgggcgtgaatctataatcaaccctggcactgctatggcctcacacaaagacgacgaagacaagttctttcccatgagcggtgtcatgatttttggaaaggagagcgccggagcttcaaacactgcattggacaatgtcatgatcacagacgaagaggaaatcaaagccactaaccccgtggccactgaaagatttgggactgtggcagtcaatctccagagcagcagcacagaccctgcgaccggagatgtgcatgccatgggagccttacctggaatggtgtggcaagacagagacgtatacctgcagggtcctatttgggccaaaattcctcacacggatggacactttcacccgtctcctctcatgggcggctttggacttaagcacccgcctcctcagatcctcatcaaaaacacgcctgttcctgcgaatcctccggcagagttttcggctacaaagtttgcttcattcatcacccagtattccacaggacaagtgagcgtggagattgaatgggagctgcagaaagaaaacagcaaacgctggaatcccgaagtgcagtatacatctaactatgcaaaatctgccaacgttgatttcactgtggacaacaatggactttatactgagcctcgccccattggcacccgttacctcacccgtcccctgtaa

SEQ ID NO: 557 - protein, 736 aa, Artificial Sequence
  Description of Artificial Sequence: Synthetic polypeptide
MAADGYLPDWLEDNLSEGIREWWDLKPGAPKPKVNQQKQDNARGLVLPGYKYLGPFNGLDKGEPVNAADAAALEHDKAYDQQLKAGDNPYLRYNHADAEFQERLQEDTSFGGNLGRAVFQAKKRVLEPFGLVEEGAKTAPGKKRPVEQSPQEPDSSSGIGKTGQQPAKKRLNFGQTGDSESVPDPQPLGEPPATPAAVGPTTMASGGGAPMADNNEGADGVGNASGNWHCDSTWLGDRVITTSTRTWALPTYNNHLYKQISSASTGASNDNHYFGYSTPWGYFDFNRFHCHFSPRDWQRLINNNWGFRPKRLNFKLFNIQVKEVTTNDGVTTIANNLTSTVQVFSDSEYQLPYVLGSAHQGCLPPFPADVFMIPQYGYLTLNNGSQAVGRSSFYCLEYFPSQMLRTGNNFTFSYTFEDVPFHSSYAHSQSLDRLMNPLIDQYLYYLNRTQNQSGSAQNKDLLFSRGSPTGMSVQPKNWLPGPCYRQQRVSKTKTDNNNSNFTWTGASKYNLNGRESIINPGTAMASHKDDEDKFFPMSGVMIFGKESAGASNTALDNVMITDEEEIKATNPVATERFGTVAVNLQSSSTDPATGDVHAMGALPGMVWQDRDVYLQGPIWAKIPHTDGHFHPSPLMGGFGLKHPPPQILIKNTPVPANPPAEFSATKFASFITQYSTGQVSVEIEWELQKENSKRWNPEVQYTSNYAKSANVDFTVDNNGLYTEPRPIGTRYLTRPL

SEQ ID NO: 558 - DNA, 2208 bp, Artificial Sequence
  Description of Artificial Sequence: Synthetic polynucleotide
  misc_feature (955)..(955): n is a, c, t, or g
  misc_feature (971)..(972): n is a, c, t, or g
  misc_feature (981)..(981): n is a, c, t, or g
  misc_feature (986)..(986): n is a, c, t, or g
  misc_feature (1235)..(1235): n is a, c, t, or g
  misc_feature (1694)..(1696): n is a, c, t, or g
  misc_feature (1698)..(1698): n is a, c, t, or g
  misc_feature (1763)..(1765): n is a, c, t, or g
  misc_feature (1778)..(1778): n is a, c, t, or g
  misc_feature (2204)..(2204): n is a, c, t, or g
atggctgccgatggttatcttccagattggctcgaggacaacctctctgagggcattcgcgaatggtgggacttgaaacctggagccccgaaacccaaagtcaaccagcaaaagcaggacaacgctcggggtcttgtgcttccgggttacaaatacctcggacccttcaacggactcgacaagggggagcccgtcaacgcggcggacgcagcggccctcgagcacgacaaggcctacgaccagcagctcaaagcgggtgacaatccgtaccttcggtataaccacgccgacgccgagtttcaggagcgtctgcaagaagatacgtcttttgggggcaaccttggacgagcagtcttccaggccaagaagagggttctcgaaccttttggtctggttgaggaaggtgctaagacggctcctggaaagaaacgtccggtagagcagtcgccacaagagccagactcctcctcgggcattggcaagacaggccagcagcccgctaaaaagagactcaattttggtcagactggcgactcagagtcagtccccgacccacaacctctcggagaacctccagcaacccccgctgctgtgggacctactacaatggcttcaggcggtggcgcaccaatggcagacaataacgaaggcgccgacggagtgggtaatgcctcaggaaattggcattgcgattccacatggctgggcgacagagtcatcaccaccagcacccgaacatgggccttgcccacctataacaaccacctctacaagcaaatctccagtgcttcaacgggggccagcaacgacaaccactacttcggctacagcaccccctgggggtattttgatttcaacagattccactgccacttttcaccacgtgactggcagcgactcatcaataacaattggggattccggcccaagagactcaacttcaaactcttcaacntccaagtcaaggaggnnacgacgaangatgncgtcacaaccatcgctaataaccttaccagcacggttcaagtcttctcggactcggagtaccagcttccgtacgtcctcggctctgcgcaccagggctgcctccctccgttcccggcggacgtgttcatgattccgcaatacggctacctgacgctcaacaatggcagccaggcagtgggacggtcatccttttactgcctggaatatttcccatcgcagatgctgagaacgggcaataactttacctncagctacacttttgaggacgttcctttccacagcagctacgctcacagccagagcctggaccggctgatgaatcctctcatcgaccagtacctgtattacctgaacagaactcagaatcagtccggaagtgcccaaaacaaggacttgctgtttagccgtgggtctccaactggcatgtctgttcagcccaaaaactggctacctggaccctgttatcggcagcagcgcgtttctaaaacaaaaacagacaacaacaacagcaactttacctggactggtgcttcaaaatataaccttaatgggcgtgaatctataatcaaccctggcactgctatggcctcacacaaagacgacgaagacaagttctttcccatgagcggtgtcatgatttttggaaaggagagcgccggagcttcaaacactgcattggacaatgtcatgatcacagacgaagagannncnaagccactaaccccgtggccactgaaagatttgggactgtggcagtcaatctccaagcagcacannnaccctgcgaccgnagatgtgcatgccatgggagccttacctggaatggtgtggcaagacagagacgtatacctgcagggtcctatttgggccaaaattcctcacacggatggacactttcacccgtctcctctcatgggcggctttggacttaagcacccgcctcctcagatcctcatcaaaaacacgcctgttcctgcgaatcctccggcagagttttcggctacaaagtttgcttcattcatcacccagtattccacaggacaagtgagcgtggagattgaatgggagctgcagaaagaaaacagcaaacgctggaatcccgaagtgcagtatacatctaactatgcaaaatctgccaacgttgatttcactgtggacaacaatggactttatactgagcctcgccccattggcacccgttacctcacccgtccccngtaa

SEQ ID NO: 559 - protein, 723 aa, Artificial Sequence
  Description of Artificial Sequence: Synthetic polypeptide
MAADGYLPDWLEDNLSEGIREWWDLKPGAPKPKVNQQKQDNARGLVLPGYKYLGPFNGLDKGEPVNAADAAALEHDKAYDQQLKAGDNPYLRYNHADAEFQERLQEDTSFGGNLGRAVFQAKKRVLEPFGLVEEGAKTAPGKKRPVEQSPQEPDSSSGIGKTGQQPAKKRLNFGQTGDSESVPDPQPLGEPPATPAAVGPTTMASGGGAPMADNNEGADGVGNASGNWHCDSTWLGDRVITTSTRTWALPTYNNHLYKQISSASTGASNDNHYFGYSTPWGYFDFNRFHCHFSPRDWQRLINNNWGFRPKRLNFKLFNQVKETTDVTTIANNLTSTVQVFSDSEYQLPYVLGSAHQGCLPPFPADVFMIPQYGYLTLNNGSQAVGRSSFYCLEYFPSQMLRTGNNFTSYTFEDVPFHSSYAHSQSLDRLMNPLIDQYLYYLNRTQNQSGSAQNKDLLFSRGSPTGMSVQPKNWLPGPCYRQQRVSKTKTDNNNSNFTWTGASKYNLNGRESIINPGTAMASHKDDEDKFFPMSGVMIFGKESAGASNTALDNVMITDEEATNPVATERFGTVAVNLQSSPATDVHAMGALPGMVWQDRDVYLQGPIWAKIPHTDGHFHPSPLMGGFGLKHPPPQILIKNTPVPANPPAEFSATKFASFITQYSTGQVSVEIEWELQKENSKRWNPEVQYTSNYAKSANVDFTVDNNGLYTEPRPIGTRYLTRP

SEQ ID NO: 560 - DNA, 2208 bp, Artificial Sequence
  Description of Artificial Sequence: Synthetic polynucleotide
atggctgccgatggttatcttccagattggctcgaggacactctctctgaaggaataagacagtggtggaagctcaaacctggcccaccaccaccaaagcccgcagagcggcataaggacgacagcaggggtcttgtgcttcctgggtacaagtacctcggacccttcaacggactcgacaagggagagccggtcaacgaggcagacgccgcggccctcgagcacgacaaagcctatgaccggcagctcgacagcggagacaacccgtacctcaagtacaaccacgccgacgcggagtttcaggagcgccttaaagaagatacgtcttttgggggcaacctcggacgagcagtcttccaggcgaaaaagagggttcttgaacctctgggcctggttgaggaacctgttaagacggctccgggaaaaaagaggccggtagagcactctcctgtggagccagactcctcctcgggaaccggaaaggcgggtcagcagcctgcaagaaaaagattgaattttggtcagactggagacgcagactcagtacctgacccccagcctctcggacagccaccagcagccccctctggtctgggaactaatacgatggctacaggcagtggcgcaccaatggcagacaataacgagggcgccgacggagtgggtaattcctcgggaaattggcattgcgattccacatggatgggcgacagagtcatcaccaccagcacccgaacctgggccctgcccacctacaacaaccacctctacaaacaaatttccagccaatcaggagcctcgaacgacaatcactactttggctacagcaccccttgggggtattttgacttcaacagattccactgccacttttcaccacgtgactggcaaagactcatcaacaacaactggggattccgacccaagagactcaagttcaagctctttaacattcaagtcaaagaggtcacgcagaatgacggtacgacgacgattgccaataaccttaccagcacggttcaggtgtttactgactcggagtaccagctcccgtacgtcctcggctcggcgcatcaaggatgcctcccgccgttcccagcagacgtcttcatggtgccacagtatggatacctcaccctgaacaacgggagtcaggcagtaggacgctcttcattttactgcctggagtactttccttctcagatgctgcgtaccggtaacaactttaccttcagctacacttttgaggacgttcctttccacagcagctacgctcacagccagagtctggaccgtctcatgaatcctctcatcgaccagtacctgtattacttgagcagaacagacgctccaagtggaaccaccacgcagtcaaggcttcagttttctcaggccggagcgagtgacattcgggaccagtctaggaactggcttcctggaccctgttaccgccagcagcgagtatcaaagacatctgcggataacaacaacagtgaatactcgtggactggagctaccaagtaccacctcaatggcagagactctctggtgaatccgggcccggccatggcaagccacaaggacgatgaagaaaagttttttcctcagagcggggttctcatctttgggaagcaaggctcagagaaaacaagtgtggacattgaaaaggtcatgattacagacgaagaggaaatcaggacaaccaatcccgtggctacggagcagtatggttctgtatctaccaacctccagagaggcaacagacaagcagctaccgcagatgtcaacacacaaggcgttcttccaggcatggtctggcaggacagagatgtgtaccttcaggggcccatctgggcaaagattccacacacggacggacattttcacccctctcccctcatgggtggattcggacttaaacaccctcctccacagattctcatcaagaacaccccggtacctgcgaatccttcgaccaccttcagtgcggcaaagtttgcttccttcatcacacagtactccacgggacaggtcagcgtggagatcgagtgggagctgcagaaggaaaacagcaaacgctggaatcccgaagttcagtacacttccaactacaacaagtctgttaatgtggactttactgtggacactaatggcgtgtattcagagcctcgccccattggcaccagatacctgactcgtaatctgtaa

SEQ ID NO: 561 - protein, 735 aa, Artificial Sequence
  Description of Artificial Sequence: Synthetic polypeptide
MAADGYLPDWLEDTLSEGIRQWWKLKPGPPPPKPAERHKDDSRGLVLPGYKYLGPFNGLDKGEPVNEADAAALEHDKAYDRQLDSGDNPYLKYNHADAEFQERLKEDTSFGGNLGRAVFQAKKRVLEPLGLVEEPVKTAPGKKRPVEHSPVEPDSSSGTGKAGQQPARKRLNFGQTGDADSVPDPQPLGQPPAAPSGLGTNTMATGSGAPMADNNEGADGVGNSSGNWHCDSTWMGDRVITTSTRTWALPTYNNHLYKQISSQSGASNDNHYFGYSTPWGYFDFNRFHCHFSPRDWQRLINNNWGFRPKRLKFKLFNIQVKEVTQNDGTTTIANNLTSTVQVFTDSEYQLPYVLGSAHQGCLPPFPADVFMVPQYGYLTLNNGSQAVGRSSFYCLEYFPSQMLRTGNNFTFSYTFEDVPFHSSYAHSQSLDRLMNPLIDQYLYYLSRTDAPSGTTTQSRLQFSQAGASDIRDQSRNWLPGPCYRQQRVSKTSADNNNSEYSWTGATKYHLNGRDSLVNPGPAMASHKDDEEKFFPQSGVLIFGKQGSEKTSVDIEKVMITDEEEIRTTNPVATEQYGSVSTNLQRGNRQAATADVNTQGVLPGMVWQDRDVYLQGPIWAKIPHTDGHFHPSPLMGGFGLKHPPPQILIKNTPVPANPSTTFSAAKFASFITQYSTGQVSVEIEWELQKENSKRWNPEVQYTSNYNKSVNVDFTVDTNGVYSEPRPIGTRYLTRNL

SEQ ID NO: 562 - DNA, 2208 bp, Artificial Sequence
  Description of Artificial Sequence: Synthetic polynucleotide
atggctgccgatggttatcttccagattggctcgaggacactctctctgaaggaataagacagtggtggaagctcaaacctggcccaccaccaccaaagcccgcagagcggcataaggacgacagcaggggtcttgtgcttcctgggtacaagtacctcggacccttcaacggactcgacaagggagagccggtcaacgaggcagacgccgcggccctcgagcacgacaaagcctatgaccggcagctcgacagcggagacaacccgtacctcaagtacaaccacgccgacgcggagtttcaggagcgccttaaagaagatacgtcttttgggggcaacctcggacgagcagtcttccaggcgaaaaagagggttcttgaacctctgggcctggttgaggaacctgttaagacggctccgggaaaaaagaggccggtagagcactctcctgtggagccagactcctcctcgggaaccggaaaggcgggccagcagcctgcaagaaaaagattgaattttggtcagactggagacgcaaactcagtacctgacccccagcctctcggacagccaccagcagccccctctggtctgggaactaatacgatggctacaggcagtggcgcaccaatggcagacaataacgagggcgccgacggagtgggtaattcctcgggaaattggcattgcgattccacatggatgggcgacagagtcatcaccaccagcacccgaacctgggccctgcccacctacaacaaccacctctacaaacaaatttccagccaatcaggagcctcgaacgacaatcactactttggctacagcaccccttgggggtattttgacttcaacagattccactgccacttttcaccacgtgactggcaaagactcatcaacaacaactggggattccgacccaagagactcaagttcaagctctttaacattcaagtcaaagaggtcacgcagaatgacggtacgacgacgattgccaataaccttaccagcacggttcaggtgtttactgactcggagtaccagctcccgtacgtcctcggctcggcgcatcaaggatgcctcccgccgttcccagcagacgtcttcatggtgccacagtatggatacctcaccctgaacaacgggagtcgggcagtaggacgctcttcattttactgcctggagtactttccttctcagatgctgcgtaccggtaacaactttaccttcagctacacttttgaggacgttcctttccacagcagctacgctcacagccagagtctggaccgtctcatgaatcctctcatcgaccagtacctgtattacttgagcagaacagacactccaagtggaaccaccacgcagtcaaggcttcagttttctcaggccggagcgagtgacattcgggaccagtctaggaactggcttcctggaccctgttaccgccagcagcgagtatcaaagacatctgcggataacaacaacagtgaatactcgtggactggagctaccaagtaccacctcaatggcagagactctctggtgaatccgggcccggccatggcaagccacaaggacgatgaagaaaagttttttcctcagagcggggttctcatctttgggaagcaaggctcagagaaaacaagtgtggacattgaaaaggtcatgattacagacgaagaggaaatcaggacgaccaatcccgtggctacggagcagtatggttctgtatctaccaacctccagagaggcaacagacaagcagctaccgcagatgtcaacacacaaggcgttcttccaggcatggtctggcaggacagagatgtgtaccttcaggggcccatctgggcaaagattccacacacggacggacattttcacccctctcccctcatgggtggattcggacttaaacaccctcctccacagattctcatcaagaacaccccggtacctgcgaatccttcgaccaccttcagtgcggcaaagtttgcttccttcatcacacagtactccacgggacaggtcagcgtggagatcgagtgggagctgcagaaggaaaacagcaaacgctggaatcccgaagttcagtacacttccaactacaacaagtctgttaatgtggactttactgtggacactaatggcgtgtatacagagcctcgccccattggcaccagatacctgactcgtaatctgtaa

SEQ ID NO: 563 - protein, 735 aa, Artificial Sequence
  Description of Artificial Sequence: Synthetic polypeptide
MAADGYLPDWLEDTLSEGIRQWWKLKPGPPPPKPAERHKDDSRGLVLPGYKYLGPFNGLDKGEPVNEADAAALEHDKAYDRQLDSGDNPYLKYNHADAEFQERLKEDTSFGGNLGRAVFQAKKRVLEPLGLVEEPVKTAPGKKRPVEHSPVEPDSSSGTGKAGQQPARKRLNFGQTGDANSVPDPQPLGQPPAAPSGLGTNTMATGSGAPMADNNEGADGVGNSSGNWHCDSTWMGDRVITTSTRTWALPTYNNHLYKQISSQSGASNDNHYFGYSTPWGYFDFNRFHCHFSPRDWQRLINNNWGFRPKRLKFKLFNIQVKEVTQNDGTTTIANNLTSTVQVFTDSEYQLPYVLGSAHQGCLPPFPADVFMVPQYGYLTLNNGSRAVGRSSFYCLEYFPSQMLRTGNNFTFSYTFEDVPFHSSYAHSQSLDRLMNPLIDQYLYYLSRTDTPSGTTTQSRLQFSQAGASDIRDQSRNWLPGPCYRQQRVSKTSADNNNSEYSWTGATKYHLNGRDSLVNPGPAMASHKDDEEKFFPQSGVLIFGKQGSEKTSVDIEKVMITDEEEIRTTNPVATEQYGSVSTNLQRGNRQAATADVNTQGVLPGMVWQDRDVYLQGPIWAKIPHTDGHFHPSPLMGGFGLKHPPPQILIKNTPVPANPSTTFSAAKFASFITQYSTGQVSVEIEWELQKENSKRWNPEVQYTSNYNKSVNVDFTVDTNGVYTEPRPIGTRYLTRNL

SEQ ID NO: 564 - DNA, 2211 bp, Artificial Sequence
  Description of Artificial Sequence: Synthetic polynucleotide
atggctgccgatggttatcttccagattggctcgaggacactctctctgaaggaataagacagtggtggaagctcaaacctggcccaccaccaccaaagcccgcagagcggcataaggacgacagcaggggtcttgtgcttcctgggtacaagtacctcggacccttcaacggactcgacaagggagagccggtcaacgaggcagacgccgcggccctcgagcacgacaaggcctacgaccagcagctcaaagcgggtgacaatccgtacctgcggtataaccacgccgacgccgagtttcaggagcgtctgcaagaagatacgtcttttgggggcaacctcgggcgagcagtcttccaggccaagaagcgggttctcgaacctctcggtctggttgaggaaggcgctaagacggctcctggaaagaaacgtccggtagagcagtcgccacaagagccagactcctcctcgggcatcggcaagacaggccagcagcccgctaaaaagagactcaattttggtcagactggcgactcagagtcagtccccgacccacaacctctcggagaacctccagcaacccccgctgctgtgggacctactacaatggcttcaggcggtggcgcaccaatggcagacaataacgaaggcgccgacggagtgggtaatgcctcaggaaattggcattgcgattccacatggctgggcgacagagtcatcaccaccagcacccgaacatgggccttgcccacctataacaaccacctctacaagcaaatctccagtgcttcgacgggggccagcaacgacaaccactacttcggctacagcaccccctgggggtattttgactttaacagattccactgccacttttcaccacgtgactggcagcgactcatcaacaataactggggattccggcccaagagactcagcttcaagctcttcaacatccaggtcaaggaggtcacgacgaatgatggcgtcacaaccatcgctaataaccttaccagcacggttcaagtcttctcggactcggagtaccagcttccgtacgtcctcggctctgcgcaccagggctgcctccctccgttcccggcggacgtgttcatgattccgcaatacggctacctgacgctcaacaatggcagccaagccgtgggacgttcatccttttactgcctggaatatttcccttctcagatgctgagaacgggcaacaactttaccttcagctacacctttgaggaagtgcctttccacagcagctacgcgcacagccagagcctggaccggctgatgaatcctctcatcgatcaatacctgtattacctgaacagaactcaaaatcagtccggaagtgcccaaaacaaggacttgctgtttagccgtgggtctccagctggcatgtctgttcagcccaaaaactggctacctggaccctgttatcggcagcagcgcgtttctaaaacaaaaacagacaacaacaacagcaattttacctggactggtgcttcaaaatataacctcaatgggcgtgaatccatcatcaaccctggcactgctatggcctcacacaaagacgacgaagacaagttctttcccatgagcggtgtcatgatttttggaaaagagagcgccggagcttcaaacactgcattggacaatgtcatgattacggacgaagaggaaattaaagccactaaccctgtggccaccgaaagatttgggaccgtggcagtcaatttccagagcagcagcacagaccctgcgaccggagatgtgcatgctatgggagcattacctggcatggtgtggcaagatagagacgtgtacctgcagggtcccatttgggccaaaattcctcacacagatggacactttcacccgtctcctcttatgggcggctttggactcaagaacccgcctcctcagatcctcatcaaaaacacgcctgttcctgcgaatcctccggcggagttttcagctacaaagtttgcttcattcatcactcaatactccacaggacaagtgagcgtggaaattgaatgggagctgcagaaagaaaacagcaaacgctggaatcccgaagtgcagtatacatctaactatgcaaaatctgccaacgttgatttcactgtggacaacaatggactttatactgagcctcgccccattggcacccgttacctcacccgtcccctgtaa

SEQ ID NO: 565 - protein, 736 aa, Artificial Sequence
  Description of Artificial Sequence: Synthetic polypeptide
MAADGYLPDWLEDTLSEGIRQWWKLKPGPPPPKPAERHKDDSRGLVLPGYKYLGPFNGLDKGEPVNEADAAALEHDKAYDQQLKAGDNPYLRYNHADAEFQERLQEDTSFGGNLGRAVFQAKKRVLEPLGLVEEGAKTAPGKKRPVEQSPQEPDSSSGIGKTGQQPAKKRLNFGQTGDSESVPDPQPLGEPPATPAAVGPTTMASGGGAPMADNNEGADGVGNASGNWHCDSTWLGDRVITTSTRTWALPTYNNHLYKQISSASTGASNDNHYFGYSTPWGYFDFNRFHCHFSPRDWQRLINNNWGFRPKRLSFKLFNIQVKEVTTNDGVTTIANNLTSTVQVFSDSEYQLPYVLGSAHQGCLPPFPADVFMIPQYGYLTLNNGSQAVGRSSFYCLEYFPSQMLRTGNNFTFSYTFEEVPFHSSYAHSQSLDRLMNPLIDQYLYYLNRTQNQSGSAQNKDLLFSRGSPAGMSVQPKNWLPGPCYRQQRVSKTKTDNNNSNFTWTGASKYNLNGRESIINPGTAMASHKDDEDKFFPMSGVMIFGKESAGASNTALDNVMITDEEEIKATNPVATERFGTVAVNFQSSSTDPATGDVHAMGALPGMVWQDRDVYLQGPIWAKIPHTDGHFHPSPLMGGFGLKNPPPQILIKNTPVPANPPAEFSATKFASFITQYSTGQVSVEIEWELQKENSKRWNPEVQYTSNYAKSANVDFTVDNNGLYTEPRPIGTRYLTRPL

SEQ ID NO: 566 - protein, 735 aa, Artificial Sequence
  Description of Artificial Sequence: Synthetic polypeptide
MAADGYLPDWLEDTLSEGIRQWWKLKPGPPPPKPAERHKDDSRGLVLPGYKYLGPFNGLDKGEPVNEADAAALEHDKAYDRQLDSGDNPYLKYNHADAEFQERLKEDTSFGGNLGRAVFQAKKRVLEPLGLVEEPVKTAPGKKRPVEHSPVEPDSSSGTGKAGQQPARKRLNFGQTGDADSVPDPQPLGQPPAAPSGLGTNTMATGSGAPMADNNEGADGVGNSSGNWHCDSTWMGDRVITTSTRTWALPTYNNHLYKQISSQSGASNDNHYFGYSTPWGYFDFNRFHCHFSPRDWQRLINNNWGFRPKRLKFKLFNIQVKEVTQNDGTTTIANNLTSTVQVFTDSEYQLPYVLGSAHQGCLPPFPADVFMVPQYGYLTLNNGSQAVGRSSFYCLEYFPSQMLRTGNNFTFSYTFEDVPFHSSYAHSQSLDRLMNPLIDQYLYYLSRTDTPSGTTTQSRLQFSQAGASDIRNQSRNWLPGPCYRQQRVSKTSADNNNSEYSWTGATKYHLNGRDSLVNPGPAMASHKDDEEKFFPQSGVLIFGKQGSEKTSVDIEKVMITDEEEIRTTNPVATEQYGSVSTNLQRGNRQAATADVNTQGVLPGMVWQDRDVYLQGPIWAKIPHTDGHFHPSPLMGGFGLKHPPPQILIKNTPVPANPSTTFSAAKFASFITQYSTGQVSVEIEWELQKENSKRWNPEVQYTSNYNKSVNVDFTVDTNGVYSEPRPIGTRYLTRNQ

SEQ ID NO: 567 - DNA, 2208 bp, Artificial Sequence
  Description of Artificial Sequence: Synthetic polynucleotide
atggctgccgatggttatcttccagattggctcgaggacactctctctgaaggaataagacagtggtggaagctcaaacctggcccaccaccaccaaagcccgcagagcggcataaggacgacagcaggggtcttgtgcttcctgggtacaagtacctcggacccttcaacggactcgacaagggagagccggtcaacgaggcagacgccgcggccctcgagcacgacaaagcctatgaccggcagctcgacagcggagacaacccgtacctcaagtacaaccacgccgacgcggagtttcaggaacgccttaaagaagatacgtcttttgggggcaacctcggacgagcagtcttccaggcgaaaaagagggttcttgaacctctgggcctggttgaggaacctgttaagacggctccgggaaaaaagaggccggtagagcactctcctgtggagccagactcctcctcgggaaccggaaaggcgggccagcagcctgcaagaaaaagattgaattttggtcagactggagacgcagactcagtacctgacccccagcctctcggacagccaccagcagccccctctggtctgggaactaatacgatggctacaggcagtggcgcaccaatggcagacaataacgagggcgccgacggagtgggtaattcctcgggaaattggcattgcgattccacatggatgggcgacagagtcatcaccaccagcacccgaacctgggccctgcccacctacaacaaccacctctacaaacaaatttccagccaatcaggagcctcgaacgacaatcactactttggctacagcaccccttgggggtattttgacttcaacagattccactgccacttttcaccacgtgactggcaaagactcatcaacaacaactggggattccgacccaagagactcaagttcaagctctttaacattcaagtcaaagaggtcacgcagaatgacggtacgacgacgattgccaataaccttaccagcacggttcaggtgtttactgactcggagtaccagctcccgtacgtcctcggctcggcgcatcaaggatgcctcccgccgttcccagcagacgtcttcatggtgccacagtatggatacctcaccctgaacaacgggagtcaggcagtaggacgctcttcattttactgcctggagtactttccttctcagatgctgcgtaccggtaacaactttaccttcagctacacttttgaggacgttcctttccacagcagctacgctcacagccagagtctggaccgtctcatgaatcctctcatcgaccagtacctgtattacttgagcagaacagacactccaagtggaaccaccacgcagtcaaggcttcagttttctcaggccggagcgagtgacattcggaaccagtctaggaactggcttcctggaccctgttaccgccagcagcgagtatcaaagacatctgcggataacaacaacagtgaatactcgtggactggagctaccaagtaccacctcaatggcagagactctctggtgaatccgggcccggccatggcaagccacaaggacgatgaagaaaagttttttcctcagagcggggttctcatctttgggaagcaaggctcagagaaaacaagtgtggacattgaaaaggtcatgattacagacgaagaggaaatcaggacaaccaatcccgtggctacggagcagtatggttctgtatctaccaacctccagagaggcaacagacaagcagctaccgcagatgtcaacacacaaggcgttcttccaggcatggtctggcaggacagagatgtgtaccttcaggggcccatctgggcaaagattccacacacggacggacattttcacccctctcccctcatgggtggattcggacttaaacaccctcctccacagattctcatcaagaacaccccggtacctgcgaatccttcgaccaccttcagtgcggcaaagtttgcttccttcatcacacagtactccacgggacaggtcagcgtggagatcgagtgggagctgcagaaggaaaacagcaaacgctggaatcccgaagttcagtacacttccaactacaacaagtctgttaatgtggactttactgtggacactaatggcgtgtattcagagcctcgccccattggcaccagatacctgactcgtaatcagtaa

SEQ ID NO: 568 - DNA, 2208 bp, Artificial Sequence
  Description of Artificial Sequence: Synthetic polynucleotide
atggctgccgatggttatcttccagattggctcgaggacactctctctgaaggaataagacagtggtggaagctcaaacctggcccaccaccaccaaagcccgcagagcggcataaggacgacagcaggggtcttgtgcttcctgggtacaagtacctcggacccttcaacggactcgacaagggagagccggtcaacgaggcagacgccgcggccctcgagcacgacaaagcctatgaccggcagctcgacagcggagacaacccgtacctcaagtacaaccacgccgacgcggagtttcaggagcgccttaaagaagatacgtcttttgggggcaacctcggacgagcagtcttccaggcgaaaaagagggttcttgaacctctgggcctggttgaggaacctgttaagacggctccgggaaaaaagaggccggtagagcactctcctgtggagccagactcctcctcgggaaccggaaaggcgggccagcagcctgcaagaaaaagattgaattttggtcagactggagacgcagactcagtacctgatccccagcctctcggacagccaccagcagccccctctggtctgggaactaatacgatggctacaggcagtggcgcaccaatggcagacaataacgagggcgccgacggagtgggtaattcctcgggaaattggcattgcgattccacatggatgggcgacagagtcatcaccaccagcacccgaacctgggccctgcccacctacaacaaccacctctacaaacaaatttccagccaatcaggagcctcgaacgacaatcactactttggctacagcaccccttgggggtattttgacttcaacagattccactgccacttttcaccacgtgactggcaaagactcatcaacaacaactggggattccgacccaagagactcaagttcaagctctttaacattcaagtcaaagaggtcacgcagaatgacggtacgacgacgattgccaataaccttaccagcacggttcaggtgtttactgactcggagtaccagctcccgtatgtcctcggctcggcgcatcaaggatgcctcccgccgttcccagcagacgtcttcatggtgccacagtatggatacctcaccctgaacaacgggagtcaggcagtaggacgctcttcattttactgcctggagtactttccttctcagatgctgcgtaccggtaacaactttaccttcagctacacttttgaggacgttcctttccacagcagctacgctcacagccagagtctggaccgtctcatgaatcctctcatcgaccagtacctgtattacttgagcagaacagacactccaagtggaaccaccacgcagtcaaggcttcagttttctcaggccggagcgagtgacattcgggaccagtctaggaactggcttcctggaccctgttaccgccagcagcgagtatcaaagacatctgcggataacaacaacagtgaatactcgtggactggagctaccaagtaccacctcaatggcagagactctctggtgaatccgggcccggccatggcaagccacaaggacgatgaagaaaagttttttcctcagagcggggttctcatctttgggaagcaaggctcagagaaaacaagtgtggacattgaaaaggtcatgattacagacgaagaggaaatcaggacaaccaatcccgtggctacggagcagtatggttctgtatctaccaacctccagagaggcaacagacaagcagctaccgcagatgtcaacacacaaggcgttcttccaggcatggtctggcaggacagagatgtgtaccttcaggggcccatctgggcaaagattccacacacggacggacattttcacccctctcccctcatgggtggattcggacttaaacaccctcctccacagattctcatcaagaacaccccggtacctgcgaatccttcgaccaccttcagtgcggcaaagtttgcttccttcatcacacagtactccacgggacaggtcagcgtggagatcgagtgggagctgcagaaggaaaacagcaaacgctggaatcccgaagttcagtacacttccaactacaacaagtctgttaatgtggactttactgtggacactaatggcgtgtattcagagcctcgccccattggcaccagatacctgactcgtaatctgtaa

SEQ ID NO: 569 - protein, 735 aa, Artificial Sequence
  Description of Artificial Sequence: Synthetic polypeptide
MAADGYLPDWLEDTLSEGIRQWWKLKPGPPPPKPAERHKDDSRGLVLPGYKYLGPFNGLDKGEPVNEADAAALEHDKAYDRQLDSGDNPYLKYNHADAEFQERLKEDTSFGGNLGRAVFQAKKRVLEPLGLVEEPVKTAPGKKRPVEHSPVEPDSSSGTGKAGQQPARKRLNFGQTGDADSVPDPQPLGQPPAAPSGLGTNTMATGSGAPMADNNEGADGVGNSSGNWHCDSTWMGDRVITTSTRTWALPTYNNHLYKQISSQSGASNDNHYFGYSTPWGYFDFNRFHCHFSPRDWQRLINNNWGFRPKRLKFKLFNIQVKEVTQNDGTTTIANNLTSTVQVFTDSEYQLPYVLGSAHQGCLPPFPADVFMVPQYGYLTLNNGSQAVGRSSFYCLEYFPSQMLRTGNNFTFSYTFEDVPFHSSYAHSQSLDRLMNPLIDQYLYYLSRTDTPSGTTTQSRLQFSQAGASDIRDQSRNWLPGPCYRQQRVSKTSADNNNSEYSWTGATKYHLNGRDSLVNPGPAMASHKDDEEKFFPQSGVLIFGKQGSEKTSVDIEKVMITDEEEIRTTNPVATEQYGSVSTNLQRGNRQAATADVNTQGVLPGMVWQDRDVYLQGPIWAKIPHTDGHFHPSPLMGGFGLKHPPPQILIKNTPVPANPSTTFSAAKFASFITQYSTGQVSVEIEWELQKENSKRWNPEVQYTSNYNKSVNVDFTVDTNGVYSEPRPIGTRYLTRNL

SEQ ID NO: 570 - DNA, 2601 bp, Artificial Sequence
  Description of Artificial Sequence: Synthetic polynucleotide
ccatcgacgtcagacgcggaagcttcgatcaactacgcggacaggtaccaaaacaaatgttctcgtcacgtgggcatgaatctgatgctgtttccctgcagacaatgcgagagactgaatcagaattcaaatatctgcttcactcacggtgtcaaagactgtttagagtgctttcccgtgtcagaatctcaacccgtttctgtcgtcaaaaaggcgtatcagaaactgtgctacattcatcacatcatgggaaaggtgccagacgcttgcactgcttgcgacctggtcaatgtggacttggatgactgtgtttctgaacaataaatgacttaaaccaggtatgactgccgatggttatcttccagattggctcgaggacaaccttagtgaaggaattcgcgagtggtgggctttgaaacctggagcccctcaacccaaggcaaatcaacaacatcaagacaacgctcgaggtcttgtgcttccgggttacaaataccttggacccggcaacggactcgacaagggggagccggtcaacgcagcagacgcggcggccctcgagcacgacaaggcctacgaccagcagctcaaggccggagacaacccgtacctcaagtacaaccacgccgacgccgagttccaggagcggctcaaagaagatacgtcttttgggggcaacctcgggcgagcagtcttccaggccaaaaagaggcttcttgaacctcttggtctggttgaggaagcggctaagacggctcctggaaagaagaggcctgtagagcagtctcctcaggaaccggactcctccgcgggtattggcaaatcgggtgcacagcccgctaaaaagagactcaatttcggtcagactggcgacacagagtcagtcccagaccctcaaccaatcggagaacctcccgcagccccctcaggtgtgggatctcttacaatggcttcaggtggtggcgcaccagtggcagacaataacgaaggtgccgatggagtgggtagttcctcgggaaattggcattgcgattcccaatggctgggggacagagtcatcaccaccagcacccgaacctgggccctgcccacctacaacaatcacctctacaagcaaatctccaacagcacatctggaggatcttcaaatgacaacgcctacttcggctacagcaccccctgggggtattttgacttcaacagattccactgccacttctcaccacgtgactggcagcgactcatcaacaacaactggggattccggcctaagcaactcaacttcaagctcttcaacattcaggtcaaagaggttacggacaacaatggagtcaagaccatcgccaataaccttaccagcacggtccaggtcttcacggactcagactatcagctcccgtacgtgctcgggtcggctcacgagggctgcctcccgccgttcccagcggacgttttcatgattcctcagtacgggtatctgacgcttaatgatggaagccaggccgtgggtcgttcgtccttttactgcctggaatatttcccgtcgcaaatgctaagaacgggtaacaacttccagttcagctacgagtttgagaacgtacctttccatagcagctacgctcacagccaaagcctggaccgactaatgaatccactcatcgaccaatacttgtactatctctcaaagactattaacggttctggacagaatcaacaaacgctaaaattcagtgtggccggacccagcaacatggctgtccagggaagaaactacatacctggacccagctaccgacaacaacgtgtctcaaccactgtgactcaaaacaacaacagcgaatttgcttggcctggagcttcttcttgggctctcaatggacgtaatagcttgatgaatcctggacctgctatggccagccacaaagaaggagaggaccgtttctttcctttgtctggatctttaatttttggcaaacaaggaactggaagagacaacgtggatgcggacaaagtcatgataaccaacgaagaagaaattaaaactactaacccggtagcaacggagtcctatggacaagtggccacaaaccaccagagtgcccaagcacaggcgcagaccggctgggttcaaaaccaaggaatacttccgggtatggtttggcaggacagagatgtgtacctgcaaggacccatttgggccaaaattcctcacacggacggcaactttcacccttctccgctgatgggagggtttggaatgaagcacccgcctcctcagatcctcatcaaaaacacacctgtacctgcggatcctccaacggccttcaacaaggacaagctgaactctttcatcacccagtattctactggccaagtcagcgtggagatcgagtgggagctgcagaaggaaaacagcaagcgctggaacccggagatccagtacacttccaactattacaagtctaataatgttgaatttgctgttaatactgaaggtgtatatagtgaaccccgccccattggcaccagatacctgactcgtaatctgtaattgcttgttaatcaataaaccgtttaattcgtttcagttgaactgcggcc

SEQ ID NO: 571 - DNA, 2601 bp, Artificial Sequence
  Description of Artificial Sequence: Synthetic polynucleotide
ccatcgacgtcagacgcggaagcttcgatcaactacgcggacaggtaccaaaacaaatgttctcgtcacgtgggcatgaatctgatgctgtttccctgcagacaatgcgagagactgaatcagaattcaaatatctgcttcactcacggtgtcaaagactgtttagagtgctttcccgtgtcagaatctcaacccgtttctgtcgtcaaaaaggcgtatcagaaactgtgctacattcatcacatcatgggaaaggtgccagacgcttgcactgcttgcgacctggtcaatgtggacttggatgactgtgtttctgaacaataaatgacttaaaccaggtatggctgccgatggttatcttccagattggctcgaggacaaccttagtgaaggaattcgcgagtggtgggctttgaaacctggagcccctcaacccaaggcaaatcaacaacatcaagacaacgctcgaggtcttgtgcttccgggttacaaataccttggacccggcaacggactcgacaagggggagccggtcaacgcagcagacgcggcggccctcgagcacgacaaggcctacgaccagcagctcaaggccggagacaacccgtacctcaagtacaaccacgccgacgccgagttccaggagcggctcaaagaagatacgtcttttgggggcaacctcgggcgagcagtcttccaggccaaaaagaggcttcttgaacctcttggtctggttgaggaagcggctaagacggctcctggaaagaagaggcctgtagagcagtctcctcaggaaccggactcctccgcgggtattggcaaatcgggtgcacagcccgctaaaaagagactcaatttcggtcagactggcgacacagagtcagtcccagaccctcaaccaatcggagaacctcccgcagccccctcaggtgtgggatctcttacaatggcttcaggtggtggcgcaccagtggcagacaataacgaaggtgccgatggagtgggtagttcctcgggaaattggcattgcgattcccaatggctgggggacagagtcatcaccaccagcacccgaacctgggccctgcccacctacaacaatcacctctacaagcaaatctccaacagcacatctggaggatcttcaaatgacaacgcctacttcggctacagcaccccctgggggtattttgacttcaacagattccactgccacttctcaccacgtgactggcagcgactcatcaacaacaactggggattccggcctaagcgactcaacttcaagctcttcaacattcaggtcaaagaggttacggacaacaatggagtcaagaccatcgccaataaccttaccagcacggtccaggtcttcacggactcagactatcagctcccgtacgtgctcgggtcggctcacgagggctgcctcccgccgttcccagcggacgttttcatgattcctcagtacgggtatctgacgcttaatgatggaagccaggccgtgggtcgttcgtccttttactgcctggaatatttcccgtcgcaaatgctaagaacgggtaacaacttccagttcagctacgagtttgagaacgtacctttccatagcagctacgctcacagccaaagcctggaccgactaatgaatccactcatcgaccaatacttgtactatctctcaaagactattaacggttctggacagaatcaacaaacgctaaaattcagtgtggccggacccagcaacatggctgtccagggaagaaactacatacctggacccagctaccgacaacaacgtgtctcaaccactgtgactcaaaacaacaacagcgaatttgcttggcctggggcttcttcttgggctctcaatggacgtaatagcttgatgaatcctggacctgctatggccagccacaaagaaggagaggaccgtttctttcctttgtctggatctttaatttttggcaaacaaggaactggaagagacaacgtggatgcggacaaagtcatgataaccaacgaagaagaaattaaaactactaacccggtagcaacggagtcctatggacaagtggccacaaaccaccagagtgcccaagcacaggcgcagaccggctgggttcaaaaccaaggaatacttccgggtatggtttggcaggacagagatgtgtacctgcaaggacccatttgggccaaaattcctcacacgggcggcaactttcacccttctccgctgatgggagggtttggaatgaagcacccgcctcctcagatcctcatcaaaaacacacctgtacctgcggatcctccaacggccttcaacaaggacaagctgaactctttcatcacccagtattctactggccaagtcagcgtggagatcgagtgggagctgcagaaggaaaacagcaagcgctggaacccggagatccagtacacttccaactattacaagtctaataatgttgaatttgctgttaatactggaggtgtatatagtgaaccccgccccattggcaccagatacctgactcgtaatctgtaattgcttgttaatcaataaaccgtttaattcgtttcagttgaactgcggcc

SEQ ID NO: 572 - DNA, 2601 bp, Artificial Sequence
  Description of Artificial Sequence: Synthetic polynucleotide
ccatcgacgtcagacgcggaagcttcgatcaactacgcggacaggtaccaaaacaaatgttctcgtcacgtgggcatgaatctgatgctgtttccctgcagacaatgcgagagactgaatcagaattcaaatatctgcttcactcacggtgtcaaagactgtttagagtgctttcccgtgtcagaatctcaacccgtttctgtcgtcaaaaaggcgtatcagaaactgtgctacattcatcacatcatgggaaaggtgccagacgcttgcactgcttgcgacctggtcaatgtggactcggatgactgtgtttctgaacaataaatgacttaaaccaggtatggctgccgatggttatcttccagattggctcgaggacaaccttagtgaaggaattcgcgagtggtgggctttgaaacctggagcccctcaacccaaggcaaatcaacaacatcaagacaacgctcgaggtcttgtgcttccgggttacaaataccttggacccggcaacggactcgacaagggggagccggtcaacgcagcagacgcggcggccctcgagcacgacaaggcctacgaccagcagctcaaggccggagacaacccgtacctcaagtacaaccacgccgacgccgagttccaggagcggctcaaagaagatacgtcttttgggggcaacctcgggcgagcagtcttccaggccaaaaagaggcttcttgaacctcttggtctggttgaggaagcggctaagacggctcctggaaagaagaggcctgtagagcagtctcctcaggaaccggactcctccgcgggtattgacaaatcgggtgcacagcccgctaaaaagagactcaatttcggtcagactggcgacacagagtcagtcccagaccctcaaccaatcggagaacctcccgcagccccctcaggtgtgggatctcttacaatggcttcaggtggtggcgcaccagtggcagacaataacgaaggtgccgatggagtgggtagttcctcgggaaattggcattgcgattcccaatggctgggggacagagtcatcaccaccagcacccgaacctgggccctgcccacctacaacaatcacctctacaagcaaatctccaacagcacatctggaggatcttcaaatgacaacgcctacttcggctacagcaccccctgggggtattttgacttcaacagattccactgccacttctcaccacgtgactggcagcgactcatcaacaacaactggggattccggcctaagcgactcaacttcaagctcttcaacattcaggtcaaagaggttacggacaacaatggagtcaagaccatcgccaataaccttaccagcacggtccaggtcttcacggactcggactatcagctcccgtacgtgctcgggtcggctcacgagggctgcctcccgccgttcccagcggacgttttcatgattcctcagtacgggtatctgacgcttaatgatggaagccaggccgtgggtcgttcgtccttttactgcctggaatatttcccgtcgcaaatgctaagaacgggtaacaacttccagttcagctacgagtttgagaacgtacctttccatagcagctacgctcacagccaaagcctggaccgactaatgaatccactcatcgaccaatacttgtactatctctcaaagactattaacggttctggacagaatcaacaaacgctaaaattcagtgtggccggacccagcaacatggctgtccagggaagaaactacatacctggacccagctaccgacaacaacgtgtctcaaccactgtgactcaaaacaacaacagcgaatttgcttggcctggagcttcttcttgggctctcaatggacgtaatagcttgatgaatcctggacctgctatggccagccacaaagaaggagaggaccgtttctttcctttgtctggatctttaatttttggcaaacaaggaactggaagagacaacgtggatgcggacaaagtcatgataaccaacgaagaagaaattaaaactactaacccggtagcaacggagtcctatggacaagtggccacaaaccaccagagtgcccaagcacaggcgcagaccggctgggttcaaaaccaaggaatacttccgggtatggtttggcaggacagagatgtgtacctgcaaggacccatttgggccaaaattcctcacacggacggcaactttcacccttctccgctgatgggagggtttggaatgaagcacccgcctcctcagatcctcatcaaaaacacacctgtacctgcggatcctccaacggccttcaacaaggacaagctgaactctttcatcacccagtattctactggccaagtcagcgtggagatcgagtgggagctgcagaaggaaaacagcaagcgctggaacccggagatccagtacacttccaactattacaagtctaataatgttgaatttgctgttaatactgaaggtgtatatagtgaaccccgccccattggcaccagatacctgactcgtaatctgtaattgcttgttaatcaataaaccgtttaattcgtttcagttgaactgcggcc

SEQ ID NO: 573 - DNA, 2601 bp, Artificial Sequence
  Description of Artificial Sequence: Synthetic polynucleotide
ccatcgacgtcagacgcggaagcttcgatcaactacgcggacaggtaccaaaacaaatgttctcgtcacgtgggcatgaatctgatgctgtttccctgcagacaatgcgagagactgaatcagaattcaaatatctgcttcactcacggtgtcaaagactgtttagagtgctttcccgtgtcagaatctcaacccgtttctgtcgtcaaaaaggcgtatcagaaactgtgctacattcatcacatcatgggaaaggtgccagacgcttgcactgcttgcgacctggtcaatgtggacttggatgactgtgtttctgaacaataaatgacttaaaccaggtatggctgccgatggttatcttccagattggctcgaggacaaccttagtgaaggaattcgcgagtggtgggctttgaaacctggagcccctcaacccaaggcaaatcaacaacatcaagacaacgctcgaggtcttgtgcttccgggttacaaataccttggacccggcaacggactcgacaagggggagccggtcaacgcagcagacgcggcggccctcgagcacgacaaggcctacgaccagcagctcaaggccggagacaacccgtacctcaagtacaaccacgccgacgccgagttccaggagcggctcaaagaagatacgtcttttgggggcaacctcgggcgagcagtcctccaggccaaaaagaggcttcttgaacctcttggtctggttgaggaagcggctaagacggctcctggaaagaagaggcctgtagagcagtctcctcaggaaccggactcctccgcgggtattggcaaatcgggtgcacagcccgctaaaaagagactcaatttcggtcagactggcgacacagagtcagtcccagaccctcaaccaatcggagaacctcccgcagccccctcaggtgtgggatctcttacaatggcttcaggtggtggcgcaccagtggcagacaataacgaaggtgccgatggagtgggtagttcctcgggaaattggcattgcgattcccaatggctgggggacagagtcatcaccaccagcacccgaacctgggccctgcccacctacaacaatcacctctacaagcaaatctccaacagcacatctggaggatcttcaaatgacaacgcctacttcggctacagcaccccctgggggtattttgacttcaacagattccactgccacttctcaccacgtgactggcagcgactcatcaacaacaactggggattccggcctaagcgactcaacttcaagctcttcaacattcaggtcaaagaggttacggacaacaatggagtcaagaccatcgccaataaccttaccagcacggtccaggtcttcacggactcagactatcagctcccgtacgtgctcgggtcggctcacgagggctgcctcccgccgttcccagcggacgttttcatgattcctcagtacgggtatctgacgcttaatgatggaagccaggccgtgggtcgttcgtccttttactgcctggaatatttcccgtcgcaaatgctaagaacgggtaacaacttccagttcagctacgagtttgagaacgtacctttccatagcagctacgctcacagccaaagcctggaccgactaatgaatccactcatcgaccaatacttgtactatctctcaaagactattaacggttctggacagaatcaacaaacgctaaaattcagtgtggccggatccagcaacatggctgtccagggaagaaactacatacctggacccagctaccgacaacaacgtgtctcaaccactgtgactcaaaacaacaacagcgaatttgcttggcctggagcttcttcttgggctctcaatggacgtaatagcttgatgaatcctggacctgctatggccagccacaaagaaggagaggaccgtttctttcctttgtctggatctttaatttttggcaaacaaggaactggaagagacaacgtggatgcggacaaagtcatgataaccaacgaagaagaaattaaaactactaacccggtagcaacggagtcctatggacaagtggccacaaaccaccagagtgcccaagcacaggcgcagaccggctgggttcaaaaccaaggaatacttccaggtatggtttggcaggacagagatgtgtacctgcaaggacccatttgggccaaaattcctcacacggacggcaactttcacccttctccgctgatgggagggtttggaatgaagcacccgcctcctcagatcctcatcaaaaacacacctgtacctgcggatcctccaacggccttcaacaaggacaagctgaactctttcatcacccagtattctactggccaagtcagcgtggagatcgagtgggagctgcagaaggaaaacagcaagcgctggaacccggagatccagtacacttccaactattacaagtctaataatgttgaatttgctgttaatactgaaggtgtatatagtgaaccccgccccattggcaccagatacctgactcgtaatctgtaattgcttgttaatcaataaaccgtttaattcgtttcagttgaactgcggcc

SEQ ID NO: 574 - DNA, 2601 bp, Artificial Sequence
  Description of Artificial Sequence: Synthetic polynucleotide
ccatcgacgtcagacgcggaagcttcgatcaactacgcggacaggtaccaaaacaaatgttctcgtcacgtgggcatgaatctgatgctgtttccctgcagacaatgcgagagactgaatcagaattcaaatatctgcttcactcacggtgtcaaagactgtttagagtgctttcccgtgtcagaatctcaacccgtttctgtcgtcaaaaaggcgtatcagaaactgtgctacattcatcacatcatgggaaaggtgccagacgcttgcactgcttgcgacctggtcaatgtggacttggatgactgtgtttctgaacaataaatgacttaaaccaggtatggctgccgatggttatcttccagattggctcgaggacaaccttagtgaaggaattcgcgagtggtgggctttgaaacctggagcccctcaacccaaggcaaatcaacaacatcaagacaacgctcgaggtcttgtgcttccgggttacaaataccttggacccggcaacggactcgacaagggggagccggtcaacgcagcagacgcggcggccctcgagcacgacagggcctacgaccagcagctcaaggccggagacaacccgtacctcaagtacaaccacgccgacgccgagttccaggagcggctcaaagaagatacgtcttttgggggcaacctcgggcgagcagtcttccaggccaaaaagaggcttcttgaacctcttggtctggttgaggaagcggctaagacggctcctggaaagaagaggcctgtagagcagtctcctcaggaaccggactcctccgcgggtattggcaaatcgggtgcacagcccgctaaaaagagactcaatttcggtcagactggcgacacagagtcagtcccagaccctcaaccaatcggagaacctcccgcagccccctcaggtgtgggatctcttacaatggcttcaggtggtggcgcaccagtggcagacaataacgaaggtgccgatggagtgggtagttcctcgggaaattggcattgcgattcccaatggctgggggacagagtcatcaccaccagcacccgaacctgggccctgcccacctacaacaatcacctctacaagcaaatctccaacagcacatctggaggatcttcaaatgacaacgcctacttcggctacagcaccccctgggggtattttgacttcaacagattccactgccacttctcaccacgtgactggcagcgactcatcaacaacaactggggattccggcctaagcgactcaacttcaagctcttcaacattcaggtcaaagaggttacggacaacaatggagtcaagaccatcgccaataaccttaccagcacggtccaggtcttcacggactcagactatcagctcccgtacgtgctcgggtcggctcacgagggctgcctcccgccgttcccagcggacgttttcatgattcctcagtacgggtatctgacgcttaatgatggaagccaggccgtgggtcgttcgtccttttactgcctggaatatttcccgtcgcaaatgctaagaacgggtaacaacttccagttcagctacgagtttgagaacgtacctttccatagcagctacgctcacagccaaagcctggaccgactaatgaatccactcatcgaccaatacttgtactatctctcaaagactattaacggttctggacagaatcaacaaacgctaaaattcagtgtggccggacctagcaacatggctgtccagggaagaaactacatacctggacccagctaccgacaacaacgtgtctcaaccactgtgactcaaaacaacaacagcgaatttgcttggcctggagcttcttcttgggctctcaatggacgtaatagcttgatgaatcctggacctgctatggccagccacaaagaaggagaggaccgtttctttcctttgtctggatctttaatttttggcaaacaaggaactggaagagacaacgtggatgcggacaaagtcatgataaccaacgaagaagaaattaaaactactaacccggtagcaacggagtcctatggacaagtggccacaaaccaccagagtgcccaagcacaggcgcagaccggctgggttcaaaaccaaggaatacttccgggtatggtttggcaggacagagatgtgtacctgcaaggacccatttgggccaaaattcctcacacggacggcaactttcacccttctccgctgatgggagggtttggaatgaagcacccgcctcctcagatcctcatcaaaaacacacctgtacctgcggatcctccaacggccttcaacaaggacaagctgaactctttcatcacccagtattctactggccaagtcagcgtggagatcgagtgggagctgcagaagaaaaacagcaagcgctggaacccggagatccagtacacttccaactattacaagtctaataatgttgaatttgctgttaacactgaaggtgtatatagtgaaccccgccccattggcaccagatacctgactcgtaatctgtaattgcttgttaatcaataaaccgtttaattcgtttcagttgaactgcggcc

SEQ ID NO: 575 - DNA, 2601 bp, Artificial Sequence
  Description of Artificial Sequence: Synthetic polynucleotide
ccatcgacgtcagacgcggaagcttcgatcaactacgcggacaggtaccaaaacaaatgttctcgtcacgtgggcatgaatctgatgctgtttccctgcagacaatgcgagagactgaatcagaattcaaatatctgcttcactcacggtgtcaaagactgtttagagtgctttcccgtgtcagaatctcaacccgtttctgtcgtcaaaaaggcgtatcagaaactgtgctacattcatcacatcatgggaaaggtgccagacgcttgcactgcttgcgacctggtcaatgtggacttggatgactgtgtttctgaacaataaatgacttaaaccaggtatggctgccgatggttatcttccagattggctcgaggacaaccttagtgaaggaattcgcgagtggtgggctttgaaacctggagcccctcaacccaaggcaaatcaacaacatcaagacaacgctcgaggtcttgtgcttccgggttacaaataccttggacccggcaacggactcgacaagggggagccggtcaacgcagcagacgcggcggccctcgagcacgacaaggcctacgaccagcagctcaaggccggagacaacccgtacctcaagtacaaccacgccgacgccgagttccaggagcggctcaaagaagatacgtcttttgggggcaacctcgggcgagcagtcttccaggccaaaaagaggcttcttgaacctcttggtctggttgaggaagcggctaagacggctcctggaaagaagaggcctgtagagcagtctcctcaggaaccggactcctccgcgggtattggcaaatcgggtgcacagcccgctaaaaagagactcaatttcggtcagactggcgacacagagtcagtcccagaccctcaaccaatcggagaacctcccgcagccccctcaggtgtgggatctcttacaatggcttcaggtggtggcgcaccagtggcagacaataacgaaggtgccgatggagtgggtagttcctcgggaaattggcattgcgattcccaatggctgggggacagagtcatcaccaccagcacccgaacctgggccctgcccacctacaacaatcacctctacaagcaaatctccaacagcacatctggaggatcttcaaatgacaacgcctacttcggctacagcaccccctgggggtattttgacttcaacagattccactgccacttctcaccacgtgactggcagcgactcatcaacaacaactggggattccggcctaagcgactcaacttcaagctcttcaacattcaggtcaaagaggttacggacaacaatggagtcaagaccatcgccaataaccttaccagcacggtccaggtcttcacggactcagactatcagctcccgtacgtgctcgggtcggctcacgagggctgcctcccgccgttcccagcggacgttttcatgattcctcagtacgggtatctgacgcttaatgatggaagccaggccgtgggtcgttcgtccttttactgcctggaatatttcccgtcgcaaatgctaagaacgggtaacaacttccagttcagctacgagtttgagaacgtacctttccatagcagctacgctcacagccaaagcctggaccgactaatgaatccactcatcgaccaatacttgtactatctctcaaagactattaacggttctggacagaatcaacaaacgctaaaattcagtgtggccggacccagcaacatggctgtccagggaagaaactacatacctggacccagctaccgacaacaacgtgtctcaaccactgtgactcaaaacaacaacagcgaatttgcttggcctggagcttcttcttgggctctcaatggacgtaatagcttgatgaatcctggacctgctatggccagccacaaagaaggagaggaccgtttctttcctttgtctggatctttaatttttggcaaacaaggaactggaagagacaacgtggatgcggacaaagtcatgataaccaacgaagaagaaattaaaactactaacccggtagcaacggagtcctatggacaagtggccacaaaccaccagagtgcccaagcacgggcgcagaccggctgggttcaaaaccaaggaatacttccgggtatggtttggcaggacagagatgtgtacctgcaaggacccatttgggccaaaattcctcacacggacggcaactttcacccttctccgctgatgggagggtttggaatgaagcacccgcctcctcagatcctcatcaaaaacacacctgtacctgcggatcctccaacggccttcaacaaggacaagctgaactctttcatcacccagtattctactggccaagtcagcgtggagatcgagtgggagctgcagaaggaaaacagcaagcgctggaacccggagatccagtacacttccaactattacaagtctaataatgttgaatttgctgttaatactgaaggtgtatatagtgaaccccgccccattggcaccagatacctgactcgtaatctgtaattgcttgttaatcaataaaccgtttaattcgtttcagttgaactgcggcc

SEQ ID NO: 576 - DNA, 2601 bp, Artificial Sequence
  Description of Artificial Sequence: Synthetic polynucleotide
ccatcgacgtcagacgcggaagcttcgatcaactacgcggacaggtaccaaaacaaatgttctcgtcacgtgggcatgaatctgatgctgtttccctgcagacaatgcgagagactgaatcagaattcaaatatctgcttcactcacggtgtcaaagactgtttagagtgctttcccgtgtcagaatctcaacccgtttctgtcgtcaaaaaggcgtatcagaaactgtgctacattcatcacatcatgggaaaggtgccagacgcttgcactgcttgcgacctggtcaatgtggacttggatgactgtgtttctgaacaataaatgacttaaaccaggtatggctgccgatggttatcttccagattggctcgaggacaaccttagtgaaggaattcgcgagtggtgggctttgaaacctggagcccctcaacccaaggcaaatcaacaacatcaagacaacgctcgaggtcttgtgcttccgggttacaaataccttggacccggcaacggactcgacaagggggagccggtcaacgcagtagacgcggcggccctcgagcacgacaaggcctacgaccagcagctcaaggccggagacaacccgtacctcaagtacaaccacgccgacgccgagttccaggagcggctcaaagaagatacgtcttttgggggcaacctcgggcgagcagtcttccaggccaaaaagaggcttcttgaacctcttggtctggttgaggaagcggctaagacggctcctggaaagaagaggcctgtagagcagtctcctcaggaaccggactcctccgcgggtattggcaaatcgggtgcacagcccgctaaaaagagactcaatttcggtcagactggcgacacagagtcagtcccagaccctcaaccaatcggagaacctcccgcagccccctcaggtgtgggatctcttacaatggcttcaggtggtggcgcaccagtggcagacaataacgaaggtgccgatggagtgggtagttcctcgggaaattggcattgcgattcccaatggctgggggacagagtcatcaccaccagcacccgaacctgggccctgcccacctacaacaatcacctctacaagcaaatctccaacagcacatctggaggatcttcaaatgacaacgcctacttcggctacagcaccccctgggggtattttgacttcaacagattccactgccacttctcaccacgtgactggcagcgactcatcaacaacaactggggatttcggcctaagcgactcaacttcaagctcttcaacattcaggtcaaagaggttacggacaacaatggagtcaagaccatcgccaataaccttaccagcacggtccaggtcttcacggactcagactatcagctcccgtacgtgctcgggtcggctcacgagggctgcctcccgccgttcccagcggacgttttcatgattcctcagtacgggtatctgacgcttaatgatggaagccaggccgtgggtcgttcgtccttttactgcctggaatatttcccgtcgcaaatgctaagaacgggtaacaacttccagttcagctacgagtttgagaacgtacctttccatagcagctacgctcacagccaaagcctggaccgactaatgaatccactcatcgaccaatacttgtactatctctcaaagactattaacggttctggacagaatcaacaaacgctaaaattcagtgtggccggacccagcaacatggctgtccagggaagaaactacatacctggacccagctaccgacaacaacgtgtctcaaccactgtgactcaaaacaacaacagcgaatttgcttggcctggagcttcttcttgggctctcaatggacgtaatagcttgatgaatcctggacctgctatggccagccacaaagaaggagaggaccgtttctttcctttgtctggatctttaatttttggcaaacaaggaactggaagagacaacgtggatgcggacaaagtcatgataaccaacgaagaagaaattaaaactactaacccggtagcaacggagtcctatggacaagtggccacaaaccaccagagtgcccaagcacaggcgcagaccggctgggttcaaaaccaaggaatacttccgggtatggtttggcaggacagagatgtgtacctgcaaggacccatttgggccaaaattcctcacacggacggcaactttcacccttctccgctgatgggagggtttggaatgaagcacccgcctcctcagatcctcatcaaaaacacacctgtacctgcggatcctccaacggccttcaacaaggacaagctgaactctttcatcacccagtattctactggccaagtcagcgtggagatcgagtgggagctgcagaaggaaaacagcaagcgctggaacccggagatccagtacacttccaactattacaagtctaataatgttgaatttgctgttaatactgaaggtgtatatagtgaaccccgccccattggcaccagatacctgactcgtaatctgtaattgcttgttaatcaataaaccgtttaattcgtttcagttgaactgcggcc

SEQ ID NO: 577 - DNA, 2580 bp, Artificial Sequence
  Description of Artificial Sequence: Synthetic polynucleotide
ccatcgacgtcagacgcggaagcttcgatcaactacgcggacaggtaccaaaacaaatgttctcgtcacgtgggcatgaatctgatgctgtttccctgcagacaatgcgagagactgaatcagaattcaaatatctgcttcactcacggtgtcaaagactgtttagagtgctttcccgtgtcagaatctcaacccgtttctgtcgtcaaaaaggcgtatcagaaactgtgctacattcatcacatcatgggaaaggtgccagacgcttgcactgcttgcgacctggtcaatgtggacttggatgactgtgtttctgaacaataaatgacttaaaccaggtatggctgccgatggttatcttccagattggctcgaggacaaccttagtgaaggaattcgcgagtggtgggctttgaaacctggagcccctcaacccaaggcaaatcaacaacatcaagacaacgctcgaggtcttgtgcttccgggttacaaataccttggacccggcaacggactcgacaagggggagccggtcaacgcagcagacgcggcggccctcgagcacgacaaggcctacgaccagcagctcaaggccggagacaacccgtacctcaagtacaaccacgccgacgccgagttccaggagcggctcaaagaagatacgtcttttgggggcaacctcgggcgagcagtcttccaggccaaaaagaggcttcttgaacctcttggtctggttgaggaagcggctaagacggctcctggaaagaagaggcctgtagagcagtctcctcgggaaccggactcctccgcgggtattggcaaatcgggtgcacagcccgctaaaaagagactcaatttcggtcagactggcgacacagagtcagtcccagaccctcaaccaatcggagaacctcccgcagccccctcaggtgtgggatctcttacaatggcttcaggtggtggcgcaccagtggcagacaataacgaaggtgccgatggagtgggtagttcctcgggaaattggcattgcgattcccaatggctgggggacagagtcatcaccaccagcacccgaacctgggccctgcccacctacaacaatcacctctacaagcaaatctccaacagcacatctggaggatcttcaaatgacaacgcctacttcggctacagcaccccctgggggtattttgacttcaacagattccactgccacttctcaccacgtgactggcagcgactcatcaacaacaactggggattccggcctaagcgactcaacttcaagctcttcaacattcaggtcaaagaggttacggacaacaatggagtcaagaccatcgccaataaccttaccagcacggtccaggtcttcacggactcagactatcagctcccgtacgtgctcgggtcggctcacgagggctgcctcccgccgttcccagcggacgttttcatgattcctcagtacgggtatctgacgcttaatgatggaagccaggccgtgggtcgttcgtccttttactgcctggaatatttcccgtcgcaaatgctaagaacgggtaacaacttccagttcagctacgagtttgagaacgtacctttccatagcagctacgctcacagccaaagcctggaccgactaatgaatccactcatcgaccaatacttgtactatctctcaaagactattaacggttctggacagaatcaacaaacgctaaaattcagtgtggccggacccagcaacatggctgtccagggaagaaactacatacctggacccagctaccgacaacaacgtgtctcaaccactgtgactcaaaacaacaacagcgaatttgcttggcctggagcttcttcttgggctctcaatggacgtaatagcttgatgaatcctggacctgctatggccagccacaaagaaggagaggaccgtttctttcctttgtctggatctttaatttttggcaaacaaggaactggaagagacaacgtggatgcggacaaagtcatgataaccaacgaagaagaaattaaaactactaacccggtagcaacggagtcctatggacaagtggccacaaaccaccagagtgcccaagcacaggcgcagaccggctgggttcaaaaccaaggaatacttccgggtatggtttggcaggacagagatgtgtacctgcaaggacccatttgggccaaaattcctcacacggacggcaactttcacccttctccgctgatgggagggtttggaatgaagcacccgcctcctcagatcctcatcaaaaacacacctgtacctgcggatcctccaacggccttcaacaaggacaagctgaactctttcatcacccagtattctactggccaagtcagcgtggagatcgagtgggaactgcagaaggaaaacagcaagcgctggaacccggagatccagtacacttccaactattacaagtctaataatgttgaatttgctgttaatactgaaggtgtatatagtgaaccccgccccattggcaccagatacctgactcgtaatctgtaattgcttgttaatcaataaaccgtttaatt

SEQ ID NO: 578 - DNA, 2601 bp, Artificial Sequence
  Description of Artificial Sequence: Synthetic polynucleotide
ccatcgacgtcagacgcggaagcttcgatcaactacgcggacaggtaccaaaacaaatgttctcgtcacgtgggcatgaatctgatgctgtttccctgcagacaatgcgagagactgaatcagaattcaaatatctgcttcactcacggtgtcaaagactgtttagagtgctttcccgtgtcagaatctcaacccgtttctgtcgtcaaaaaggcgtatcagaaactgtgctacattcatcacatcatgggaaaggtgccagacgcttgcactgcttgcgacctggtcaatgtggacttggatgactgtgtttctgaacaataaatgacttaaaccaggtatggctgccgatggttatcttccagattggctcgaggacaaccttagtgaaggaattcgcgagtggtgggctttgaaacctggagcccctcaacccaaggcaaatcaacaacatcaagacaacgctcgaggtcttgtgcttccgggttacaaataccttggacccggcaacggactcgacaagggggagccggtcaacgcagcagacgcggcggccctcgagcacgacaaggcctacgaccagcagctcaaggccggagacaacccgtacctcaagtacaaccacgccgacgccgagttccaggagcggctcaaagaagatacgtcttttgggggcaacctcgggcgagcagtctttcaggccaaaaagaggcttcttgaacctcttggtctggttgaggaagcggctaagacggctcctggaaagaagaggcctgtagagcagtctcctcaggaaccggactcctccgcgggtattggcaaatcgggtgcacagcccgctaaaaagagactcaatttcggtcagactggcgacacagagtcagtcccagaccctcaaccaatcggagaacctcccgcagccccctcaggtgtgggatctcttacaatggcttcatgtggtggcgcaccagtggcagacaataacgaaggtgccgatggagtgggtagttcctcgggaaattggcattgcgattcccaatggctgggggacagagtcatcaccaccagcacccgaacctgggccctgcccacctacaacaatcacctctacaagcaaatctccaacagcacatctggaggatcttcaaatgacaacgcctacttcggctacagcaccccctgggggtattttgacttcaacagattccactgccacttctcaccacgtgactggcagcgactcatcaacaacaactggggattccggcctaagcgactcaacttcaagctcttcaacattcaggtcaaagaggttacggacaacaatggagtcaagaccatcgccaataaccttaccagcacggtccaggtcttcacggactcagactatcagctcccgtacgtgctcgggtcggctcacgagggctgcctcccgccgttcccagcggacgttttcatgattcctcagtacgggtatctgacgcttaatgatggaagccaggccgtgggtcgttcgtccttttactgcctggaatatttcccgtcgcaaatgctaagaacgggtaacaacttccagttcagctacgagtttgagaacgtacctttccatagcagctacgctcacagccaaagcctggaccgactaatgaatccactcatcgaccaatacttgtactatctctcaaagactattaacggttctggacagaatcaacaaacgctaaaattcagtgtggccggacccagcaacatggctgtccagggaagaaactacatacctggacccagctaccgacaacaacgtgtctcaaccactgtgactcaaaacaacaacagcgaatttgcttggcctggagcttcttcttgggctctcaatggacgtaatagcttgatgaatcctggacctgctatggccagccacaaagaaggagaggaccgtttctttcctttgtctggatctttaatttttggcaaacaaggaactggaagagacaacgtggatgcggacaaagtcatgataaccaacgaagaagaaattaaaactactaacccggtagcaacggagtcctatggacaagtggccacaaaccaccagagtgcccaagcacaggcgcagaccggctgggttcaaaaccaaggaatacttccgggtatggtttggcaggacagagatgtgtacctgcaaggacccatttgggccaaaattcctcacacggacggcaactttcacccttctccgctgatgggagggtttggaatgaagcacccgcctcctcagatcctcatcaaaaacacacctgtacctgcggatcctccaacggccttcaacaaggacaagctgaactctttcatcacccagtattctactggccaagtcagcgtggagatcgagtgggagctgcagaaggaaaacagcaagcgctggaacccggagatccagtacacttccaactattacaagtctaataatgttgaatttgctgttaatactgaaggtgtatatagtgaaccccgccccattggcaccagatacctgactcgtaatctgtaattgcttgttaatcaataaaccgtttaattcgtttcagttgaactgcggcc

SEQ ID NO: 579 - DNA, 2601 bp, Artificial Sequence
  Description of Artificial Sequence: Synthetic polynucleotide
ccatcgacgtcagacgcggaagcttcgatcaactacgcggacaggtaccaaaacaaatgttctcgtcacgtgggcatgaatctgatgctgtttccctgcagacaatgcgagagactgaatcagaattcaaatatctgcttcactcacggtgtcaaagactgtttagagtgctttcccgtgtcagaatctcaacccgtttctgtcgtcaaaaaggcgtatcagaaactgtgctacattcatcacatcatgggaaaggtgccagacgcttgcactgcttgcgacctggtcaatgtggacttggatgactgtgtttctgaacaataaatgacttaaaccaggtatggctgccgatggttatcttccagattggctcgaggacaaccttagtgaaggaattcgcgagtggtgggctttgaaacctggagcccctcaacccaaggcaaatcaacaacatcaagacaacgctcgaggtcttgtgcttccgggttacaaataccttggacccggcaacggactcgacaagggggagccgatcaacgcagcagacgcggcggccctcgagcacgacaaggcctacgaccagcagctcaaggccggagacaacccgtacctcaagtacaaccacgccgacgccgagttccaggagcggctcaaagaagatacgtcttttgggggcaacctcgggcgagcagtcttccaggccaaaaagaggcttcttgaacctcttggtctggttgaggaagcggctaagacggctcctggaaagaagaggcctgtagagcagtctcctcaggaaccggactcctccgcgggtattggcaaatcgggtgcacagcccgctaaaaagagactcaatttcggtcagactggcgacacagagtcagtcccagaccctcaaccaatcggagaacctcccgcagccccctcaggtgtgggatctcttacaatggcttcaggtggtggcgcaccagtggcagacaataacgaaggtgccgatggagtgggtagttcctcgggaaattggcattgcgattcccaatggctgggggacagagtcatcaccaccagcacccgaacctgggccctgcccacctacaacaatcacctctacaagcaaatctccaacagcacatctggaggatcttcaaatgacaacgcctacttcggctacagcaccccctgggggtattttgacttcaacagattccactgccacttctcaccacgtgactggcagcgactcatcaacaacaactggggattccggcctaagcgactcaacttcaagctcttcaacattcaggtcaaagaggttacggacaacaatggagtcaagaccatcgccaataaccttaccagcacggtccaggtcttcacggactcagactatcagctcccgtacgtgctcgggtcggctcacgagggctgcctcccgccgttcccagcggacgttttcatgattcctcagtacgggtatctgacgcttaatgatggaagccaggccgtgggtcgttcgtccttttactgcctggaatatttcccgtcgcaaatgctaagaacgggtaacaacttccagttcagctacgagtttgagaacgtacctttccatagcagctacgctcacagccaaagcctggaccgactaatgaatccactcatcgaccaatacttgtactatctctcaaagactattaacggttctggacagaatcaacaaacgctaaaattcagtgtggccggacccagcaacatggctgtccagggaagaaactacatacctggacccagctaccgacaacaacgtgtctcaaccactgtgactcaaaacaacaacagcgaatttgcttggcctggagcttcttcttgggctctcaatggacgtaatagcttgatgaatcctggacctgctatggccagccacaaagaaggagaggaccgtttctttcctttgtctggatctttaatttttggcaaacaaggaactggaagagacaacgtggatgcggacaaagtcatgataaccaacgaagaagaaattaaaactactaacccggtagcaacggagtcctatggacaagtggccacaaaccaccagagtgcccaagcacaggcgcagaccggctgggttcaaaaccaaggaatacttccgggtatggtttggcaggacagagatgtgtacctgcaaggacccatttgggccaaaattcctcacacgtacggcaactttcacccttctccgctgatgggagggtttggaatgaagcacccgcctcctcagatcctcatcaaaaacacacctgtacctgcggatcctccaacggccttcaacaaggacaagctgaactctttcatcacccagtattctactggccaagtcagcgtggagatcgagtgggagctgcagaaggaaaacagcaagcgctggaacccggagatccagtacacttccaactattacaagtctaataatgttgaatttgctgttaatactgaaggtgtatatagtgaaccccgccccattggcaccagatacctgactcgtaatctgtaattgcttgttaatcaataaaccgtttaattcgtttcagttgaactgcggcc

SEQ ID NO: 580 - DNA, 2601 bp, Artificial Sequence
  Description of Artificial Sequence: Synthetic polynucleotide
ccatcgacgtcagacgcggaagcttcgatcaactacgcggacaggtaccaaaacaaatgttctcgccacgtgggcatgaatctgatgctgtttccctgcagacaatgcgagagactgaatcagaattcaaatatctgcttcactcacggtgtcaaagactgtttagagtgctttcccgtgtcagaatctcaacccgtttctgtcgtcaaaaaggcgtatcagaaactgtgctacattcatcacatcatgggaaaggtgccagacgcttgcactgcttgcgacctggtcaatgtggacttggatgactgtgtttctgaacaataaatgacttaaaccaggtatggctgccgatggttatcttccagattggctcgaggacaaccttagtgaaggaattcgcgagtggtgggctttgaaacctggagcccctcaacccaaggcaaatcaacaacatcaagacaacgctcgaggtcttgtgcttccgggttacaaataccttggacccggcaacggactcgacaagggggagccggtcaacgcagcagacgcggcggccctcgagcacgacaaggcctacgaccagcagctcaaggccggagacaacccgtacctcaagtacaaccacgccgacgccgagttccaggagcggctcaaagaagatacgtcttttgggggcaacctcgggcgagcagtcttccaggccaaaaagaggcttcttgaacctcttggtctggttgaggaagcggctaagacggctcctggaaagaagaggcctgtagagcagtctcctcaggaaccggactcctccgcgggtattggcaaatcgggtgcacagcccgctaaaaagagactcaatttcggtcagactggcgacacagagtcagtcccagaccctcaaccaatcggagaacctcccgctgccccctcaggtgtgggatctcttacaatggcttcaggtggtggcgcaccagtggcagacaataacgaaggtgccgatggagtgggtagttcctcgggaaattggcattgcgattcccaatggctgggggacagagtcatcaccaccagcacccgaacctgggccctgcccacctacaacaatcacctctacaagcaaatctccaacagcacatctggaggatcttcaaatgacaacgcctacttcggctacagcaccccctgggggtattttgacttcaacagattccactgccacttctcaccacatgactggcagcgactcatcaacaacaactggggattccggcctaagcgactcaacttcaagctcttcaacattcaggtcaaagaggttacggacaacaatggagtcaagaccatcgccaataaccttaccagcacggtccaggtcttcacggactcagactatcagctcccgtacgtgctcgggtcggctcacgagggctgcctcccgccgttcccagcggacgttttcatgattcctcagtacgggtatctgacgcttaatgatggaagccaggccgtgggtcgttcgtccttttactgcctggaatatttcccgtcgcaaatgctaagaacgggtaacaacttccagttcagctacgagtttgagaacgtacctttccatagcagctacgctcacagccaaagcctggaccgactaatgaatccactcatcgaccaatacttgtactatctctcaaagactattaacggttctggacagaatcaacaaacgctaaaattcaatgtggccggacccagcaacatggctgtccagggaagaaactacatacctggacccagctaccgacaacaacgtgtctcaaccactgtgactcaaaacaacaacagcgaatttgcctggcctagagcttcttcttgggctctcaatggacgtaatagcttgatgaatcctggacctgctatggccagccacaaagaaggagaggaccgtttctttcctttgtctggatctttaatttttggcaaacaaggaactggaagagacaacgtggatgcggacaaagtcatgataaccaacgaagaagaaattaaaactactaacccggtagcaacggagtcctatggacaagtggccacaaaccaccagagtgcccaagcacaggcgcagaccggctgggttcaaaaccaaggaatacttccgggtatggtttggcaggacagagatgtgtacctgcaaggacccatttgggccaaaattcctcacacggacggcaactttcacccttctccgctgatgggagggtttggaatgaagcacccgcctcctcagatcctcatcaaaaacacacctgtacctgcggatcctccaacggccttcaacaaggacaagctgaactctttcatcacccagtattctactggccaagtcagcatggagatcgagtgggagctgcagaaggaaaacagcaagcgctggaacccggagatccagtacacttccaactattacaagtctaataatgttgaatttgctgttaatactgaaggtgtatatagtgaaccccgccccattggcaccagatacctgactcgtaatctgtaattgcttgttaatcaataaaccgtttaattcgtttcagttgaactgcggcc

SEQ ID NO: 581 - DNA, 2601 bp, Artificial Sequence
  Description of Artificial Sequence: Synthetic polynucleotide
ccatcgacgtcagacgcggaagcttcgatcaactacgcggacaggtaccaaaacaaatgttctcgtcacgtgggcatgaatctgatgctgtttccctgcagacaatgcgagagactgaatcagaattcaaatatctgcttcactcacggtgtcaaagactgtttagagtgctttcccgtgtcagaatctcaacccgtttctgtcgtcaaaaaggcgtatcagaaactgtgctacattcatcacatcatgggaaaggtgccagacgcttgcactgcttgcgacctggtcaatgtggacttggatgactgtgtttctgaacaataaatgacttaaaccaggtatggctgccgatggttatcttccagattggctcgaggacaaccttagtgaaggaattcgcgagtggtgggctttgaaacctggagcccctcaacccaaggcaaatcaacaacatcaagacaacgctcgaggtcttgtgcttccgggttacaaataccttggacccggcaacggactcgacaagggggagccggtcaacgcagcagacgcggcggccctcgagcacgacaaggcctacgaccagcagctcaaggccggagacaacccgtacctcaagtacaaccacgccgacgccgagttccaggagcggctcaaagaagatacgtcttttgggggcaacctcgggcgagcagtcttccaggccaaaaagaggcttcttgaacctcttggtctggttgaggaagcggctaagacggctcctggaaagaagaggcctgtagagcagtctcctcaggaaccggactcctccgcgggtattggcaaatcgggtgcacagcccgctaaaaagagactcaatttcggtcagactggcgacacagagtcagtcccagaccctcaaccaatcggagaacctcccgcagccccctcaggtgtgggatctcttacaatggcttcaggtggtggcgcaccagtggcagacaataacgaaggtgccgatggagtgggtagttcctcgggaaattggcattgcgattcccaatggctgggggacagagtcatcaccaccagcacccgaacctgggccctgcccacctacaacaatcacctctacaagcaaatctccaacagcacatctggaggatcttcaaatgacaacgcctacttcggctacagcaccccctgggggtattttgacttcaacagattccactgccacttctcaccacgtgactggcagcgactcatcaacaacaactggggattccggcctaagcgactcaacttcaagctcttcaacattcaggtcaaagaggttacggacaacaatggagtcaagaccatcgccaataaccttaccagcacggtccaggtcttcacggactcagactatcagctcccgtacgtgctcgggtcggctcacgagggctgcctcccgccgttcccagcggacgttttcatgattcctcagtacgggtatctgacgcttaatgatggaagccaggccgtgggtcgttcgtccttttactgcctggaatatttcccgtcgcaaatgctaagaacgggtaacaacttccagttcagctacgagtttgagaacgtacctttccatagcagctacgctcacagccaaagcctggaccgactaatgaatccactcatcgaccaatacttgtactatctctcaaagactattaacggttctggacagaatcaacaaacgctaaaattcagtgtggccggacccagcaacatggctgtccagggaagaaactacatacctggacccagctaccgacaacaacgtgtctcaaccactgtgactcaaaacaacaacagcgaatttgcttggcctagagcttcttcttgggctctcaatggacgtaatagcttgatgaatcctggacctgctatggccagccacaaagaaggagaggaccgtttctttcctttgtctggatctttaatttttggcaaacaaggaactggaagagacaacgtggatgcggacaaagtcatgataaccaacgaagaagaaattaaaactactaacccggtagcaacggagtcctatggacaagtggccacaaaccaccagagtgcccaagcacaggcgcagaccggctgggttcaaaaccaaggaatacttccgggtatggtttggcaggacagagatgtgtacctgcaaggacccatttgggccaaaattcctcacacggacggcaactttcacccttctccgctgatgggagggtttggaatgaagcacccgcctcctcagatcctcatcaaaaacacacctgtacctgcggatcctccaacggccttcaacaaggacaagctgaactctttcatcacccagtattctactggccaagtcagcgtggagatcgagtgggagctgcagaaggaaaacagcaagcgctggaacccggagatccagtacacttccaactattacaagtctaataatgttgaatttgctgttaatactgaaggtgtatatagtgaaccccgccccattggcaccagatacctgactcgtaatctgtaattgcttgttaatcaataaaccgtttaattcgtttcagttgaactgcggcc

SEQ ID NO: 582 - DNA, 2601 bp, Artificial Sequence
  Description of Artificial Sequence: Synthetic polynucleotide
ccatcgacgtcagacgcggaagcttcgatcaactacgcggacaggtaccaaaacaaatgttctcgtcacgtgggcatgaatctgatgctgtttccctgcagacaatgcgagagactgaatcagaattcaaatatctgcttcactcacggtgtcaaagactgtttagagtgctttcccgtgtcagaatctcaacccgtttctgtcgtcaaaaaggcgtatcagaaactgtgctacattcatcacatcatgggaaaggtgccagacgcttgcactgcttgcgacctggtcaatgtggacttggatgactgtgtttctgaacaataaatgacttaaaccaggtatggctgccgatggttatcttccagattggctcgaggacaaccttagtgaaggaattcgcgagtggtgggctttgaaacctggagcccctcaacccaaggcaaatcaacaacatcaagacaacgctcgaggtcttgtgcttccgggttacaaataccttggacccggcaacggactcgacaagggggagccggtcaacgcagcagacgcggcggccctcgagcacgacaaggcctacgaccagcagctcaaggccggagacaacccgtacctcaagtacaaccacgccgacgccgagttccaggagcggctcaaagaagatacgtcttttgggggcaacctcgggcgagcagtcttccaggccaaaaagaggcttcttgaacctcttggtctggttgaggaagcggctaagacggctcctggaaagaagaggcctgtagagcagtctcctcaggaaccggactcctccgcgggtattggcaaatcgggtgcacagcccgctaaaaagagactcaatttcggtcagactggcgacacagagtcagtcccagaccctcaaccaatcggagaacctcccgcagccccctcaggtgtgggatctcttacaatggcttcaggtggtggcgcaccagtggcagacaataacgaaggtgccgatggagtgggtagttcctcgggaaattggcattgcgattcccaatggctgggggacagagtcatcaccaccagcacccgaacctgggccctgcccacctacaacaatcacctctacaagcaaatctccaacagcacatctggaggatcttcaaatgacaacgcctacttcggctacagcaccccctgggggtattttgacttcaacagattccactgccacttctcaccacgtgactggcagcgactcatcaacaacaactggggattccggcctaagcgactcaacttcaagctcttcaacattcaggtcaaagaggttacggacaacaatggagtcaagaccatcgccaataaccttaccagcacggtccaggtcttcacggactcagactatcagctcccgtacgtgctcgggtcggctcacgagggctgcctcccgccgttcccagcggacgttttcatgattcctcagtacgggtatctgacgcttaatgatggaagccaggccgtgggtcgttcgtccttttactgcctggaatatttcccgtcgcaaatgctaagaacgggtaacaacttccagttcagctacgagtttgagaacgtacctttccatagcagctacgctcacagccaaagcctggaccgactaatgaatccactcatcgaccaatacttgtactatctctcaaagactattaacggttctggacagaatcaacaaacgctaaaattcagtgtggccggacccagcaacatggctgtccagggaagaaactacatacctggacccagctaccgacaacaacgtgtctcaaccactgtgactcaaaacaacaacagcgaatttgcttggcctagagcttcttcttgggctctcaatggacgtaatagcttgatgaatcctggacctgctatggccagccacaaagaaggagaggaccgtttctttcctttgtctggatctttaatttttggcaaacaaggaactggaagagacaacgtggatgcggacaaagtcatgataaccaacgaagaagaaattaaaactactaacccggtagcaacggagtcctatggacaagtggccacaaaccaccagagtgcccaagcacaggcgcagaccggctgggttcaaaaccaaggaatacttccgggtatggtttggcaggacagagatgtgtacctgcaaggacccatttgggccaaaattcctcacacggacggcaactttcacccttctccgctgatgggagggtttggaatgaagcacccgcctcctcagatcctcatcaaaaacacacctgtacctgcggatcctccaacggccttcaacaaggacaagctgaactctttcatcacccagtattctactggccaagtcagcgtggagatcgagtgggagcggcagaaggaaaacagcaagcgctggaacccggagatccagtacacttccaactattacaagtctaataatgttgaatttgctgttaatactgaaggtgtatatagtgaaccccgccccattggcaccagatacctgactcgtaatctgtaattgcttgttaatcaataaaccgtttaattcgtttcagttgaactgcggcc

SEQ ID NO: 583 - DNA, 2601 bp, Artificial Sequence
  Description of Artificial Sequence: Synthetic polynucleotide
ccatcgacgtcagacgcggaagcttcgatcaactacgcggacaggtaccaaaacaaatgttctcgtcacgtgggcatgaatctgatgctgtttccctgcagacaatgcgagagactgaatcagaattcaaatatctgcttcactcacggtgtcaaagactgtttagagtgctttcccgtgtcagaatctcaacccgtttctgtcgtcaaaaaggcgtatcagaaactgtgctacattcatcacatcatgggaaaggtgccagacgcttgcactgcttgcgacctggtcaatgtggacttggatgactgtgtttctgaacaataaatgacttaaaccaggtatggctgccgatggttatcttccagattggctcgaggacaaccttagtgaaggaattcgcgagtggtgggctttgaaacctggagcccctcaacccaaggcaaatcaacaacatcaagacaacgctcgaggtcttgtgcttccgggttacaaataccttggacccggcaacggactcgacaagggggagccggtcaacgcagcagacgcggcggccctcgagcacgacaaggcctacgaccagcagctcaaggccggagacaacccgtacctcaagtacaaccacgccgacgccgagttccaggagcggctcaaagaagatacgtcttttgggggcaacctcgggcgagcagtcttccaggccaaaaagaggcttcttgaacctcttggtctggttgaggaagcggctaagacggctcctggaaagaagaggcctgtagagcagtctcctcaggaaccggactcctccgcgggtattggcaaatcgggtgcacagcccgctaaaaagagactcaatttcggtcagactggcgacacagagtcagtcccagaccctcaaccaatcggagaacctcccgcagccccctcaggtgtgggatctcttacaatggcttcaggtggtggcgcaccagtggcagacaataacgaaggtgccgatggagtgggtagttcctcgggaaattggcattgcgattcccaatggctgggggacagagtcatcaccaccagcacccgaacctgggccctgcccacctacaacaatcacctctacaagcaaatctccaacagcacatctggaggatcttcaaatgacaacgcctacttcggctacagcaccccctgggggtattttgacttcaacagattccactgccacttctcaccacgtgactggcagcgactcatcaacaacaactggggattccggcctaagcgactcaacttcaagctcttcaacattcaggtcaaagaggttacggacaacaatggagtcaagaccatcgccaataaccttaccagcacggtccaggtcttcgcggactcagactatcagctcccgtacgtgctcgggtcggctcacgagggctgcctcccgccgttcccagcggacgttttcatgattcctcagtacgggtatctgacgcttaatgatggaagccaggccgtgggtcgttcgtccttttactgcctggaatatttcccgtcgcaaatgctaagaacgggtaacaacttccagttcagctacgagtttgagaacgtacctttccatagcagctacgctcacagccaaagcctggaccgactaatgaatccactcatcgaccaatacttgtactatctctcaaagactattaacggttctggacagaatcaacaaacgctaaaattcagtgtggccggacccagcaacatggctgtccagggaagaaactacatacctggacccagctaccgacaacaacgtgtctcaaccactgtgactcaaaacaacaacagcgaatttgcttggcctagagcttcttcttgggctctcaatggacgtaatagcttgatgaatcctggacctgctatggccagccacaaagaaggagaggaccgtttctttcctttgtctggatctttaatttttggcaaacaaggaactggaagagacaacgtggatgcggacaaagtcatgataaccaacgaagaagaaattaaaactactaacccggtagcaacggagtcctatggacaagtggccacaaaccaccagagtgcccaagcacaggcgcagaccggctgggttcaaaaccaaggaatacttccgggtatggtttggcaggacagagatgtgtacctgcaaggacccatttgggccaaaattcctcacacggacggcaactttcacccttctccgctgatgggagggtttggaatgaagcacccgcctcctcagatcctcatcaaaaacacacctgtacctgcggatcctccaacggccttcaacaaggacaagctgaactctttcatcacccagtattctactggccaagtcagcgtggagatcgagtgggagctgcagaaggaaaacagcaagcgctggaacccggagatccagtacacttccaactattacaagtctaataatgttgaatttgctgttaatactgaaggtgtatatagtgaaccccgccccattggcaccagatacctgactcgtaatctgtaattgcttgttaatcaataaaccgtttaattcgtttcagttgaactgcggcc

SEQ ID NO: 584 - DNA, 2601 bp, Artificial Sequence
  Description of Artificial Sequence: Synthetic polynucleotide
ccatcgacgtcagacgcggaagcttcgatcaactacgcggacaggtaccaaaacaaatgttctcgtcacgtgggcatgaatctgatgctgtttccctgcagacaatgcgagagactgaatcagaattcaaatatctgcttcactcacggtgtcaaagactgtttagagtgctttcccgtgtcagaatctcaacccgtttctgtcgtcaaaaaggcgtatcagaaactgtgctacattcatcacatcatgggaaaggtgccagacgcttgcactgcttgcgacctggtcaatgtggacttggatgactgtgtttctgaacaataaatgacttaaaccaggtatggctgccgatggttatcttccagattggctcgaggacaaccttagtgaaggaattcgcgagtggtgggctttgaaacctggagcccctcaacccaaggcaaatcaacaacatcaagacaacgctcgaggtcttgtgcttccgggttacaaataccttggacccggcaacggactcgacaagggggagccggtcaacgcagcagacgcggcggccctcgagcacgacaaggcctacgaccagcagctcaaggccggagacaacccgtacctcaagtacaaccacgccgacgccgagttccaggagcggctcaaagaagatacgtcttttgggggcaacctcgggcgagcagtcttccaggccaaaaagaggcttcttgaacctcttggtctggttgaggaagcggctaagacggctcctggaaagaagaggcctgtagagcagtctcctcaggaaccggactcctccgcgggtattggcaaatcgggtgcacagcccgctaaaaagagactcaatttcggtcagactggcgacacagagtcagtcccagaccctcaaccaatcggagaacctcccgcagccccctcaggtgtgggatctcttacaatggcttcaggtggtggcgcaccagtggcagacaataacgaaggtgccgatggagtgggtagttcctcgggaaattggcattgcgattcccaatggctgggggacagagtcatcaccaccagcacccgaacctgggccctgcccacctacaacaatcacctctacaagcaaatctccaacagcacatctggaggatcttcaaatgacaacgcctacttcggctacagcaccccctgggggtattttgacttcaacagattccactgccacttctcaccacgtgactggcagcgactcatcaacaacaactggggattccggcctaagcgactcaacttcaagctcttcaacattcaggtcaaagaggttacggacaacaatggagtcaagaccatcgccaataaccttaccagcacggtccaggtcttcacggactcagactatcagctcccgtacgtgctcgggtcggctcacgagggctgcctcccgccgttcccagcggacgttttcatgattcctcagtacgggtatctgacgcttaatgatggaagccaggccgtgggtcgttcgtccttttactgcctggaatatttcccgtcgcaaatgctaagaacgggtaacaacttccagttcagctacgagtttgagaacgtacctttccatagcagctacgctcacagccaaagcctggaccgactaatgaatccactcatcgaccaatacttgtactatctctcaaagactattaacggttctggacagaatcaacaaacgctaaaattcagtgtggccggacccagcaacatggctgtccagggaagaaactacatacctggacccagctaccgacaacaacgtgtctcaaccactgtgactcaaaacaacaacagcgaaattgcttggcctagagcttcttcttgggctctcaatggacgtaatagcttgatgaatcctggacctgctatggccagccacaaagaaggagaggaccgtttctttcctttgtctggatctttaatttttggcaaacaaggaactggaagagacaacgtggatgcggacaaagtcatgataaccaacgaagaagaaattaaaactactaacccagtagcaacggagtcctatggacaagtggccacaaaccaccagagtgcccaagcacaggcgcagaccggctgggttcaaaaccaaggaatacttccgggtatggtttggcaggacagagatgtgtacctgcaaggacccatttgggccaaaattcctcacacggacggcaactttcacccttctccgctgatgggagggtttggaatgaagcacccgcctcctcagatcctcatcaaaaacacacctgtacctgcggatcctccaacggccttcaacaaggacaagctgaactctttcatcacccagtattctactggccaagtcagcgtggagatcgagtgggagctgcagaaggaaaacagcaagcgctggaacccggagatccagtacacttccaactattgcaagtctaataatgttgaatttgctgttaatactgaaggtgtatatagtgaaccccgccccattggcaccagatacctgactcgtaatctgtaattgcttgttaatcaataaaccgtttaattcgtttcagttgaactgcggcc

SEQ ID NO: 585 - DNA, 2601 bp, Artificial Sequence
  Description of Artificial Sequence: Synthetic polynucleotide
ccatcgacgtcagacgcggaagcttcgatcaactacgcggacaggtaccaaaacaaatgttctcgtcacgtgggcatgaatctgatgctgtttccctgcagacaatgcgagagactgaatcagaattcaaatatctgcttcactcacggtgtcaaagactgtttagagtgctttcccgtgtcagaatctcaacccgtttctgtcgtcaaaaaggcgtatcagaaactgtgctacattcatcacatcatgggaaaggtgccagacgcttgcactgcttgcgacctggtcaatgtggacttggatgtctgtgtttctgaacaataaatgacttaaaccaggtatggctgccgatggttatcttccagattggctcgaggacaaccttagtgaaggaattcgcgagtggtgggctttgaaacctggagcccctcaacccaaggcaaatcaacaacatcaagacaacgctcgaggtcttgtgcttccgggttacaaataccttggacccggcaacggactcgataagggggagccggtcaacgcagcagacgcggcggccctcgagcacgacaaggcctacgaccagcagctcaaggccggagacaacccgtacctcaagtacaaccacgccgacgccgagttccaggagcggctcaaagaagatacgtcttttgggggcaacctcgggcgagcagtcttccaggccaaaaagaggcttcttgaacctcttggtctggttgaggaagcggctaagacggctcctggaaagaagaggcctgtagagcagtctcctcaggaaccggactcctccgcgggtattggcaaatcgggtgcacagcccgctaaaaagagactcaatttcggtcagactggcgacacagagtcagtcccagaccctcaaccaatcggagaacctcccgcagccccctcaggtgtgggatctcttacaatggcttcaggtggtggcgcaccagtggcagacaataacgaaggtgccgatggagtgggtagttcctcgggaaattggcattgcgattcccaatggctgggggacagagtcatcaccaccagcacccgaacctgggccctgcccacctacaacaatcacctctacaagcaaatctccaacagcacatctggaggatcttcaaatgacaacgcctacttcggctacagcaccccctgggggtattttgacttcaacagattccactgccacttctcaccacgtgactggcagcgactcatcaacaacaactggggattccggcctaagcgactcaacttcaagctcttcaacattcaggtcaaagaggttacggacaacaatggagtcaagaccatcgccaataaccttaccagcacggtccaggtcttcacggactcagactatcagctcccgtacgtgctcgggtcggctcacgagggctgcctcccgccgttcccagcggacgttttcatgattcctcagtacgggtatctgacgcttaatgatggaagccaggccgtgggtcgttcgtccttttactgcctggaatatttcccgtcgcaaatgctaagaacgggtaacaacttccagttcagctacgagtttgagaacgtacctttccatagcagctacgctcacagccaaagcctggaccgactaatgaatccactcatcgaccaatacttgtactatctctcaaagactattaacggttctggacagaatcaacaaacgctaaaattcagtgtggccggacccagcaacatggctgtccagggaagaaactacatacctggacccagctaccgacaacaacgtgtctcaaccactgtgactcaaaacaacaacagcgaatttgcttggcctagagcttcttcttgggctctcaatggacgtaatagcttgatgaatcctggacctgctatggccagccacaaagaaggagaggaccgtttctttcctttgtctggatctttaatttttggcaaacaaggaactggaagagacaacgtggatgcggacaaagtcatgataaccaacgaagaagaaattaaaactactaacccggtagcaacggagtcctatggacaagtggccacaaaccaccagagtgcccaagcacaggcgcagaccggctgggttcaaaaccaaggaatacttccgggtatggtttggcaggacagagatgtgtacctgcaaggacccatttgggccaaaattcctcacacggacggcaactttcacccttctccgctgatgggagggtttggaatgaagcacccgcctcctcagatcctcatcaaaaacacacctgtacctgcggatcctccaacggccttcaacaaggacaagctgaactctttcatcacccagtattctactggccaagtcagcgtggagatcgagtgggagctgcagaaggaaaacagcaagcgctggaacccggagatccagtacacttccaactattacaagtctaataatgttgaatttgctgttaatactgaaggtgtatatagtgaaccccgccccattggcaccagatacctgactcgtaatctgtaattgcttgttaatcaataaaccgtttaattcgtttcagttgaactgcggcc

SEQ ID NO: 586 - protein, 736 aa, Artificial Sequence
  Description of Artificial Sequence: Synthetic polypeptide
MTADGYLPDWLEDNLSEGIREWWALKPGAPQPKANQQHQDNARGLVLPGYKYLGPGNGLDKGEPVNAADAAALEHDKAYDQQLKAGDNPYLKYNHADAEFQERLKEDTSFGGNLGRAVFQAKKRLLEPLGLVEEAAKTAPGKKRPVEQSPQEPDSSAGIGKSGAQPAKKRLNFGQTGDTESVPDPQPIGEPPAAPSGVGSLTMASGGGAPVADNNEGADGVGSSSGNWHCDSQWLGDRVITTSTRTWALPTYNNHLYKQISNSTSGGSSNDNAYFGYSTPWGYFDFNRFHCHFSPRDWQRLINNNWGFRPKQLNFKLFNIQVKEVTDNNGVKTIANNLTSTVQVFTDSDYQLPYVLGSAHEGCLPPFPADVFMIPQYGYLTLNDGSQAVGRSSFYCLEYFPSQMLRTGNNFQFSYEFENVPFHSSYAHSQSLDRLMNPLIDQYLYYLSKTINGSGQNQQTLKFSVAGPSNMAVQGRNYIPGPSYRQQRVSTTVTQNNNSEFAWPGASSWALNGRNSLMNPGPAMASHKEGEDRFFPLSGSLIFGKQGTGRDNVDADKVMITNEEEIKTTNPVATESYGQVATNHQSAQAQAQTGWVQNQGILPGMVWQDRDVYLQGPIWAKIPHTDGNFHPSPLMGGFGMKHPPPQILIKNTPVPADPPTAFNKDKLNSFITQYSTGQVSVEIEWELQKENSKRWNPEIQYTSNYYKSNNVEFAVNTEGVYSEPRPIGTRYLTRNL

SEQ ID NO: 587 - protein, 736 aa, Artificial Sequence
  Description of Artificial Sequence: Synthetic polypeptide
MAADGYLPDWLEDNLSEGIREWWALKPGAPQPKANQQHQDNARGLVLPGYKYLGPGNGLDKGEPVNAADAAALEHDKAYDQQLKAGDNPYLKYNHADAEFQERLKEDTSFGGNLGRAVFQAKKRLLEPLGLVEEAAKTAPGKKRPVEQSPQEPDSSAGIGKSGAQPAKKRLNFGQTGDTESVPDPQPIGEPPAAPSGVGSLTMASGGGAPVADNNEGADGVGSSSGNWHCDSQWLGDRVITTSTRTWALPTYNNHLYKQISNSTSGGSSNDNAYFGYSTPWGYFDFNRFHCHFSPRDWQRLINNNWGFRPKRLNFKLFNIQVKEVTDNNGVKTIANNLTSTVQVFTDSDYQLPYVLGSAHEGCLPPFPADVFMIPQYGYLTLNDGSQAVGRSSFYCLEYFPSQMLRTGNNFQFSYEFENVPFHSSYAHSQSLDRLMNPLIDQYLYYLSKTINGSGQNQQTLKFSVAGPSNMAVQGRNYIPGPSYRQQRVSTTVTQNNNSEFAWPGASSWALNGRNSLMNPGPAMASHKEGEDRFFPLSGSLIFGKQGTGRDNVDADKVMITNEEEIKTTNPVATESYGQVATNHQSAQAQAQTGWVQNQGILPGMVWQDRDVYLQGPIWAKIPHTGGNFHPSPLMGGFGMKHPPPQILIKNTPVPADPPTAFNKDKLNSFITQYSTGQVSVEIEWELQKENSKRWNPEIQYTSNYYKSNNVEFAVNTGGVYSEPRPIGTRYLTRNL

SEQ ID NO: 588 - protein, 736 aa, Artificial Sequence
  Description of Artificial Sequence: Synthetic polypeptide
MAADGYLPDWLEDNLSEGIREWWALKPGAPQPKANQQHQDNARGLVLPGYKYLGPGNGLDKGEPVNAADAAALEHDKAYDQQLKAGDNPYLKYNHADAEFQERLKEDTSFGGNLGRAVFQAKKRLLEPLGLVEEAAKTAPGKKRPVEQSPQEPDSSAGIDKSGAQPAKKRLNFGQTGDTESVPDPQPIGEPPAAPSGVGSLTMASGGGAPVADNNEGADGVGSSSGNWHCDSQWLGDRVITTSTRTWALPTYNNHLYKQISNSTSGGSSNDNAYFGYSTPWGYFDFNRFHCHFSPRDWQRLINNNWGFRPKRLNFKLFNIQVKEVTDNNGVKTIANNLTSTVQVFTDSDYQLPYVLGSAHEGCLPPFPADVFMIPQYGYLTLNDGSQAVGRSSFYCLEYFPSQMLRTGNNFQFSYEFENVPFHSSYAHSQSLDRLMNPLIDQYLYYLSKTINGSGQNQQTLKFSVAGPSNMAVQGRNYIPGPSYRQQRVSTTVTQNNNSEFAWPGASSWALNGRNSLMNPGPAMASHKEGEDRFFPLSGSLIFGKQGTGRDNVDADKVMITNEEEIKTTNPVATESYGQVATNHQSAQAQAQTGWVQNQGILPGMVWQDRDVYLQGPIWAKIPHTDGNFHPSPLMGGFGMKHPPPQILIKNTPVPADPPTAFNKDKLNSFITQYSTGQVSVEIEWELQKENSKRWNPEIQYTSNYYKSNNVEFAVNTEGVYSEPRPIGTRYLTRNL

SEQ ID NO: 589 - protein, 736 aa, Artificial Sequence
  Description of Artificial Sequence: Synthetic polypeptide
MAADGYLPDWLEDNLSEGIREWWALKPGAPQPKANQQHQDNARGLVLPGYKYLGPGNGLDKGEPVNAADAAALEHDKAYDQQLKAGDNPYLKYNHADAEFQERLKEDTSFGGNLGRAVLQAKKRLLEPLGLVEEAAKTAPGKKRPVEQSPQEPDSSAGIGKSGAQPAKKRLNFGQTGDTESVPDPQPIGEPPAAPSGVGSLTMASGGGAPVADNNEGADGVGSSSGNWHCDSQWLGDRVITTSTRTWALPTYNNHLYKQISNSTSGGSSNDNAYFGYSTPWGYFDFNRFHCHFSPRDWQRLINNNWGFRPKRLNFKLFNIQVKEVTDNNGVKTIANNLTSTVQVFTDSDYQLPYVLGSAHEGCLPPFPADVFMIPQYGYLTLNDGSQAVGRSSFYCLEYFPSQMLRTGNNFQFSYEFENVPFHSSYAHSQSLDRLMNPLIDQYLYYLSKTINGSGQNQQTLKFSVAGSSNMAVQGRNYIPGPSYRQQRVSTTVTQNNNSEFAWPGASSWALNGRNSLMNPGPAMASHKEGEDRFFPLSGSLIFGKQGTGRDNVDADKVMITNEEEIKTTNPVATESYGQVATNHQSAQAQAQTGWVQNQGILPGMVWQDRDVYLQGPIWAKIPHTDGNFHPSPLMGGFGMKHPPPQILIKNTPVPADPPTAFNKDKLNSFITQYSTGQVSVEIEWELQKENSKRWNPEIQYTSNYYKSNNVEFAVNTEGVYSEPRPIGTRYLTRNL

SEQ ID NO: 590 - protein, 736 aa, Artificial Sequence
  Description of Artificial Sequence: Synthetic polypeptide
MAADGYLPDWLEDNLSEGIREWWALKPGAPQPKANQQHQDNARGLVLPGYKYLGPGNGLDKGEPVNAADAAALEHDRAYDQQLKAGDNPYLKYNHADAEFQERLKEDTSFGGNLGRAVFQAKKRLLEPLGLVEEAAKTAPGKKRPVEQSPQEPDSSAGIGKSGAQPAKKRLNFGQTGDTESVPDPQPIGEPPAAPSGVGSLTMASGGGAPVADNNEGADGVGSSSGNWHCDSQWLGDRVITTSTRTWALPTYNNHLYKQISNSTSGGSSNDNAYFGYSTPWGYFDFNRFHCHFSPRDWQRLINNNWGFRPKRLNFKLFNIQVKEVTDNNGVKTIANNLTSTVQVFTDSDYQLPYVLGSAHEGCLPPFPADVFMIPQYGYLTLNDGSQAVGRSSFYCLEYFPSQMLRTGNNFQFSYEFENVPFHSSYAHSQSLDRLMNPLIDQYLYYLSKTINGSGQNQQTLKFSVAGPSNMAVQGRNYIPGPSYRQQRVSTTVTQNNNSEFAWPGASSWALNGRNSLMNPGPAMASHKEGEDRFFPLSGSLIFGKQGTGRDNVDADKVMITNEEEIKTTNPVATESYGQVATNHQSAQAQAQTGWVQNQGILPGMVWQDRDVYLQGPIWAKIPHTDGNFHPSPLMGGFGMKHPPPQILIKNTPVPADPPTAFNKDKLNSFITQYSTGQVSVEIEWELQKKNSKRWNPEIQYTSNYYKSNNVEFAVNTEGVYSEPRPIGTRYLTRNL

SEQ ID NO: 591 - protein, 736 aa, Artificial Sequence
  Description of Artificial Sequence: Synthetic polypeptide
MAADGYLPDWLEDNLSEGIREWWALKPGAPQPKANQQHQDNARGLVLPGYKYLGPGNGLDKGEPVNAADAAALEHDKAYDQQLKAGDNPYLKYNHADAEFQERLKEDTSFGGNLGRAVFQAKKRLLEPLGLVEEAAKTAPGKKRPVEQSPQEPDSSAGIGKSGAQPAKKRLNFGQTGDTESVPDPQPIGEPPAAPSGVGSLTMASGGGAPVADNNEGADGVGSSSGNWHCDSQWLGDRVITTSTRTWALPTYNNHLYKQISNSTSGGSSNDNAYFGYSTPWGYFDFNRFHCHFSPRDWQRLINNNWGFRPKRLNFKLFNIQVKEVTDNNGVKTIANNLTSTVQVFTDSDYQLPYVLGSAHEGCLPPFPADVFMIPQYGYLTLNDGSQAVGRSSFYCLEYFPSQMLRTGNNFQFSYEFENVPFHSSYAHSQSLDRLMNPLIDQYLYYLSKTINGSGQNQQTLKFSVAGPSNMAVQGRNYIPGPSYRQQRVSTTVTQNNNSEFAWPGASSWALNGRNSLMNPGPAMASHKEGEDRFFPLSGSLIFGKQGTGRDNVDADKVMITNEEEIKTTNPVATESYGQVATNHQSAQARAQTGWVQNQGILPGMVWQDRDVYLQGPIWAKIPHTDGNFHPSPLMGGFGMKHPPPQILIKNTPVPADPPTAFNKDKLNSFITQYSTGQVSVEIEWELQKENSKRWNPEIQYTSNYYKSNNVEFAVNTEGVYSEPRPIGTRYLTRNL

SEQ ID NO: 592 - protein, 736 aa, Artificial Sequence
  Description of Artificial Sequence: Synthetic polypeptide
MAADGYLPDWLEDNLSEGIREWWALKPGAPQPKANQQHQDNARGLVLPGYKYLGPGNGLDKGEPVNAVDAAALEHDKAYDQQLKAGDNPYLKYNHADAEFQERLKEDTSFGGNLGRAVFQAKKRLLEPLGLVEEAAKTAPGKKRPVEQSPQEPDSSAGIGKSGAQPAKKRLNFGQTGDTESVPDPQPIGEPPAAPSGVGSLTMASGGGAPVADNNEGADGVGSSSGNWHCDSQWLGDRVITTSTRTWALPTYNNHLYKQISNSTSGGSSNDNAYFGYSTPWGYFDFNRFHCHFSPRDWQRLINNNWGFRPKRLNFKLFNIQVKEVTDNNGVKTIANNLTSTVQVFTDSDYQLPYVLGSAHEGCLPPFPADVFMIPQYGYLTLNDGSQAVGRSSFYCLEYFPSQMLRTGNNFQFSYEFENVPFHSSYAHSQSLDRLMNPLIDQYLYYLSKTINGSGQNQQTLKFSVAGPSNMAVQGRNYIPGPSYRQQRVSTTVTQNNNSEFAWPGASSWALNGRNSLMNPGPAMASHKEGEDRFFPLSGSLIFGKQGTGRDNVDADKVMITNEEEIKTTNPVATESYGQVATNHQSAQAQAQTGWVQNQGILPGMVWQDRDVYLQGPIWAKIPHTDGNFHPSPLMGGFGMKHPPPQILIKNTPVPADPPTAFNKDKLNSFITQYSTGQVSVEIEWELQKENSKRWNPEIQYTSNYYKSNNVEFAVNTEGVYSEPRPIGTRYLTRNL

SEQ ID NO: 593 - protein, 736 aa, Artificial Sequence
  Description of Artificial Sequence: Synthetic polypeptide
MAADGYLPDWLEDNLSEGIREWWALKPGAPQPKANQQHQDNARGLVLPGYKYLGPGNGLDKGEPVNAADAAALEHDKAYDQQLKAGDNPYLKYNHADAEFQERLKEDTSFGGNLGRAVFQAKKRLLEPLGLVEEAAKTAPGKKRPVEQSPREPDSSAGIGKSGAQPAKKRLNFGQTGDTESVPDPQPIGEPPAAPSGVGSLTMASGGGAPVADNNEGADGVGSSSGNWHCDSQWLGDRVITTSTRTWALPTYNNHLYKQISNSTSGGSSNDNAYFGYSTPWGYFDFNRFHCHFSPRDWQRLINNNWGFRPKRLNFKLFNIQVKEVTDNNGVKTIANNLTSTVQVFTDSDYQLPYVLGSAHEGCLPPFPADVFMIPQYGYLTLNDGSQAVGRSSFYCLEYFPSQMLRTGNNFQFSYEFENVPFHSSYAHSQSLDRLMNPLIDQYLYYLSKTINGSGQNQQTLKFSVAGPSNMAVQGRNYIPGPSYRQQRVSTTVTQNNNSEFAWPGASSWALNGRNSLMNPGPAMASHKEGEDRFFPLSGSLIFGKQGTGRDNVDADKVMITNEEEIKTTNPVATESYGQVATNHQSAQAQAQTGWVQNQGILPGMVWQDRDVYLQGPIWAKIPHTDGNFHPSPLMGGFGMKHPPPQILIKNTPVPADPPTAFNKDKLNSFITQYSTGQVSVEIEWELQKENSKRWNPEIQYTSNYYKSNNVEFAVNTEGVYSEPRPIGTRYLTRNL

SEQ ID NO: 594 - protein, 736 aa, Artificial Sequence
  Description of Artificial Sequence: Synthetic polypeptide
MAADGYLPDWLEDNLSEGIREWWALKPGAPQPKANQQHQDNARGLVLPGYKYLGPGNGLDKGEPVNAADAAALEHDKAYDQQLKAGDNPYLKYNHADAEFQERLKEDTSFGGNLGRAVFQAKKRLLEPLGLVEEAAKTAPGKKRPVEQSPQEPDSSAGIGKSGAQPAKKRLNFGQTGDTESVPDPQPIGEPPAAPSGVGSLTMASCGGAPVADNNEGADGVGSSSGNWHCDSQWLGDRVITTSTRTWALPTYNNHLYKQISNSTSGGSSNDNAYFGYSTPWGYFDFNRFHCHFSPRDWQRLINNNWGFRPKRLNFKLFNIQVKEVTDNNGVKTIANNLTSTVQVFTDSDYQLPYVLGSAHEGCLPPFPADVFMIPQYGYLTLNDGSQAVGRSSFYCLEYFPSQMLRTGNNFQFSYEFENVPFHSSYAHSQSLDRLMNPLIDQYLYYLSKTINGSGQNQQTLKFSVAGPSNMAVQGRNYIPGPSYRQQRVSTTVTQNNNSEFAWPGASSWALNGRNSLMNPGPAMASHKEGEDRFFPLSGSLIFGKQGTGRDNVDADKVMITNEEEIKTTNPVATESYGQVATNHQSAQAQAQTGWVQNQGILPGMVWQDRDVYLQGPIWAKIPHTDGNFHPSPLMGGFGMKHPPPQILIKNTPVPADPPTAFNKDKLNSFITQYSTGQVSVEIEWELQKENSKRWNPEIQYTSNYYKSNNVEFAVNTEGVYSEPRPIGTRYLTRNL

SEQ ID NO: 595 - protein, 736 aa, Artificial Sequence
  Description of Artificial Sequence: Synthetic polypeptide
MAADGYLPDWLEDNLSEGIREWWALKPGAPQPKANQQHQDNARGLVLPGYKYLGPGNGLDKGEPINAADAAALEHDKAYDQQLKAGDNPYLKYNHADAEFQERLKEDTSFGGNLGRAVFQAKKRLLEPLGLVEEAAKTAPGKKRPVEQSPQEPDSSAGIGKSGAQPAKKRLNFGQTGDTESVPDPQPIGEPPAAPSGVGSLTMASGGGAPVADNNEGADGVGSSSGNWHCDSQWLGDRVITTSTRTWALPTYNNHLYKQISNSTSGGSSNDNAYFGYSTPWGYFDFNRFHCHFSPRDWQRLINNNWGFRPKRLNFKLFNIQVKEVTDNNGVKTIANNLTSTVQVFTDSDYQLPYVLGSAHEGCLPPFPADVFMIPQYGYLTLNDGSQAVGRSSFYCLEYFPSQMLRTGNNFQFSYEFENVPFHSSYAHSQSLDRLMNPLIDQYLYYLSKTINGSGQNQQTLKFSVAGPSNMAVQGRNYIPGPSYRQQRVSTTVTQNNNSEFAWPGASSWALNGRNSLMNPGPAMASHKEGEDRFFPLSGSLIFGKQGTGRDNVDADKVMITNEEEIKTTNPVATESYGQVATNHQSAQAQAQTGWVQNQGILPGMVWQDRDVYLQGPIWAKIPHTYGNFHPSPLMGGFGMKHPPPQILIKNTPVPADPPTAFNKDKLNSFITQYSTGQVSVEIEWELQKENSKRWNPEIQYTSNYYKSNNVEFAVNTEGVYSEPRPIGTRYLTRNL

SEQ ID NO: 596 - protein, 736 aa, Artificial Sequence
  Description of Artificial Sequence: Synthetic polypeptide
MAADGYLPDWLEDNLSEGIREWWALKPGAPQPKANQQHQDNARGLVLPGYKYLGPGNGLDKGEPVNAADAAALEHDKAYDQQLKAGDNPYLKYNHADAEFQERLKEDTSFGGNLGRAVFQAKKRLLEPLGLVEEAAKTAPGKKRPVEQSPQEPDSSAGIGKSGAQPAKKRLNFGQTGDTESVPDPQPIGEPPAAPSGVGSLTMASGGGAPVADNNEGADGVGSSSGNWHCDSQWLGDRVITTSTRTWALPTYNNHLYKQISNSTSGGSSNDNAYFGYSTPWGYFDFNRFHCHFSPHDWQRLINNNWGFRPKRLNFKLFNIQVKEVTDNNGVKTIANNLTSTVQVFTDSDYQLPYVLGSAHEGCLPPFPADVFMIPQYGYLTLNDGSQAVGRSSFYCLEYFPSQMLRTGNNFQFSYEFENVPFHSSYAHSQSLDRLMNPLIDQYLYYLSKTINGSGQNQQTLKFNVAGPSNMAVQGRNYIPGPSYRQQRVSTTVTQNNNSEFAWPRASSWALNGRNSLMNPGPAMASHKEGEDRFFPLSGSLIFGKQGTGRDNVDADKVMITNEEEIKTTNPVATESYGQVATNHQSAQAQAQTGWVQNQGILPGMVWQDRDVYLQGPIWAKIPHTDGNFHPSPLMGGFGMKHPPPQILIKNTPVPADPPTAFNKDKLNSFITQYSTGQVSMEIEWELQKENSKRWNPEIQYTSNYYKSNNVEFAVNTEGVYSEPRPIGTRYLTRNL

SEQ ID NO: 597 - protein, 736 aa, Artificial Sequence
  Description of Artificial Sequence: Synthetic polypeptide
MAADGYLPDWLEDNLSEGIREWWALKPGAPQPKANQQHQDNARGLVLPGYKYLGPGNGLDKGEPVNAADAAALEHDKAYDQQLKAGDNPYLKYNHADAEFQERLKEDTSFGGNLGRAVFQAKKRLLEPLGLVEEAAKTAPGKKRPVEQSPQEPDSSAGIGKSGAQPAKKRLNFGQTGDTESVPDPQPIGEPPAAPSGVGSLTMASGGGAPVADNNEGADGVGSSSGNWHCDSQWLGDRVITTSTRTWALPTYNNHLYKQISNSTSGGSSNDNAYFGYSTPWGYFDFNRFHCHFSPRDWQRLINNNWGFRPKRLNFKLFNIQVKEVTDNNGVKTIANNLTSTVQVFTDSDYQLPYVLGSAHEGCLPPFPADVFMIPQYGYLTLNDGSQAVGRSSFYCLEYFPSQMLRTGNNFQFSYEFENVPFHSSYAHSQSLDRLMNPLIDQYLYYLSKTINGSGQNQQTLKFSVAGPSNMAVQGRNYIPGPSYRQQRVSTTVTQNNNSEFAWPRASSWALNGRNSLMNPGPAMASHKEGEDRFFPLSGSLIFGKQGTGRDNVDADKVMITNEEEIKTTNPVATESYGQVATNHQSAQAQAQTGWVQNQGILPGMVWQDRDVYLQGPIWAKIPHTDGNFHPSPLMGGFGMKHPPPQILIKNTPVPADPPTAFNKDKLNSFITQYSTGQVSVEIEWELQKENSKRWNPEIQYTSNYYKSNNVEFAVNTEGVYSEPRPIGTRYLTRNL

SEQ ID NO: 598 - protein, 736 aa, Artificial Sequence
  Description of Artificial Sequence: Synthetic polypeptide
MAADGYLPDWLEDNLSEGIREWWALKPGAPQPKANQQHQDNARGLVLPGYKYLGPGNGLDKGEPVNAADAAALEHDKAYDQQLKAGDNPYLKYNHADAEFQERLKEDTSFGGNLGRAVFQAKKRLLEPLGLVEEAAKTAPGKKRPVEQSPQEPDSSAGIGKSGAQPAKKRLNFGQTGDTESVPDPQPIGEPPAAPSGVGSLTMASGGGAPVADNNEGADGVGSSSGNWHCDSQWLGDRVITTSTRTWALPTYNNHLYKQISNSTSGGSSNDNAYFGYSTPWGYFDFNRFHCHFSPRDWQRLINNNWGFRPKRLNFKLFNIQVKEVTDNNGVKTIANNLTSTVQVFTDSDYQLPYVLGSAHEGCLPPFPADVFMIPQYGYLTLNDGSQAVGRSSFYCLEYFPSQMLRTGNNFQFSYEFENVPFHSSYAHSQSLDRLMNPLIDQYLYYLSKTINGSGQNQQTLKFSVAGPSNMAVQGRNYIPGPSYRQQRVSTTVTQNNNSEFAWPRASSWALNGRNSLMNPGPAMASHKEGEDRFFPLSGSLIFGKQGTGRDNVDADKVMITNEEEIKTTNPVATESYGQVATNHQSAQAQAQTGWVQNQGILPGMVWQDRDVYLQGPIWAKIPHTDGNFHPSPLMGGFGMKHPPPQILIKNTPVPADPPTAFNKDKLNSFITQYSTGQVSVEIEWERQKENSKRWNPEIQYTSNYYKSNNVEFAVNTEGVYSEPRPIGTRYLTRNL

SEQ ID NO: 599 - protein, 736 aa, Artificial Sequence
  Description of Artificial Sequence: Synthetic polypeptide
MAADGYLPDWLEDNLSEGIREWWALKPGAPQPKANQQHQDNARGLVLPGYKYLGPGNGLDKGEPVNAADAAALEHDKAYDQQLKAGDNPYLKYNHADAEFQERLKEDTSFGGNLGRAVFQAKKRLLEPLGLVEEAAKTAPGKKRPVEQSPQEPDSSAGIGKSGAQPAKKRLNFGQTGDTESVPDPQPIGEPPAAPSGVGSLTMASGGGAPVADNNEGADGVGSSSGNWHCDSQWLGDRVITTSTRTWALPTYNNHLYKQISNSTSGGSSNDNAYFGYSTPWGYFDFNRFHCHFSPRDWQRLINNNWGFRPKRLNFKLFNIQVKEVTDNNGVKTIANNLTSTVQVFADSDYQLPYVLGSAHEGCLPPFPADVFMIPQYGYLTLNDGSQAVGRSSFYCLEYFPSQMLRTGNNFQFSYEFENVPFHSSYAHSQSLDRLMNPLIDQYLYYLSKTINGSGQNQQTLKFSVAGPSNMAVQGRNYIPGPSYRQQRVSTTVTQNNNSEFAWPRASSWALNGRNSLMNPGPAMASHKEGEDRFFPLSGSLIFGKQGTGRDNVDADKVMITNEEEIKTTNPVATESYGQVATNHQSAQAQAQTGWVQNQGILPGMVWQDRDVYLQGPIWAKIPHTDGNFHPSPLMGGFGMKHPPPQILIKNTPVPADPPTAFNKDKLNSFITQYSTGQVSVEIEWELQKENSKRWNPEIQYTSNYYKSNNVEFAVNTEGVYSEPRPIGTRYLTRNL

SEQ ID NO: 600 - protein, 736 aa, Artificial Sequence
  Description of Artificial Sequence: Synthetic polypeptide
MAADGYLPDWLEDNLSEGIREWWALKPGAPQPKANQQHQDNARGLVLPGYKYLGPGNGLDKGEPVNAADAAALEHDKAYDQQLKAGDNPYLKYNHADAEFQERLKEDTSFGGNLGRAVFQAKKRLLEPLGLVEEAAKTAPGKKRPVEQSPQEPDSSAGIGKSGAQPAKKRLNFGQTGDTESVPDPQPIGEPPAAPSGVGSLTMASGGGAPVADNNEGADGVGSSSGNWHCDSQWLGDRVITTSTRTWALPTYNNHLYKQISNSTSGGSSNDNAYFGYSTPWGYFDFNRFHCHFSPRDWQRLINNNWGFRPKRLNFKLFNIQVKEVTDNNGVKTIANNLTSTVQVFTDSDYQLPYVLGSAHEGCLPPFPADVFMIPQYGYLTLNDGSQAVGRSSFYCLEYFPSQMLRTGNNFQFSYEFENVPFHSSYAHSQSLDRLMNPLIDQYLYYLSKTINGSGQNQQTLKFSVAGPSNMAVQGRNYIPGPSYRQQRVSTTVTQNNNSEIAWPRASSWALNGRNSLMNPGPAMASHKEGEDRFFPLSGSLIFGKQGTGRDNVDADKVMITNEEEIKTTNPVATESYGQVATNHQSAQAQAQTGWVQNQGILPGMVWQDRDVYLQGPIWAKIPHTDGNFHPSPLMGGFGMKHPPPQILIKNTPVPADPPTAFNKDKLNSFITQYSTGQVSVEIEWELQKENSKRWNPEIQYTSNYCKSNNVEFAVNTEGVYSEPRPIGTRYLTRNL

SEQ ID NO: 601 - protein, 736 aa, Artificial Sequence; identical to SEQ ID NO: 597
  Description of Artificial Sequence: Synthetic polypeptide

SEQ ID NO: 602 - DNA, 2208 bp, Artificial Sequence
  Description of Artificial Sequence: Synthetic polynucleotide
atggctgccgatggttatcttccagattggctcgaggacaaccttagtgaaggaattcgcgagtggtgggctttgaaacctggagcccctcaacccaaggcaaatcaacaacatcaagacaacgctcgaggtcttgtgcttccgggttacaaataccttggacccggcaacggactcgacaagggggagccggtcaacgcagcagacgcggcggccctcgagcacgacaaggcctacgaccagcagctcaaggccggagacaacccgtacctcaagtacaaccacgccgacgccgagttccaggagcggctcaaagaagatacgtcttttgggggcaacctcgggcgagcagtcttccaggccaaaaagaggcttcttgaacctcttggtctggttgaggaagcggctaagacggctcctggaaagaagaggcctgtagagcagtctcctcaggaaccggactcctccgcgggtattggcaaatcgggtgcacagcccgctaaaaagagactcaatttcggtcagactggcgacacagagtcagtcccagaccctcaaccaatcggagaacctcccgcagccccctcaggtgtgggatctcttacaatggcttcaggtggtggcgcaccagtggcagacaataacgaaggtgccgatggagtgggtagttcctcgggaaattggcattgcgattcccaatggctgggggacagagtcatcaccaccagcacccgaacctgggccctgcccacctacaacaatcacctctacaagcaaatctccaacagcacatctggaggatcttcaaatgacaacgcctacttcggctacagcaccccctgggggtattttgacttcaacagattccactgccacttctcaccacgtgactggcagcgactcatcaacaacaactggggattccggcctaagcgactcaacttcaagctcttcaacattcaggtcaaagaggttacggacaacaatggagtcaagaccatcgccaataaccttaccagcacggtccaggtcttcacggactcagactatcagctcccgtacgtgctcgggtcggctcacgagggctgcctcccgccgttcccagcggacgttttcatgattcctcagtacgggtatctgacgcttaatgatggaagccaggccgtgggtcgttcgtccttttactgcctggaatatttcccgtcgcaaatgctaagaacgggtaacaacttccagttcggctacgagtttgagaacgtacctttccatagcagctacgctcacagccaaagcctggaccgactaatgaatccactcatcgaccaatacttgtactatctctcaaagactattaacggttctggacagaatcaacaaacgctaaaattcagtgtggccggacccagcaacatggctgtccagggaagaaactacatacctggacccagctaccgacaacaacgtgtctcaaccactgtgactcaaaacaacaacagcgaatttgcttggcctggagcttcttcttgggctctcaatggacgtaatagcttgatgaatcctggacctgctatggccagccacaaagaaggagaggaccgtttctttcctttgtctggatctttaatttttggcaaacaaggaactggaagagacaacgtggatgcggacaaagtcatgataaccaacgaagaagaaattaaaactactaacccggtagcaacggagtcctatggacaagtggccacaaaccaccagagtgcccaagcacaggcgcagaccggctgggttcaaaaccaaggaatacttccgggtatggtttggcaggacagagatgtgtacctgcaaggacccatttgggccaaaattcctcacacggacggcaactttcacccttctccgctgatgggagggtttggaatgaagcacccgcctcctcagatcctcatcaaaaacacacctgtacctgcggatcctccaacggccttcaacaaggacaagctgaactctttcatcacccagtattctactggccaagtcagcgtggagatcgagtgggagctgcagaaggaaaacagcaagcgctgggacccggagatccagtacacttccaactattacaagtctaataatgttgaatttgctgttaatactgaaggtgtatatagtgaaccccgccccattggcaccagatacctgactcgtaatctg

SEQ ID NO: 603 - DNA, 2208 bp, Artificial Sequence
  Description of Artificial Sequence: Synthetic polynucleotide
atggctgccgatggttatcttccagattggctcgaggacaaccttagtgaaggaattcgcgagtggtgggctttgaaacctggagcccctcaacccaaggcaaatcaacaacatcaagacaacgctcgaggtcttgtgcttccgggttacaaataccttggacccggcaacggactcgacaagggggagccggtcaacgcagcagacgcggcggccctcgagcacgacaaggcctacgaccagcagctcaaggccggagacaacccgtacctcaagtacaaccacgccgacgccgagttccaggagcggctcaaagaagatacgtcttttgggggcaacctcgggcgagcagtcttccaggccaaaaagaggcttcttgaacctcttggtctggttgaggaagcggctaagacggctcctggaaagaagaggcctgtagagcagtctcctcaggaaccggactcctccgcgggtattggcaaatcgggtgcacagcccgctaaaaagagactcaatttcggtcagactggcgacacagagtcagtcccagaccctcaaccaatcggagaacctcccgcagccccctcaggtgtgggatctcttacaatggcttcaggtggtggcgcaccagtggcagacaataacgaaggtgccgatggagtgggtagttcctcgggaaattggcattgcgattcccaatggctgggggacagagtcatcaccaccagcacccgaacctgggccctgcccacctacaacaatcacctctacaagcaaatctccaacagcacatctggaggatcttcaaatgacaacgcctacttcggctacagcaccccctgggggtattttgacttcaacagattccactgccgcttctcaccacgtgactggcagcgactcatcaacaacaactggggattccggcctaagcgactcaacttcaagctcttcaacattcaggtcaaagaggttacggacaacaatggagtcaagaccatcgccaataaccttaccagcacggtccaggtcttcacggactcagactatcagctcccgtacgtgctcgggtcggctcacgagggctgcctcccgccgttcccagcggacgttttcatgattcctcagtacgggtatctgacgcttaatgatggaagccaggccgtgggtcgttcgtccttttactgcctggaatatttcccgtcgcaaatgctaagaacgggtaacaacttccagttcagctacgagtttgagaacgtacctttccatagcagctacgctcacagccaaagcctggaccgactaatgaatccactcatcgaccaatacttgtactatctctcaaagactattaacggttctggacagaatcaacaaacgctaaaattcagtgtggccggacccagcaacatggctgtccagggaagaaactacatacctggacccagctaccgacaacaacgtgtctcaaccactgtgactcaaaacaacaacagcgaatttgcttggcctggagcttcttcttgggctctcaatggacgtaatagcttgatgaatcctggacctgctatggccagccacaaagaaggagaggaccgtttctttcctttgtctggatctttaatttttggcaaacaaggaactggaagagacaacgtggatgcggacaaagtcatgataaccaacgaagaagaaattaaaactactaacccggtagcaacggagtcctatggacaagtggccacaaaccaccagagtgcccaagcacaggcgcagaccggctgggttcaaaaccaaggaatacttccgggtatggtttggcaggacagagatgtgtacctgcaaggacccatttgggccaaaattcctcacacggacggcaactttcacccttctccgctgatgggagggtttggaatgaagcacccgcctcctcagatcctcatcaaaaacgcccctgtacctgcggatcctccaacggccttcaacaaggacaagctgaactctttcatcacccagtattctactggccaagtcagcgtggagatcgagtgggagctgcagaaggaaaacagcaagcgctggaacccggagatccagtacacttccaactattacaagtctaataatgttgaatttgctgttaatactgaaggtgtatatagtgaaccccgccccattggcaccagatacctgactcgtaatctg

SEQ ID NO: 604 - DNA, 2208 bp, Artificial Sequence
  Description of Artificial Sequence: Synthetic polynucleotide
atggctgccgatggttatcttccagattggctcgaggacaaccttagtgaaggaattcgcgagtggtgggctttgaaacctggagcccctcaacccaaggcaaatcaacaacatcaagacaacgctcgaggtcttgtgcttccgggttacaaataccttggacccggcaacggactcgacaagggggagccggtcagcgcagcagacgcggcggccctcgagcacgacaaggcctacgaccagcagctcaaggccggagacaacccgtacctcaagtacaaccacgccgacgccgagttccaggagcggctcaaagaagatacgtcttttgggggcaacctcgggcgagcagtcttccaggccaaaaagaggcttcttgaacctcttggtctggttgaggaagcggctaagacggctcctggaaagaagaggcctgtagagcagtctcctcaggaaccggactcctccgcgggtattggcaaatcgggtgcacagcccgctaaaaagagactcaatttcggtcagactggcgacacagagtcagtcccagaccctcaaccaatcggagaacctcccgcagccccctcaggtgtgggatctcttacaatggcttcaggtggtggcgcaccagtggcagacaataacgaaggtgccgatggagtgggtagttcctcgggaaattggcattgcgattcccaatggctgggggacagagtcatcaccaccagcacccgaacctgggccctgcccacctacaacaatcacctctacaagcaaatctccaacagcacatctggaggatcttcaaatgacaacgcctacttcggctacagcaccccctgggggtattttgacttcaacagattccactgccacttctcaccgcgtgactggcagcgactcatcaacaacaactggggattccggcctaagcgactcaacttcaagctcttcaacattcaggtcaaagaggttacggacaacaatggagtcaagaccatcgccaataaccttaccagcacggtccaggtcttcacggactcagactatcagctcccgtacgtgctcgggtcggctcacgagggctgcctcccgccgttcccagcggacgttttcatgattcctcagtacgggtatctgacgcttaatgatggaagccaggccgtgggtcgttcgtccttttactgcctggaatatttcccgtcgcaaatgctaagaacgggtaacaacttccagttcagctacgagtttgagaacgtacctttccatagcagctacgctcacagccaaagcctggaccgactaatgaatccactcatcgaccaatacttgtactatctctcaaagactattaacggttctggacagaatcaacaaacgctaaaattcagtgtggccggacccagcaacatggctgtccagggaagaaactacatacctggacccagctaccgacaacaacgtgtctcaaccactgtgactcaaaacaacaacagcgaatttgcttggcctggagcttcttcttgggctctcaatggacgtaatagcttgatgaatcctggacctgctatggccagccacaaagaaggagaggaccgtttctttcctttgtctggatctttaatttttggcaaacaaggaactggaagagacaacgtggatgcggacaaagtcatgataaccaacgaagaagaaattaaaactactaacccggtagcaacggagtcctatggacaagtggccacaaaccaccagagtgcccaagcacaggcgcagaccggctgggttcaaaaccaaggaatacttccgggtatggtttggcaggacagagatgtgtacctgcaaggacccatttgggccaaaattcctcacacggacggcaactttcacccttctccgctgatgggagggtttggaatgaagcacccgcctcctcagatcctcatcaaaaacacacctgtacctgcggatcctccaacggccttcaacaaggacaagctgaactctttcatcacccagtattctactggccaagtcagcgtggagatcgagtgggagctgcagaaggaaaacagcaagcgctggaacccggagatccagtacacttccaactattacaagtctaataatgttgaatttgctgttaatactgaaggtgtatatagtgaaccccgccccattggcaccagatacctgactcgtaatctg

SEQ ID NO: 605 - DNA, 2208 bp, Artificial Sequence
  Description of Artificial Sequence: Synthetic polynucleotide
atggctgccgatggttatcttccagattggctcgaggacaaccttagtgaaggaattcgcgagtggtgggctttgaaacctggagcccctcaacccaaggcaaatcaacaacatcaagacaacgctcgaggtcttgtgcttccgggttacaaataccttggacccggcaacggactcgacaagggggagccggtcaacgcagcagacgcggcggccctcgagcacgacaaggcctacgaccagcagctcaaggccggagacaacccgtacctcaagtacaaccacgccgacgccgagttccaggagcggctcaaagaagatacgtcttttgggggcaacctcgggcgagcagtcttccaggccaaaaagaggcttcttgaacctcttggtctggttgaggaagcggctaagacggctcctggaaagaagaggcctgtagagcagtctcctcaggaaccggactcctccgcgggtattggcaaatcgggtgcacagcccgctaaaaagagactcaatttcggtcagactggcgacacagagtcagtcccagaccctcaaccaatcggagaacctcccgcagccccctcaggtgtgggatctcttacaatggcttcaggtggtggcgcaccagtggcagacaataacgaaggtgccgatggagtgggtagttcctcgggaaattggcattgcgattcccaatggctgggggacagagtcatcaccaccagcacccgaacctgggccctgcccacctacaacaatcacctctacaagcaaatctccaacagcacatctggaggatcttcaaatgacaacgcctacttcggctacagcaccccctgggggtattttgacttcaacagattccactgccacttctcaccacgtgactggcagcgactcatcaacaacaactggggattccggcctaagcgactcaacttcaagctcttcaacattcaggtcaaagaggttacggacaacaatggagtcaagaccatcgccaataaccttaccagcacggtccaggtcttcacggactcagactatcagctcccgtacgtgctcgggtcggctcacgagggctgcctcccgccgttcccagcggacgttttcatgattcctcagtacgggtatctgacgcttaatgatggaagccaggccgtgggtcgttcgtccttttactgcctggaatatttcccgtcgcaaatgctaagaacgggtaacaacttccagttcagctacgagtttgagaacgtacctttccatagcagctacgctcacagccaaagcctggaccgactaatgaatccactcatcgaccaatacttgtactatctctcaaagactattaacggttctggacagaatcaacaaacgctaaaattcagtgtggccggacccagcaacacggctgtccagggaagaaactacatacctggacccagctaccgacaacaacgtgtctcaaccactgtgactcaaaacaacaacagcgaatttgcttggcctggagcttcttcttgggctctcaatggacgtaatagcttgatgaatcctggacctgctatggccagccacaaagaaggagaggaccgtttctttcctttgtctggatctttaatttttggcaaacaaggaactggaagagacaacgtggatgcggacaaagtcatgataaccaacgaagaagaaattaaaactactaacccggtagcaacggagtcctatggacaagtggccacaaaccaccagagtgcccaagcacaggcgcagaccggctgggttcaaaaccaaggaatacttccgggtatggtttggcaggacagagatgtgtacctgcaaggacccatttgggccaaaattcctcacacggacggcaactttcacccttctccgctgatgggagggtttggaatgaagcacccgcctcctcagatcctcatcaaaaacacacctgtacctgcggatcctccaacggccttcaacaaggacaagctgaactctttcatcacccagtattctactggccaagtcagcgtggagatcgagtgggagctgcagaaggaaaacagcaagcgctggaacccggagatccagtacacttccaactattacaagtctaataatgttgaatttgctgttaatactgaaggtgtatatagtgaaccccgccccattggcaccagatacctgactcgtaatctg

SEQ ID NO: 606 - DNA, 2208 bp, Artificial Sequence
  Description of Artificial Sequence: Synthetic polynucleotide
atggctgccgatggttatcttccagattggctcgaggacaaccttagtgaaggaattcgcgagtggtgggctttgaaacctggagcccctcaacccaaggcaaatcaacaacatcaagacaacgctcgaggtcttgtgcttccgggttacaaataccttggacccggcaacggactcgacaagggggagccggtcaacgcagcagacgcggcggccctcgagcacgacaaggcctacgaccagcagctcaaggccggagacaacccgtacctcaagtacaaccacgccgacgccgagttccaggagcggctcaaagaagatacgtcttttgggggcaacctcgggcgagcagtcttccaggccaaaaagaggcttcttgaacctcttggtctggttgaggaagcggctaagacggctcctggaaagaagaggcctgtagagcagtctcctcaggaaccggactcctccgcgggtattggcaaatcgggtgcacagcccgctaaaaagagactcaatttcggtcagactggcgacacagagtcagtcccagaccctcaaccaatcggagaacctcccgcagccccctcaggtgtgggatctcttacaatggcttcaggtggtggcgcaccagtggcagacaataacgaaggtgccgatggagtgggtagttcctcgggaaattggcattgcgattcccaatggctgggggacagagtcatcaccaccagcacccgaacctgggccctgcccacctacaacaatcacctctacaagcaaatctccaacagcacatctggaggatcttcaaatgacaacgcctacttcggctacagcaccccctgggggtattttgacttcaacagattccactgccacttctcaccacgtgactggcagcgactcatcaacaacaactggggattccggcctaagcggctcaacttcaagctcttcaacattcaggtcaaagaggttacggacaacaatggagtcaagaccatcgccaataaccttaccagcacggtccaggtcttcacggactcagactatcagctcccgtacgtgctcgggtcggctcacgagggctgcctcccgccgttcccagcggacgttttcatgattcctcagtacgggtatctgacgcttaatgatggaagccaggccgtgggtcgttcgtccttttactgcctggaatatttcccgtcgcaaatgctaagaacgggtagcaacttccagttcagctacgagtttgagaacgtacctttccatagcagctacgctcacagccaaagcctggaccgactaatgaatccactcatcgaccaatacttgtactatctctcaaagactattaacggttctggacagaatcaacaaacgctaaaattcagtgtggccggacccagcaacatggctgtccagggaagaaactacatacctggacccagctaccgacaacaacgtgtctcaaccactgtgactcaaaacaacaacagcgaatttgcttggcctggagcttcttcttgggctctcaatggacgtaatagcttgatgaatcctggacctgctatggccagccacaaagaaggagaggaccgtttctttcctttgtctggatctttaatttttggcaaacaaggaactggaagagacaacgtggatgcggacaaagtcatgataaccaacgaagaagaaattaaaactactaacccggcagcaacggagtcctatggacaagtggccacaaaccaccagagtgcccaagcacaggcgcagaccggctgggttcaaaaccaaggaatacttccgggtatggtttggcaggacagagatgtgtacctgcaaggacccatttgggccaaaattcctcacacggacggcaactttcacccttctccgctgatgggagggtttggaatgaagcacccgcctcctcagatcctcatcaaaaacacacctgtacctgcggatcctccaacggccttcaacaaggacaagctgaactctttcatcacccagtattctactggccaagtcagcgtggagatcgagtgggagctgcagaaggaaaacagcaagcgctggaacccggagatccagcacacttccaactattacaagtctaataatgttgaatttgctgttaatactgaaggtgtatatagtgaaccccgccccattggcaccagatacctgactcgtaatctg

SEQ ID NO: 607 - DNA, 2208 bp, Artificial Sequence
  Description of Artificial Sequence: Synthetic polynucleotide
atggctgccgatggttatcttccagattggctcgaggacaaccttagtgaaggaattcgcgagtggtgggctttgaaacctggagcccctcaacccaaggcaaatcaacaacatcaagacaacgctcgaggtcttgtgcttccgggttacaaataccttggacccggcaacggactcgacaagggggagccggtcaacgcagcagacgcggcggccctcgagcacgacaaggcctacgaccagcagctcaaggccggagacaacccgtacctcaagtacaaccacgccgacgccgagttccaggagcggctcaaagaagatacgtcttttgggggcaacctcgggcgagcagtcttccaggccaaaaagaggcttcttgaacctcttggtctggttgaggaagcggctaagacggctcctggaaagaagaggcctgtagagcagtctcctcaggaaccggactcctccgcgggtattggcaaatcgggtgcacagcccgctaaaaagagactcaatttcggtcagactggcgacacagagtcagtcccagaccctcaaccaatcggagaacctcccgcagccccctcaggtgtgggatctcttacaatggcttcaggtggtggcgcaccagtggcagacaataacgaaggtgccgatggagtgggtagttcctcgggaaattggcattgcgattcccaatggctgggggacagagtcatcaccaccagcacccgaacctgggccctgcccacctacaacaatcacctctacaagcaaatctccaacagcacatctggaggatcttcaaatgacaacgcctacttcggctacagcaccccctgggggtattttgacttcaacagattccactgccacttctcaccacgtgactggcagcgactcatcaacaacaactggggattccggcctaagcgactcaacttcaggctcttcaacattcaggtcaaagaggttacggacaacaatggagtcaagaccatcgccaataaccttaccagcacggtccaggtcttcacggactcagactatcagctcccgtacgtgctcgggtcggctcacgagggctgcctcccgccgttcccagcggacgttttcatgattcctcagtacgggtatctgacgcttaatgatggaagccaggccgtgggtcgttcgtccttttactgcctggaatatttcccgtcgcaaatgctaagaacgggtaacaacttccagttcagctacgagtttgagaacgtacctttccatagcagctacgctcacagccaaagcctggaccgactaatgaatccactcatcgaccaatacttgtactatctctcaaagactattaacggttctggacagaatcaacaaacgctaaaattcagtgtggccggacccagcaacatggctgtccagggaagaaactacatacctggacccagctaccgacaacaacgtgtctcaaccactgtgactcaaaacaacaacagcgaatttgcttggcctggagcttcttcttgggctctcaatggacgtaatagcttgatgaatcctggacctgctatggccagccacaaagaaggagaggaccgtttctttcctttgtctggatctttaatttttggcaaacaaggaactggaagagacaacgtggatgcggacaaagtcatgataaccaacgaagaagaaattaaaactactaacccggtagcaacggagtcctatggacaagtggccacaaaccaccagagtgcccaagcacaggcgcagaccggctgggttcaaagccaaggaatacttccgggtatggtttggcaggacagagatgtgtacctgcaaggacccatttgggccaaaattcctcacacggacggcaactttcacccttctccgctgatgggagggtttggaatgaagcacccgcctccccagatcctcatcaaaaacacacctgtacctgcggatcctccaacggccttcaacaaggacaagctgaactctttcatcacccagtattctactggccaagtcagcgtggagatcgagtgggagctgcagaaggaaaacagcaagcgctggaacccggagatccagtacacttccaactattacaagtctaataatgttgaatttgctgttaatactgaaggtgtatatagtgaaccccgccccattggcaccagatacctgactcgtaatctg

SEQ ID NO: 608 - DNA, 2205 bp, Artificial Sequence
  Description of Artificial Sequence: Synthetic polynucleotide
atggctgccgatggttatcttccagattggctcgaggacaaccttagtgaaggaattcgcgagtggtgggctttgaaacctggagcccctcaacccaaggcaaatcaacaacatcaagacaacgcccgaggtcttgtgcttccgggttacaaataccttggacccggcaacggactcgacaagggggagccggtcaacgcagcagacgcggcggccctcgagcacgacaaggcctacgaccagcagctcaaggccggagacaacccgtacctcaagtacaaccacgccgacgccgagttccaggagcggctcaaagaagatacgtcttttgggggcaacctcgggcgagcagtcttccaggccaaaaagaggcttcttgaacctcttggtctggttgaggaagcggctaagacggctcctggaaagaagaggcctgtagagcagtctcctcaggaaccggactcctccgcgggtattggcaaatcgggtgcacagcccgctaaaaagagactcaatttcggtcagactggcgacacagagtcagtcccagaccctcaaccaatcggagaacctcccgcagccccctcaggtgtgggatctcttacaatggcttcaggtggtggcgcaccagtggcagacaataacgaaggtgccgatggagtgggtagttcctcgggaaattggcattgcgattcccaatggctgggggacagagtcatcaccaccagcacccgaacctgggccctgcccacctacaacaatcacctctacaagcaaatctccaacagcacatctggaggatcttcaaatgacaacgcctacttcggctacagcaccccctggaggtattttgacttcaacagattccactgccacttctcaccacgtgactggcagcgactcatcaacaactggggattccggcctaagcgactcaacttcaagctcttcaacattcaggtcaaagaggttacggacaacaatggagtcaagaccatcgccaataaccttaccagcacggtccaggccttcacggactcagactatcagctcccgtacgtgctcgggtcggctcacgagggctgcctcccgccgttcccagcggacgttttcatgattcctcagtacgggtatctgacgcttaatgatggaagccaggccgtgggtcgttcgtccttttactgcctggaatatttcccgtcgcaaatgctaagaacgggtaacaacttccagttcagctacgagtttgagaacgtacctttccatagcagctacgctcacagccaaagcctggaccgactaatgaatccactcatcgaccaatacttgtactatctctcaaagactattaacggttctggacagaatcaacaaacgctaaaattcagtgtggccggacccagcaacatggctgtccagggaagaaactacatacctggacccagctaccgacaacaacgtgtctcaaccactgtgactcaaaacaacaacagcgaatttgcttggcctggagcttcttcttgggctctcaatggacgtaatagcttgatgaatcctggacctgctatggccagccacaaagaaggagaggaccgtttctttcctttgtctggatctttaatttttggcaaacaaggaactggaagagacaacgtggatgcggacaaagtcatgataaccaacgaagaagaaattaaaactactaacccggtagcaacggagtcctatggacaagtggccacaaaccaccagagtgcccaagcacaggcgcagaccggctgggttcaaaaccaaggaatacttccgggtatggtttggcaggacagagatgtgtacctgcaaggacccatttgggccaaaattcctcacacggacggcaactttcacccttctccgctgatgggagggtttggaatgaagcacccgcctcctcagatcctcatcaaaaacacacctgtacctgcggatcctccaacggccttcaacaaggacgagctgaactctttcatcacccagtattctactggccaagtcagcgtggagatcgagtgggagctgcagaaggaaaacagcaagcgctggaacccggagatccagtacacttccaactattacaagtctaataatgttgaatttgctgttaatactgaaggtgtatatagtgaaccccgccccattggcaccagatacctgactcgtaatctg

SEQ ID NO: 609 - DNA, 2205 bp, Artificial Sequence
  Description of Artificial Sequence: Synthetic polynucleotide
atggctgccgatggttatcttccagattggctcgaggacaaccttagtgaaggaattcgcgagtggtgggctttgaaacctggagcccctcaacccaaggcaaatcaacaacatcaagacaacgctcgaggtcttgtgcttccgggttacaaataccttggacccggcaacggactcgacaagggggagccggtcaacgcagcagacgcggcggccctcgagcacgacaaggcctacgaccagcagctcaaggccggagacaacccgtacctcaagtacaaccacgccgacgccgagttccaggagcggctcaaagaagatacgtcttttgggggcaacctcgggcgagcagtcttccaggacaaaaagaggcttcttgaacctcttggtctggttgaggaagcggctaagacggctcctggaaagaagaggcctgtagagcagtctcctcaggaaccggactcctccgcgggtattggcaaatcgggtgcacagcccgctaaaaagagactcaatttcggtcagactggcgacacagagtcagtcccagaccctcaaccaatcggagaacctcccgcagccccctcaggtgtgggatctcttacaatggcttcaggtggtggcgcaccagtggcagacaataacgaaggtgccgatggagtgggtagttcctcgggaaattggcattgcgattcccaatggctgggggacagagtcatcaccaccagcacccgaacctgggccctgcccacctacaacaatcacctctacaagcaaatctccaacagcacatctggaggatcttcaaatgacaacgcctacttcggctacagcaccccctgggggtattttgacttcaacagattccactgccacttctcaccacgtgactggcagcgactcatcaacaactggggattccggcctaagcgactcaacttcaagctcttcaacattcaggtcaaagaggttacggacaacaatggagtcaagaccatcgccaataaccttaccagcacggtccaggtcttcacggactcagactatcagctcccgtacgtgctcgggtcggctcacgagggctgcctcccgccgttcccagcggacgttttcatgattcctcagtacgggtatctgacgcttaatgatggaagccaggccgtgggtcgttcgtccttttactgcctggaatatttcccgtcgcaaatgctaagaacgggtaacaacttccaattcagctacgagtttgagaacgtacctttccatagcagctacgctcacagccaaagcctggaccgactaatgaatccactcatcgaccaatacttgtactatctctcaaagactattaacggttctggacagaatcaacaaacgctaaaattcagtgtggccggacccagcaacatggctgtccagggaagaaactacatacctggacccagctaccgacaacaacgtgtctcaaccactgtgactcaaaacaacaacagcgaatttgcttggcctggagcttcttcttgggctctcaatggacgtaatagcttgatgaatcctggacctgctatggccagccacaaagaaggagaggaccgtttctttcctttgtctggatctttaatttttggcaaacaaggaactggaagagacaacgtggatgcggacaaagtcatgataaccaacgaagaagaaattaaaactactaacccggtagcaacggagtcctatggacaagtggccacaaaccaccagagtgcccaagcacaggcgcagaccggctgggttcaaaaccaaggaatacttccgggtatggtttggcaggacagagatgtgtacctgcaaggacccatttgggccaaaattcctcacacggacggcaactttcacccttctccgctgatgggagggtttggaatgaagcacccgcctcctcagatcctcatcaaaaacacacctgtacctgcggatcctccaacggccttcaacaaggacaagctgaactctttcatcacccagtattctactggccaagtcagcgtggagatcgagtgggagctgcagaaggaaaacagcaagcgctggaacccggagatccagtacacttccaactattacaagtctaataatgttgaatttgctgttaatactgaaggtgtatatagtgaaccccgccccattggcaccagatacctgactcgtaatctg

SEQ ID NO: 610 - DNA, 2208 bp, Artificial Sequence
  Description of Artificial Sequence: Synthetic polynucleotide
atggctgccgatggttatcttccagattggctcgaggacaaccttagtgaaggaattcgcgagtggtgggctttgaaacctggagcccctcaacccaaggcaaatcaacaacatcaagacaacgctcgaggtcttgtgcttccgggttacaaataccttggacccggcaacggactcgacaagggggagccggtcaacgcagcagacgcggcggccctcgagcacgacaaggcctacgaccagcagctcaaggccggagacaacccgtacctcaagtacaaccacgccgacgccgagttccaggagcggctcaaagaagatacgtcttttgggggcaacctcgggcgagcagtcttccaggccaaaaagaggcttcttgaacctcttggtctggttgaggaagcggctaagacggctcctggaaagaagaggcctgtagagcagtctcctcaggaaccggactcctccgcgggtattggcaaatcgggtgcacagcccgctaaaaagagactcaatttcggtcagactggcgacacagagtcagtcccagaccctcaaccaatcggagaacctcccgcagccccctcaggtgtgggatctcttacaatggcttcaggtggtggcgcaccagtggcagacaataacgaaggtgccgatggagtgggtagttcctcgggaaattggcattgcgattcccaatggctgggggacagagccatcaccaccagcacccgaacctgggccctgcccacctacaacaatcacctctacaagcaaatctccaacagcacatctggaggatcttcaaatgacaacgcctacttcggctacagcaccccctgggggtattttgacttcaacagattccactgccacttctcaccacgtgactggcagcggctcatcaacaacaactggggattccggcctaagcgactcaacttcaagctcttcaacattcaggtcaaagaggttacggacaacaatggagtcaagaccatcgccaataaccttaccagcacggtccaggtcttcacggactcagactatcagctcccgtacgtgctcgggtcggctcacgagggctgcctcccgccgttcccagcggacgttttcatgattcctcagtacgggtatctgacgcttaatgatggaagccaggccgtgggtcgttcgtccttttactgcctggaatatttcccgtcgcaaatgctaagaacgggtaacaacttccagttcagctacgagtttgagaacgtacctttccatagcagctacgctcacagccaaagcctggaccgactaatgaatccactcatcgaccaatacttgtactatctctcaaagactattaacggttctggacagaatcaacaaacgctaaaattcagtgtggccggacccagcaacatggctgtccagggaagaaactacatacctggacccagctaccgacaacaacgtgtctcaaccactgtgactcaaaacaacaacagcgaatttgcttggcctggagcttcttcttgggctctcaatggacgtaatagcttgatgaatcctggacctgctatggccagccacaaagaaggagaggaccgtttctttcctttgtctggatctttaatttttggcaaacaaggaactggaagagacaacgtggatgcggacaaagtcatgacaaccaacgaagaagaaattaaaactactaacccggtagcaacggagtcctatggacaagtggccacaaaccaccagagtgcccaagcacaggcgcagaccggctgggttcaaaaccaaggaatacttccgggtatggtttggcaggacagagatgtgtacctgcaaggacccatttgggccaaaattcctcacacggacggcaactttcacccttctccgctgatgggagggtttggaatgaagcacccgcctcctcagatcctcatcaaaaacacacctgtacctgcggatcctccaacggccttcaacaaggacaagctgaactctttcatcacccagtattctactggccaagtcagcgtggagatcgagtgggagctgcagaaggaaaacagcaagcgctggaacccggagatccagtacacttccaactattacaagtctaataatgttgaatttgctgttaatactgaaggtgtatatagtgaaccccgccccattggcaccagatacctgactcgtaatctg

SEQ ID NO: 611 - DNA, 2208 bp, Artificial Sequence
  Description of Artificial Sequence: Synthetic polynucleotide
atggctgccgatggttatcttccagattggctcgaggacaaccttagtgaaggaattcgcgagtggtgggctttgaaacctggagcccctcaacccaaggcaaatcaacaacatcaagacaacgctcgaggtcttgtgcttccgggttacaaataccttggacccggcaacggactcgacaagggggagccggtcaatgcagcagacgcggcggccctcgagcacgacaaggcctacgaccagcagctcaaggccggagacaacccgtacctcaagtacaaccacgccgacgccgagttccaggagcggctcaaagaagatacgtcttttgggggcaacctcgggcgagcagtcttccagaccaaaaagaggcttcttgaacctcttggtctggttgaggaagcggctaagacggctcctggaaagaagaggcctgtagagcagtctcctcaggaaccgggctcctccgcgggtattggcaaatcgggtgcacagcccgctaaaaagagactcaatttcggtcagactggcgacacagagtcagtcccagaccctcaaccaatcggagaacctcccgcagccccctcaggtgtgggatctcttacaatggcttcaggtggtggcgcaccagtggcagacaataacgaaggtgccgatggagtgggtagttcctcgggaaattggcattgcgattcccaatggctgggggacagagtcatcaccaccagcacccgaacctgggccctgcccacctacaacaatcacctctacaagcaaatctccaacagcacatctggaggatcttcaaatgacaacgcctacttcggctacagcaccccctgggggtattttgacttcaacagattccactgccacttctcaccacgtgactggcagcgactcatcaacaacaactggggattccggcctaagcgactcaacttcaagctcttcaacattcaggtcaaagaggttacggacaacaatggagtcaagaccatcgccaataaccttaccagcacggtccaggtcttcacggactcagactatcagctcccgtacgtgctcgggtcggctcacgagggctgcctcccgccgttcccagcggacgttttcatgattcctcagtacgggtatctgacgcttaatgatggaagccaggccgtgggtcgttcgtccttttactgcctggaatatttcccgtcgcaaatgctaagaacgggtaacaacttccagttcagctacgagtttgagaacgtacctttccatagcagctacgctcacagccaaagcctggaccgactaatgaatccactcatcgaccaatacttgcactatctctcaaagactattaacggttctggacagaatcaacaaacgctaaaattcagtgtggccggacccagcaacatggctgtccagggaagaaactacatacctggacccagctaccgacaacaacgtgtctcaaccactgtgactcaaaacaacaacagcgaatttgcttggcctggagcttcttcttgggctctcaatggacgtaatagcttgatgaatcctggacctgctatggccagccacaaagaaggagaggaccgtttctttcctttgtctggatctttaatttttggcaaacaaggaactggaagagacaacgtggatgcggacaaagtcatgataaccaacgaagaagaaattaaaactactaacccggtagcaacggagtcctatggacaagtggccacaaaccaccagagtgcccaagcacaggcgcagaccggctgggttcaaaaccaaggaatacttccgggtatggtttggcaggacagagatgtgtacctgcaaggacccatttgggccaaaattcctcacacggacggcaactttcacccttctccgctgatgggagggtttggaatgaagcacccgcctcctcagatcctcatcaaaaacacacctgtacctgcggatcctccaacggccttcaacaaggacaagctgaactctttcatcacccagtattctactggccaagtcagcgtggagatcgagtgggagctgcagaaggaaaacagcaagcgctggaacccggagatccagtacacttccaactattacaagtctaataatgttgaatttgctgttaatactgaaggtgtatatagtgaaccccgccccattggcaccagatacctgactcgtaatctg

SEQ ID NO: 612 - DNA, 2208 bp, Artificial Sequence
  Description of Artificial Sequence: Synthetic polynucleotide
atggctgccgatggttattttccagattggctcgaggacaaccttagtgaaggaattcgcgagtggtgggctttgaaacctggagcccctcaacccaaggcaaatcaacaacatcaagacaacgctcgaggtcttgtgcttccgggttacaaataccttggacccggcaacggactcgacaagggggagccggtcaacgcagcagacgcggcggccctcgagcacgacaaggcctacgaccagcagctcaaggccggagacaacccgtacctcaagtacaaccacgccgacgccgagttccaggagcggctcaaagaagatacgtcttttgggggcaacctcgggcgagcagtcttccaggccaaaaagaggcttcttgaacctcttggtctggttgaggaagcggctaagacggctcctggaaagaagaggcctgtagagcagtctcctcaggaaccggactcctccgcgggtattggcaaatcgggtgcacagcccgctaaaaagagactcaatttcggtcagactggcgacacagagtcagtcccagaccctcaaccaatcggagaatctcccgcagccccctcaggtgtgggatctcttacaatggcttcaggtggtggcgcaccagtggcagacaataacgaaggtgccgatggagtgggtagttcctcgggaaattggcattgcgattcccaatggctgggggacagagtcatcaccaccagcacccgaacctgggccctgcccacctacaacaatcacctctacaagcaaatctccaacagcacatctggaggatcttcaaatgacaacgcctacttcggctacagcaccccctgggggtattttgacttcaacagattccactgccacttctcaccacgtgactggcagcgactcatcaacaacaactggggattccggcctaagcgactcaacttcaagctcttcaacattcaggtcaaagaggttacggacaacaatggagtcaagaccatcgccaataaccttaccagcacggtccaggtcttcacggactcagactatcagctcccgtacgtgctcgggtcggctcacgagggctgcctcccgccgttcccagcggacgttttcatgattcctcagtacgggtatctgacgcttaatgatggaagccaggccgtgggtcgttcgtccttttactgcctggaatatctcccgtcgcaaatgctaagaacgggtaacaacttccagttcagctacgagtttgagaacgtacctttccatagcagctacgctcacagccaaagcctggaccgactaatgaatccactcatcgaccaatacttgcactatctctcaaagactattaacggttctggacagaatcaacaaacgctaaaattcagtgtggccggacccagcaacatggctgtccagggaagaaactacatacctggacccagctaccgacaacaacgtgtctcaaccactgtgactcaaaacaacaacagcgaatttgcttggcctggagcttcttcttgggctctcaatggacgtaatagcttgatgaatcctggacctgctgtggccagccacaaagaaggagaggaccgtttctttcctttgtctggatctttaatttttggcaaacaaggaactggaagagacaacgtggatgcggacaaagtcatgataaccaacgaagaagaaattaaaactactaacccggtagcaacggagtcctatggacaagtggccacaaaccaccagagtgcccaagcacaggcgcagaccggctgggttcaaaaccaaggaatacttccgggtatggtttggcaggacagagatgtgtacctgcaaggacccatttgggccaaaattcctcacacggacggcaactttcacccttctccgctgatgggagggtttggaatgaagcacccgcctcctcagatcctcatcaaaaacacacctgtacctgcggatcctccaacggccttcaacaaggacaagctgaactctttcatcacccagtattctactggccaagtcagcgtggagatcgagtgggagctgcagaaggaaaacagcaagcgctggaacccggagatccagtacacttccaactattacaagtctaataatgttgaatttgctgttaatactgaaggtgtatatagtgaaccccgccccattggcaccagatacctgactcgtaatctg

SEQ ID NO: 613 - DNA, 2208 bp, Artificial Sequence
  Description of Artificial Sequence: Synthetic polynucleotide
atggctgccgatggttatcttccagattggctcgaggacaaccttagtgaaggaattcgcgagtggtgggctttgaaacctggagcccctcaacccaaggcaaatcaacaacatcaagacaacgctcgaggtcttgtgcttccgggttacaaataccttggacccggcaacggactcgacaagggggagccggtcaacgcagcagacgcggcggccctcgagcacgacaaggcctacgaccagcagctcaaggccggagacaacccgtacctcaagtacaaccacgccgacgccgagttccaggagcggctcaaagaagatacgtcttttgggggcaacctcgggcgagcagtcttccaggccaaaaagaggcttcttgaacctcttggtccggttgaggaagcggctaagacggctcctggaaagaagaggcctgtagagcagtctcctcaggaaccggactcctccgcgggtattggcaaatcgggtgcacagcccgctaaaaagagactcaatttcggtcagactggcgacacagagtcagtcccagaccctcaaccaatcggagaacctcccgcagccccctcaggtgtgggatctcttacaatggcttcaggtggtggcgcaccagtggcagacaataacgaaggtgccgatggagtgggtagttcctcgggaaattggcattgcgattcccaatggctgggggacagagtcatcaccaccagcacccgaacctgggccctgcccacctacaacaatcacctctacaagcaaatctccaacagcacatctggaggatcttcaaatgacaacgcctacttcggctacagcaccccctgggggtattttgacttcaacagattccactgccacttctcaccacgtgactggcagcgactcatcaacaacaactggggattccggcctaagcgactcaacttcaagctcttcaacattcaggtcaaagaggttacggacaacaatggagtcaagaccatcgccaataaccttaccagcacggtccaggtcttcacggactcagactatcagctcccgtacgtgctcgggtcggctcacgagggctgcctcccgccgttcccagcggacgttttcatgattcctcagtacgggtatctgacgcttaatgatggaagccaggccgtgggtcgttcgtccttttactgcctggaatatttcccgtcgcaaatgctaagaacgggtaacaacttccagttcagctacgagtttgagaacgtacctttccatagcagctacgctcacagccaaagcctggaccgactaatgaatccactcatcgaccaatacttgtactatctctcaaagactattaacggttctggacagaatcaacaaacgctaaaattcagtgtggccggacccagcaacatggctgtccagggaagaaactacatacctggacccagctaccgacaacaacgtgtctcaaccactgtgactcaaaacaacaacagcgaatttgcttggcctggagcttcttcttgggctctcaatggacgtaatagcttgatgaatcctggacctgctatggccagccacaaagaaggagaggaccgtttctttcctttgtctggatctttaatttttggcaaacaaggaactggaagagacaacgtggatgcggacaaagtcatgataaccaacgaagaagaaattaaaactactaacccggtagcaacggagtcctatggacaagcggccacaaaccaccagagtgcccaagcacaggcgcagaccggctgggttcaaaaccaaggaatacttccgggtatggtttggcaggacagagatgtgtacctgcaaggacccatttgggccaaaattcctcacacggacggcaactttcacccttctccgctgatgggagggtttggaatgaagcacccgcctcctcagatcctcatcaaaaacacacctgtacctgcggatcctccaacggccttcaacaaggacaagctgaactctttcatcacccagtattctactggccaagtcagcgtggagatcgagtgggagctgcagaaggaaaacagcaagcgctggaacccggagatccagtacacttccaactattacaagtctaataatgttgaatttgctgttaatactgaaggtgtatatagtgaaccccgccccattggcaccagatacctgactcgtaatctg

SEQ ID NO: 614 - DNA, 2208 bp, Artificial Sequence
  Description of Artificial Sequence: Synthetic polynucleotide
atggctgccgatggttatcttccagattggctcgaggacaaccttagtgaaggaattcgcgagtggtgggctttgaaacctggagcccctcaacccaaggcaaatcaacaacatcaagacaacgctcggggtcttgtgcttccgggttacaaataccttggacccggcaacggactcgacaagggggagccggtcaacgcagcagacgcggcggccctcgagcacgacaaggcctacgaccagcagctcaaggccggagacaacccgtacctcaagtacaaccacgccgacgccgagttccaggagcggctcaaagaagatacgtcttttgggggcaacctcgggcgagcagtcttccaggccaaaaagaggcttcttgaacctcttggtccggttgaggaagcggctaagacggctcctggaaagaagaggcctgtagagcagtctcctcaggaaccggactcctccgcgggtattggcaaatcgggtgcacagcccgctaaaaagagactcaatttcggtcagactggcgacacagagtcagtcccagaccctcaaccaatcggagaacctcccgcagccccctcaggtgtgggatctcttacaatggcttcaggtggtggcgcaccagtggcagacaataacgaaggtgccgatggagtgggtagttcctcgggaaattggcattgcgattcccaatggctgggggacagagtcatcaccaccagcacccgaacctgggccctgcccacctacaacaatcacctctacaagcaaatctccaacagcacatctggaggatcttcaaatgacaacgcctacttcggctacagcaccccctgggggtattttgacttcaacagattccactgccacttctcaccacgtgactggcggcgactcatcaacaacaactggggattccggcctaagcgactcaacttcaagctcttcaacattcaggtcaaagaggttacggacaacaatggagtcaagaccatcgccaataaccttaccagcacggtccaggtcttcacggactcagactatcagctcccgtacgtgctcgggtcggctcacgagggctgcctcccgccgttcccagcggacgttttcatgattcctcagtacgggtatctgacgcttaatgatggaagccaggccgtgggtcgttcgtccttttactgcctggaatatttcccgtcgcaaatgctaagaacgggtaacaacttccagttcagctacgagtttgagaacgtacctttccatagcagctacgctcacagccaaagcctggaccgactaatgaatccactcatcgaccaatacttgtactatctctcaaagactattaacggttctggacagaatcaacaaacgctaaaattcagtgtggccggacccagcaacatggctgtccagggaagaaactacatacctggacccagctaccgacaacaacgtgtctcaaccactgtgactcaaaacaacaacagcgaatttgcttggcctggagcttcttcttgggctctcaatggacgtaatagcttgatgaatcctggacctgctatggccagccacaaagaaggagaggaccgtttctttcctttgtctggatctttaatttttggcaaacaaggaactggaagagacaacgtggatgcggacaaagtcatgataaccaacgaagaagaaattaaaactactaacccggtagcaacggagtcctatggacaagtggccacaaaccaccagagtgcccaagcacaggcgcagaccggctgggttcaaaaccaaggaatacttccgggtatggtttggcaggacagagatgtgtacctgcaaggacccatttgggccaaaattcctcacacggacggcaactttcacccttctccgctgatgggagggtttggaatgaagcacccgcctcctcagatcctcatcaaaaacacacctgtacctgcggatcctccaacggccttcaacaaggacaagctgaactctttcatcacccagtattctactggccaagtcagcgtggagatcgagtgggagctgcagaaggaaaacagcaagcgctggaacccggagatccagtacacttccaactattacaagtctaataatgttgaatttgctgttaatactgaaggtgtatatagtgaaccccgccccattggcaccagatacctgactcgtaatctg

SEQ ID NO: 615 - DNA, 2208 bp, Artificial Sequence
  Description of Artificial Sequence: Synthetic polynucleotide
atggctgccgatggttatcttccagattggctcgaggacaaccttagtgaaggaattcgcgagtggtgggctttgaaacctggagcccctcaacccaaggcaaatcaacaacatcaagacaacgctcgaggtcttgtgcttccgggttacaaataccttggacccggcaacggactcgacaagggggagccggtcaacgcagcagacgcggcggccctcgagcacgacaaggcctacgaccagcagctcaaggccggagacaacctgtacctcaagtacaaccacgccgacgccgagttccaggagcggctcaaagaagatacgtcttttgggggcaacctcgggcgagcagtcttccaggccaaaaagaggcttcttgaacctcttggtctggttgaggaagcggctaagacggctcctggaaagaagaggcctgtagagcagtctcctcaggaaccggactcctccgcgggtattggcaaatcgggtgcacagcccgctaaaaagagactcaatttcggtcagactggcgacacagagtcagtcccagaccctcaaccaatcggagaacctcccgcagccccctcaggtgtgggatctcttacaatggcttcaggtggtggcgcaccagtggcagacaataacgaaggtgccgatggagtgggtagttcctcgggaaattggcattgcgattcccaatggctgggggacagagtcatcaccaccagcacccgaacctgggccctgcccacctacaacaatcacctctacaagcaaatctccaacagcacatctggaggatcttcaaatgacaacgcctacttcggctacagcaccccctgggggtattttgacttcaacagattccactgccacttctcaccacgtgactggcagcgactcatcaacaacaactggggattccggcctaagcgactcaacttcaagctcttcaacattcaggtcaaagaggttacggacaacaatggagtcaagaccatcgccaataaccttaccagcacggtccaggtcttcacggactcagactatcagctcccgtacgtgctcgggtcggctcacgagggctgcctcccgccgttcccagcggacgttttcatgattcctcagtacgggtatctgacgcttaatgatggaagccaggccgtgggtcgttcgtccttttactgcctggaatatttcccgtcgcaaatgctaagaacgggtaacaacttccagttcagctacgagtttgagaacgtacctttccatagcagctacgctcacagccaaagcctggaccgactaatgaatccactcatcgaccaatacttgcactatctctcaaagactattaacggttctggacagaatcaacaaacgctaaaattcagtgtggccggacccagcaacatggctgtccagggaagaaactacatacctggacccagctaccgacaacaacgtgtctcaaccactgtgactcaaaacaacaacagcgaatttgcttggcctggagcttcttcttgggctctcaatggacgtaatagcttgatgaatcctggacctgctatggccagccacaaagaaggagaggaccgtttctttcctttgtctggatctttaatttttggcaaacaaggaactggaagagacaacgtggatgcggacaaagtcatgataaccaacgaagaagaaattaaaactactaacccggtagcaacggagtcctatggacaagtggccacaaaccaccagagtgcccaagcacaggcgcagaccggctgggttcaaaaccaaggaatacttccgggtatggtttggcaggacagagatgtgtacctgcaaggacccatttgggccaaaattcctcacacggacggcaactttcacccttctccgctgatgggagggtttggaatgaagcacccgcctcctcagatcctcatcaaaaacacacctgtacctgcggatcctccaacggccttcaacaaggacaagctgaactctttcatcacccagtattctactggccaagtcagcgtggagatcgagtgggagctgcagaaggaaaacagcaagcgctggaacccggagatccagtacacttccaactattacaagtctaataatgttgaatttgctgttaatactgaaggtgtatatagtgaaccccgccccattggcaccagatacctgactcgtaatctg

SEQ ID NO: 616 - DNA, 2208 bp, Artificial Sequence
  Description of Artificial Sequence: Synthetic polynucleotide
atggctgccgatggttatcttccagattggctcgaggacaaccttagtgaaggaattcgcgagtggtgggctttgaaacctggagcccctcaacccaaggcaaatcaacaacatcaagacaacgctcgaggtcttgtgcttccgggttacaaataccttggacccggcaacggactcgacaagggggagccggtcaacgcagcagacgcggcggccctcgagcacgacaaggcctacgaccagcagctcaaggccggagacaacccgtacctcaagtacaaccacgccgacgccgagttccaggagcggctcaaagaagatacgtcttttgggggcaacctcgggcgagcagtcttccaggccaaaaagaggcttcttgaacctcttggtctggttgaggaagcggctaagacggctcctggaaagaagaggcctgtagagcagtctcctcaagaaccggactcctccgcgggtattggcaaatcgggtgcacagcccgctaaaaagagactcaatttcggtcagactggcgacacagagtcagtcccagaccctcaaccaatcggagaacctcccgcagccccctcaggtgtgggatctcttacaatggcttcaggtggtggcgcaccagtggcagacaataacgaaggtgccgatggagtgggtagttcctcgggaaattggcattgcgattcccaatggctgggggacagagtcatcaccaccagcacccgaacctgggccctgcccacctacaacaatcacctctacaagcaaatctccaacagcacatctggaggatcttcaaatgacaacgcctacttcggctacagcaccccctgggggtattttgacttcaacagattccactgccacttctcaccacgtgactggcagcgactcatcaacaacaactggggattccggcctaagcgactcaacttcaagctcttcaacattcaggtcaaagaggttacggacaacaatggagtcaagaccatcgccaataaccttaccagcacggtccaggtcttcacggactcagactatcagctcccgtacgtgctcgggtcggctcacgagggctgcctcccgccgttcccagcggacgttttcatgattcctcagtacgggtatctgacgcttaatgatggaagccaggccgtgggtcgttcgtccttttactgcctggaatatttcccgtcgcaaatgctaagaacgggtaacaacttccagttcagctacgagtttgagaacgtacctttccatagcagctacgctcacagccaaagcctggaccgactaatgaatccactcatcgaccaatacttgcactatctctcaaagactattaacggttctggacagaatcaacaaacgctaaaattcagtgtggccggacccagcaacatggctgtccagggaagaaactacatacctggacccagctaccgacaacaacgtgtctcaaccactgtgactcaaaacaacaacagcgaatttgcttggcctggagcttcttcttgggctctcaatggacgtaatagcttgatgaatcctggacctgctatggccagccacaaagaaggagaggaccgtttctttcctttgtctggatctttaatttttggcaaacaaggaactggaagagacaacgtggatgcggacaaagtcatgataaccaacgaagaagaaattaaaactactaacccggtagcaacggagtcctatggacaagtggccacaaaccaccagagtgcccaagcacaggcgcagaccggctgggttcaaaaccaaggaatacttccgggtatggtttggcaggacagagatgtgtacctgcaaggacccatttgggccaaaattcctcacacggacggcaactttcacccttctccgctgatgggagggtttggaatgaagcacccgcctcctcagatcctcatcaaaaacacacctgtacctgcggatcctccaacggccttcaacaaggacaagctgaactctttcatcacccagtattctactggccaagtcagcgtggagatcgagtgggagctgcagaaggaaaacagcaagcgctggaacccggagatccagtacacttccaactattacaagtctaataatgttgaatttgctgttaatactgaaggtgtatatagtgaaccccgccccattggcaccagatacctgactcgtaatctg

SEQ ID NO: 617 - DNA, 2208 bp, Artificial Sequence
  Description of Artificial Sequence: Synthetic polynucleotide
  misc_feature (1325)..(1325): n is a, c, t, or g
atggctgccgatggttatcttccagattggctcgaggacaaccttagtgaaggaattcgcgagtggtgggctttgaaacctggagcccctcaacccaaggcaaatcaacaacatcaagacaacgctcgaggtcttgtgcttccgggttacaaataccttggacccggcaacggactcgacaagggggagccggtcaacgcagcagacgcggcggccctcgagcacgacaaggcctacgaccagcagctcaaggccggagacaacccgtacctcaagtacaaccacgccgacgccgagttccaggagcggctcaaagaagatacgtcttttgggggcaacctcgggcgagcagtcttccaggccaaaaagaggcttcttgaacctcttggtctggttgaggaagcggctaagacggctcctggaaagaagaggcctgtagagcagtctcctcaggaaccggactcctccgcgggtattggcaaatcgggtgcacagcccgctaaaaagagactcaatttcggtcagactggcgacacagagtcagtcccagaccctcaaccaatcggagaacctcccgcagccccctcaggtgtgggatctcttacaatggcttcaggtggtggcgcaccagtggcagacaataacgaaggtgccgatggagtgggtagttcctcgggaaattggcattgcgattcccaatggctgggggacagagtcatcaccaccagcacccgaacctgggccctgcccacctacaacaatcacctctacaagcaaatctccaccagcacatctggaggatcttcaaatgacaacgcctacttcggctacagcaccccctgggggtattttgacttcaacagattccactgccacttctcaccacgtgactggcagcgactcatcaacaacaactggggattccggcctaagcgactcaacttcaagctcttcaacattcaggtcaaagaggttacggacaacaatggagtcaagaccatcgccaataaccttaccagcacggtccaggtcttcacggactcagactatcagctcccgtacgtgctcgggtcggctcacgagggctgcctcccgccgttcccagcggacgttttcatgattcctcagtacgggtatctgacgcttaatgatggaagccaggccgtgggtcgttcgtccttttactgcctggaatatttcccgtcgcaaatgctaagaacgggtaacaacttccagttcagctacgagtttgagaacgtacctttccatagcagctacgctcacagccaaagcctggaccgactaatgaatccactcatcgaccnatacttgcactatctctcaaagactattaacggttctggacagaatcaacaaacgctaaaattcagtgtggccggacccagcaacatggctgtccagggaagaaactacatacctggacccagctaccgacaacaacgtgtctcaaccactgtgactcaaaacaacaacagcgaatttgcttggcctggagcttcttcttgggctctcaatggacgtaatagcttgatgaatcctggacctgctatggccagccacaaagaaggagaggaccgtttctttcctttgtctggatctttaatttttggcaaacaaggaactggaagagacaacgtggatgcggacaaagtcatgataaccaacgaagaagaaattaaaactactaacccggtagcaacggagtcctatggacaagtggccacaaaccaccagagtgcccaagcacaggcgcagaccggctgggttcaaaaccaaggaatacttccggatatggtttggcaggacagagatgtgtacctgcaaggacccatttgggccaaaattcctcacacggacggcaactttcacccttctccgctgatgggagggtttggaatgaagcacccgcctcctcagatcctcatcaaaaacacacctgtacctgcggatcctccaacggccttcaacaaggacaagctgaactctttcatcacccagtattctactggccaagtcagcgtggagatcgagtgggagctgcagaaggaaaacagcaagcgctggaacccggagatccagtacacttccaactattacaagtctaataatgttgaatttgctgttaatactgaaggtgtatatagtgaaccccgccccattggcaccagatacctgactcgtaatctg

SEQ ID NO: 618 - DNA, 2208 bp, Artificial Sequence
  Description of Artificial Sequence: Synthetic polynucleotide
atggctgccgatggttatcttccagattggctcgaggacaaccttagtgaaggaattcgcgagtggtgggctttgaaacctggagcccctcaacccaaggcaaatcaacaacatcaagacaacgctcgaggtcttgtgcttccgggttacaaataccttggacccggcaacggactcgacaagggggagccggtcaacgcagcagacgcggcggccctcgagcacgacaaggcctacgaccagcagctcaaggccggagacaacccgtacctcaagtacaaccacgccgacgccgagttccaggagcggctcaaagaagatacgtcttttgggggcaacctcgggcgagcagtcttccaggccaaaaagaggcttcttgaacctcttggtctggttgaggaagcggctaagacggctcctggaaagaagaggcctgtagagcagtctcctcaggaaccggactcctccgcgggtattggcaaatcgggtgcacagcccgctaaaaagagactcaatttcggtcagactggcgacacagagtcagtcccagaccctcaaccaatcggagaacctcccgcagccccctcaggtgtgggatctcttacaatggcttcaggtggtggcgcaccagtggcagacaataacgaaggtgccgatggagtgggtagttcctcgggaaattggcattgcgattcccaatggctgggggacagagtcatcaccaccagcacccgaacctgggccctgcccacctacaacaatcacctctacaagcaaatctccaacagcacatctggaggatcttcaaatgacaacgcctacttcggctacagcaccccctgggggtattttgacttcaacagattccactgccacttctcaccacgtgactggcagcgactcatcaacaacaactggggattccggcctaagcgactcaacttcaagctcttcaacattcaggtcaaagaggttacggacaacaatggagtcaagaccatcgccaataaccttaccagcacggtccaggtcttcacggactcagactatcagctcccgtacgtgctcgggtcggctcacgagggctgcctcccgccgttcccagcggacgttttcatgattcctcagtacgggtatctgacgcttaatgatggaagccaggccgtgggtcgttcgtccttttactgcctggaatatttcccgtcgcaaatgctaagaacgggtaacaacttccagttcagctacgagtttgagaacgtacctttccatagcagctacgctcacagccaaagcctggaccgactaatgaatccactcatcgaccaatacttgcactatctctcaaagactattaacggttctggacagaatcaacaaacgctaaaattcagtgtggccggacccagcaacatggctgtccagggaagaaactacatacctggacccagctaccgacaacaacgtgtctcaaccactgtgactcaaaacaacaacagcgaatttgcttggcctggagcttcttcttgggctctcaatggacgtaatagcttgatgaatcctggacctgctatggccagctacaaagaaggagaggacagtttctttcctttgtctggatctttaatttttggcaaacaaggaactggaagagacaacgtggatgcggacaaagtcatgataaccaacgaagaagaaattaaaactactaacccggtagcaacggagtcctatggacaagtggccacaaaccaccagagtgcccaagcacaggcgcagaccggctgggttcaaaaccaaggaatacttccgggtatggtttggcaggacagagatgtgtacctgcaaggacccatttgggccaaaattcctcacacggacggcaactttcacccttctccgctgatgggagggtttggaatgaagcacccgcctcctcagaccctcatcaaaaacacacctgtacctgcggatcctccaacggccttcaacaaggacaagctgaactctttcatcacccagtattctactggccaagtcagcgtggagatcgagtgggagctgcagaaggaaaacagcaagcgctggaacccggagatccagtacacttccaactattacaagtctaataatgttgaatttgctgttaatactgaaggtgtatatagtgaaccccgccccattggcaccagatacctgactcgtaatctg

SEQ ID NO: 619 - DNA, 2208 bp, Artificial Sequence; identical to SEQ ID NO: 602
  Description of Artificial Sequence: Synthetic polynucleotide

SEQ ID NO: 620 - DNA, 2208 bp, Artificial Sequence
  Description of Artificial Sequence: Synthetic polynucleotide
atggctgccgatggttatcttccagattggctcgaggacaaccttagtgaaggaattcgcgagtggtgggctttgaaacctggagcccctcaacccagggcaaatcaacaacatcaagacaacgctcgaggtcttgtgcttccgggttacaaataccttggacccggcaacggactcgacaagggggagccggtcaacgcagccgacgcggcggccctcgagcacgacaaggcctacgaccagcagctcaaggccggagacaacccgtacctcaagtacaaccacgccgacgccgagttccaggagcggctcaaagaagatacgtcttttgggggcaacctcgggcgagcagtcttccaggccaaaaagaggcttcttgaacctcttggtctggttgaggaagcggctaagacggctcctggaaagaagaggcctgtagagcagtctcctcaggaaccggactcctccgcgggtattggcaaatcgggtgcacagcccgctaaaaagagactcaatttcggtcagactggcgacacagagtcagtcccagaccctcaaccaatcggagaacctcccgcagccccctcaggtgtgggatctcttacaatggcttcaggtggtggcgcaccagtggcagacaataacgaaggtgccgatggagtgggtagttcctcgggaaattggcattgcgattcccaatggctgggggacagagtcatcaccaccagcacccgaacctgggccctgcccacctacaacaatcacctctacaagcaaatctccaacagcacatctggaggatcttcaaatgacaacgcctacttcggctacagcaccccctgggggtattttgacttcaacagattccactgccacttctcaccacgtgactggcagcgactcatcaacaacaactggggattccggcctaagcgactcaacttcaagctcttcaacattcaggtcaaagaggttacggacaacaatggagtcaagaccatcgccaataaccttaccagcacggtccaggtcttcacggactcagactgtcagctcccgtacgtgctcgggtcggctcacgagggctgcctcccgccgttcccagcggacgttttcatgattcctcagtacgggtatctgacgcttaatgatggaagccaggccgtgggtcgttcgtccttttactgcctggaatatttcccgtcgcaaatgctaagaacgggtaacaacttccagttcagctacgagtttgagaacgtacctttccatagcagctacgctcacagccaaagcctggaccgactaacgaatccactcatcgaccaatacttgtactatctctcaaagactattaacggttctggacagaatcaacaaacgctaaaattcagtgtggccggacccagcaacatggctgtccagggaagaaactacatacctggacccagctaccgacaacaacgtgtctcaaccactgtgactcaaaacaacaacagcgaatttgcttggcctggagcttcttcttgggctctcaatggacgtaatagcttgatgaatcctggacctgctatggccagccacaaagaaggagaggaccgtttctttcctttgtctggatctttaatttttggcaaacaaggaactggaagagacaacgtggatgcggacaaagtcatgataaccaacgaagaagaaattaaaactactaacccggtagcaacggagtcccatggacaagtggccacaaaccaccagagtgcccaagcacaggcgcagaccggctgggttcaaaaccaaggaatacttccgggtatggtttggcaggacagagatgtgtacctgcaaggacccatttgggccaaaattcctcacacggacggcaactttcacccttctccgctgatgggagggtttggaatgaagcacccgcctcctcagatcctcatcaaaaacacacctgtacctgcggatcctccaacggccttcaacaaggacaagctgaactctttcatcacccagtattctactggccaagtcagcgtggagatcgagtgggagctgcagaaggaaaacagcaagcgctggaacccggagatccagtacacttccaactattacaagtctaataatgttgaatttgctgttaatactgaaggtgtatatagtgaaccccgccccattggcaccagatacctgactcgtaatctg

SEQ ID NO: 621 - DNA, 2208 bp, Artificial Sequence
  Description of Artificial Sequence: Synthetic polynucleotide
atggctgccgatggttatcttccagattggctcgaggacaaccttagtgaaggaattcgcgagtggtgggctttgaaacctggagcccctcaacccaaggcaaatcaacaacatcaagacaacgctcgaggtcttgtgcttccgggttacaaataccttggacccggcaacggactcgacaagggggagccggtcaacgcagcagacgcggcggccctcgagcacgacaaggcctacgaccagcagctcaaggccggagacaacccgtacctcaagtacaaccacgccgacgccgagttccaggagcggctcaaagaagatacgtcttttgggggcaacctcgggcgagcagtcttccaggccaaaaagaggcttcttgaacctcttggtctggttgaggaagcggctaagacggctcctggaaagaagaggcctgtagagcagtctcctcaggaaccggactcctccgcgggtattggcaaatcgggtgcacagcccgctaagaagagactcaatttcggtcagactggcgacacagagtcagtcccagaccctcaaccaatcggagaacctcccgcagccccctcaggtgtgggatctcttacaatggcttcaggtggtggcgcaccagtggcagacaataacgaaggtgccgatggagtgggtagttcctcgggaaattggcattgcgattcccaatggctgggggacagagtcatcaccaccagcacccgaacctgggccctgcccacctacaacaatcacctctacaagcaaatctccaacagcacatctggaggatcttcaaatgacaacgcctacttcggctacagcaccccctgggggtattttgacttcaacagattccactgccacttctcaccacgtgactggcagcgactcatcaacaacaactggggattccggcctaagcgactcaacttcaagctcttcaacattcaggtcaaagaggttacggacaacaatggagtcaagaccatcgccaataaccttaccagcacggtccaggtcttcacggactcagactatcagctcccgtacgtgctcgggtcggctcacgagggctgcctcccgccgttcccagcggacgttttcatgattcctcagtacgggtatctgacgcttaatgatggaagccaggccgtgggtcgttcgtccttttactgcctggaatatttcccgtcgcaaatgctaagaacgggtaacaacttccagttcagctacgagtttgagaacgtacctttccatagcagctacgctcacagccaaagcctggaccgactaatgaatccacccatcgaccaatacttgtactatctctcaaagactattaacggttctggacagaatcaacaaacgctaaaattcagtgtggccggacccagcaacatggctgtccagggaagaaactacatacctggacccagctaccgacaacaacgtgtctcaaccactgtgactcaaaacaacaacagcgaatttgcttggcctggagcttcttcttgggctctcaatggacgtaatagcttgatgaatcctggacctgctatggccagccacaaagaaggagaggaccgtttctttcctttgtctggatctttaatttttggcaaacaaggaactggaagagacaacgtggatgcggacaaagtcatgataaccaacgaagaagaaattaaaactactaacccggtagcaacggagtcctatggacaagtggccacaaaccaccagagtgcccaagcacaggcgcagaccggctgggttcaaaaccaaggaatacttccgggtatggtttggcaggacagagatgtgtacctgcaaggacccatttgggccaaaattcctcacacggacggcaactttcacccttctccgctgatgggagggtttggaatgaagcacccgcctcctcagatcctcatcaaaaacacacctgtacctgcggatcctccaacggccttcaacaaggacaagctgaactctttcatcacccagtattctactggccaagtcagcgtggagatcgagtgggagctgcagaaggaaaacagcaagcgctggaacccggagatccagtacacttccaactattacaagtctaataatgttgaatttgctgttaatactgaaggtgtatatggtgaaccccgccccattggcaccagatacctgactcgtaatctg

SEQ ID NO: 622 - DNA, 2208 bp, Artificial Sequence
  Description of Artificial Sequence: Synthetic polynucleotide
atggctgccgatggttatcttccagattggctcgaggacaaccttagtgaaggaattcgcgagtggtgggctttgaaacctggagcccctcaacccaaggcaaatcaacaacatcaagacaacgctcgaggtcttgtgcttccgggttacaaataccttggacccggcaacggactcgacaagggggagccggtcaacgcagcagacgcggcggccctcgagcacgacaaggcctacgaccagcagctcaaggccggagacaacccgtacctcaagtacaaccacgccgacgccgagttccaggagcggctcaaagaagatacgtcttttgggggcaacctcgggcgagcagtcttccaggccaaaaagaggcttcttgaacctcttggtctggttgaggaagcggctaagacggctcctggaaagaagaggcctgtagagcagtctcctcaggaaccggactcctccgcgggtattggcaaatcgggtgcacagcccgctaaaaagagactcaatttcggtcagactggcgacacagagtcagtcccagaccctcaaccaatcggagaacctcccgcagccccctcaggtgtgggatctcttacaatggcttcaggtggtggcgcaccagtggcagacaataacgaaggtgccgatggagtgggtagttcctcgggaaattggcattgcgattcccaatggctgggggacagagtcatcaccaccagcacccgaacctgggccctgcccacctacaacaatcacctctacaagcaaatctccaacagcacatctggaggatcttcaaatgacaacgcctacttcggctacagcaccccctgggggtattttgacttcaacagattccactgccacttctcaccacgtgaccggcagcgactcatcaacaacaactggggattccggcctaagcgactcaacttcaagctcttcaacattcaggtcaaagaggttacggacaacaatggagtcaagaccatcgccaataaccttaccagcacggtccaggtcttcacggactcagactatcagctcccgtacgtgctcgggtcggctcacgagggctgcctcccgccgttcccagcggacgttttcatgattcctcagtacgggtatctgacgcttaatgatggaagccaggccgtgggtcgttcgtccttttactgcctggaatatttcccgtcgcaaatgctaagaacgggtaacaacttccagttcagctacgagtttgagaacgtacctttccatagcagctacgctcacagccaaagcctggaccgactaatgaatccactcatcgaccaatacttgtactatctctcaaagactattaacggttctggacagaatcaacaaacgctaaaattcagtgtggccggacccagcaacatggctgtccagggaagaaactacatacctggacccagctaccgacaacaacgtgtctcaaccactgtgactcaaaacaacaacagcgaatttgcttggcctggagcttcttcttgggctctcaatggacgtaatagcttgatgaatcctggacctgctatggccagccacaaagaaggagaggaccgtttctttcctttgtctggatctttaatttttggcaaacaaggaactggaagagacaacgtggatgcggacaaagtcatgataaccaacgaagaagaaattaaaactactaacccggtagcaacggagtcctatggacaagtggccacaaaccaccagagtgcccaagcacaggcgcagaccggctgggttcaaaaccaaggaatacttccgggtatggtttggcaggacagagatgtgtacctgcaaggacccatttgggccaaaattcctcacacggacggcaactttcacccttctccgctgatgggagggtttggaatgaagcacccgcctcctcagatcctcatcaaaaacacacctgtacctgcggatcctccaacggccttcaacaaggacaagctgaactctttcatcacccagtattctactggccaagtcagcgtggagatcgagtgggagctgcagaaggaaaacagcaagcgctggaacccggagatccagtacacttccaactattacaagtctaataatgttgaatttgctgttaatactgaaggtgtatatagtgaaccccgccccattggcaccagatacctgactcgtaatctg

SEQ ID NO: 623 - DNA, 2208 bp, Artificial Sequence
  Description of Artificial Sequence: Synthetic polynucleotide
atggctgccgatggttatcttccagattggctcgaggacaaccttagtgaaggaattcgcgagtggtgggctttgaaacctggagcccctcaacccaaggcaaatcaacaacatcaagacaacgctcgaggtcttgtgcttccgggttacaaataccttggacccggcaacggactcgacaagggggagccggtcaacgcagcagacgcggcagccctcgagcacgacaaggcctacgaccagcagctcaaggccggagacaacccgtacctcaagtacaaccacgccgacgccgagttccaggagcggctcaaagaagatacgtcttttgggggcaacctcgggcgagcagtcttccaggccaaaaagaggcttcttgaacctcttggtctggttgaggaagcggctaagacggctcctggaaagaagaggcctgtagagcagtctcctcaggaaccggactcctccgcgggtattggcaaatcgggtgcacagcccgctaaaaagagactcaatttcggtcagactggcgacacagagtcagtcccagaccctcaaccaatcggagaacctcccgcagccccctcaggtgtgggatctcttacaatggcttcaggtggtggcgcaccagtggcagacaataacgaaggtgccgatggagtgggtagttcctcgggaaattggcattgcaattcccaatggctgggggacagagtcatcaccaccagcacccgaacctgggccctgcccacctacaacaatcacctctacaagcaaatctccaacagcacatctggaggatcttcaaatgacaacgcctacttcggctacagcaccccctgggggtattttgacttcaacagattccactgccacttctcaccacgtgactggcagcgactcatcaacaacaactggggattccggcctaagcgactcaacttcaagctcttcaacattcaggtcaaagaggttacggacaacaatggagtcaagaccatcgccaataaccttaccagcacggtccaggtcttcacggactcagactatcagctcccgtacgtgctcgggtcggctcacgagggctgcctcccgccgttcccagcggacgttttcatgattcctcagtacgggtatctgacgcttaatgatggaagccaggccgtgggtcgttcgtccttttactgcctggaatatttcccgtcgcaaatgctaagaacgggtaacaacttccagttcagctacgagtttgagaacgtacctttccatagcagctacgctcacagccaaagcctggaccgactaatgaatccactcatcgaccaatacttgtactatctctcaaagactattaacggttctggacagaatcaacaaacgctaaaattcagtgtggccggacccggcaacatggctgtccagggaagaaactacatacctggacccagctaccgacaacaacgtgtctcaaccactgtgactcaaaacaacaacagcgaatttgcttggcctggagcttcttcttgggctctcaatggacgtaatagcttgatgaatcctggacctgctatggccagccacaaagaaggagaggaccgtttctttcctttgtctggatctttaatttttggcaaacaaggaactggaagagacaacgtggatgcggacaaagtcatgataaccaacgaagaagaaattaaaactactaacccggtagcaacggagtcctatggacaagtggccacaaaccaccagagtgcccaagcacaggcgcagaccggctgggttcaaaaccaaggaatacttccgggtatggtttggcaggacagagatgtgtacctgcaaggacccatttgggccaaaattcctcacacggacggcaactttcacccttctccgctgatgggagggtttggaatgaagcacccgcctcctcagatcctcatcaagaacacacctgtacctgcggatcctccaacggccttcaacaaggacaagctgaactctttcatcacccagtattctactggccaagtcagcgtggagatcgagtgggagctgcagaaggaaaacagcaagcgctggaacccggagatccagtacacttccaactattacaagtctaataatgttgaatttgctgttaatactgaaggtgtatatagtgaaccccgccccattggcaccagatacctgactcgtaatctg

SEQ ID NO: 624 - DNA, 2208 bp, Artificial Sequence
  Description of Artificial Sequence: Synthetic polynucleotide
atggctgccgatggttatcttccagattggctcgaggacaaccttagtgaaggaattcgcgagtggtgggctttgaaacctggagcccctcaacccaaggcaaatcaacaacatcaagacaacgctcgaggtcttgtgcttccgggttacagataccttggacccggcaacggactcgacaagggggagccggtcaacgcagcagacgcggcggccctcgagcacgacaaggcctacgaccagcagctcaaggccggagacaacccgtacctcaagtacaaccacgccgacgccgagttccaggagcggctcaaagaagatacgtcttttgggggtaacctcgggcgagcagtcttccaggccaaaaagaggcttcttgaacctcttggtctggttgaggaagcggctaagacggctcctggaaagaagaggcctgtagagcagtctcctcaggaaccggactcctccgcgggtatcggcaaatcgggtgcacagcccgctaaaaagagactcaatttcggtcagactggcgacacagagtcagtcccagaccctcaaccaatcggagaacctcccgcagccccctcaggtgtgggatctcttacaatggcttcaggtggtggcgcaccagtggcagacaataacgaaggtgccgatggagtgggtagttcctcgggaaattggcattgcgattcccaatggctgggggacagagtcatcaccaccagcacccgaacctgggccctgcccacctacaacaatcacctctacaagcaaatctccaacagcacatctggaggatcttcaaatgacaacgcctacttcggctacagcaccccctgggggtattttgacttcaacagattccactgccacttctcaccacgtgactggcagcgactcatcaacaacaactggggattccggcctaagcgactcaacttcaagctcttcaacattcaggtcaaagaggttacggacaacaatggagtcaagaccgtcgccaataaccttaccagcacggtccaggtcttcacggactcagactatcagctcccgtacgtgctcgggtcggctcacgagggctgcctcccgccgttcccagcggacgttttcatgattcctcagtacgggtatctgacgcttaatgatggaagccaggccgtgggtcgttcgtccttttactgcctggaatatttcccgtcgcaaatgctaagaacgggtaacaacttccagttcagctacgagtttgagaacgtacctttccatagcagctacgctcacagccaaagcctggaccgactaatgaatccactcatcgaccaatacttgtactatctctcaaagactattaacggttctggacagaatcaacaaacgctaaaattcagtgtggccggacccagcaacatggctgtccagggaagaaactacatacctggacccagctaccgacaacaacgtgtctcaaccactgtgactcaaaacaacaacagcgaatttgcttggcctggagcttcttcttgggctctcaatggacgtaatagcttgatgaatcctggacctgctatggccagccacaaagaaggagaggaccgtttctttcctttgtctggatctttaatttttggcaaacaaggaactggaagagacaacgtggatgcggacaaagtcatgataaccaacgaagaagaaattaaaactactaacccggtagcaacggagtcctatggacaagtggccacaaaccaccagagtgcccaagcacaggcgcagaccggctgggttcaaaaccaaggaatacttccgggtatggtttggcaggacagagatgtgtacctgcaaggacccatttgggccaaaattcctcacacggacggcaactttcacccttctccgctgatgggagggtttggaatgaagcacccgcctcctcagatcctcatcaaaaacacacctgtacctgcggatcctccaacggccttcaacaaggacaagctgaactctttcatcacccagtattctactggccaagtcagcgtggagatcgagtgggagctgcagaaggaaaacagcaagcgctggaacccggagatccagtacacttccaactattacaagtctaataatgttgaatttgctgttaatactgaaggtgtatatagtggaccccgccccattggcaccagatacctgactcgtaatctg

SEQ ID NO: 625 - DNA, 2208 bp, Artificial Sequence
  Description of Artificial Sequence: Synthetic polynucleotide
atggctgccgatggttatcttccagattggctcgaggacaaccttagtgaaggaattcgcgagtggtgggctttgaaacctggagcccctcaacccaaggcaaatcaacaacatcaagacaacgctcgaggtcttgtgcttccgggttacaaataccttggacccggcaacggactcgacaagggggagccggtcaacgcagcagacgcggcggccctcgagcacgacaaggcctacgaccagcagctcaaggccggagacaacccgtacctcaagtacaaccacgccgacgccgagttccaggagcggctcaaagaagatacgtcttttgggggcaacctcgggcgagcagtcttccaggccaaaaagaggcttcttgaacctcttggtctggttgaggaagcggctaagacggctcctggaaagaagaggcctgtagagcagtctcctcaggaaccggactcctccgcgggtattggcaaatcgggtgcacagcccgctaaaaagagactcaatttcggtcagactggcgacacagagtcagtcccagaccctcaaccaatcggagaacctcccgcagccccctcaggtgtgggatctcttacaatggcttcaggtggtggcgcaccagtggcagacaataacgaaggtgccgatggagtgggtagttcctcgggaaattggcattgcgattcccaatggctgggggacagagtcatcaccaccagcacccgaacctgggccctgcccacctacaacaatcacctctacaagcaaatctccaacagcacatctggaggatcttcaaatgacaacgcctacttcggctacagcaccccctgggggtattttgacttcaacagattccactgccacttctcaccacgtgactggcagcgactcatcaacaacaactggggattccggcctaagcgactcaacttcaagctcttcaacattcaggtcaaagaggttacggacaacaatggagtcaagaccatcgccaataaccttaccagcacggtccaggtcttcacggactcagactatcagctcccgtacgtgctcgggtcggctcacgagggctgcctcccgccgttcccagcggacgttttcatgattcctcagtacgggtatctgacgcttaatgatggaagccaggccgtgggtcgttcgtccttttactgcctggaatatttcccgtcgcaaatgctaagaacgggtaacaacttccagttcagctacgagtttgagaacgtacctttccatagcagctacgctcacagccaaagcctggaccgactaatgaatccactcatcgaccaatacttgtactatctctcaaagactattaacggttctggacagaatcaacaaacgctaaaattcagtgtggccggacccagcaacatggctgtccagggaagaaactacatacctggacccagctaccgacaacaacgtgtctcaaccactgtgactcaaaacaacaacagcgaatttgcttggcctggagcttcttcttgggctctcaatggacgtaatagcttgatgaatcctggacctgctatggccagccacaaagaaggagaggaccgtttctttcctttgtctggatctttaatttttggcaaacaaggaactggaagagacaacgtggatgcggacaaagtcatgataaccaacgaagaagaaattaaaactactaacccggtagcaacggagtcctatggacaagtggccacaaaccaccagagtgcccaagcacaggcgcagaccggctgggttcaaaaccaaggaatacttccgggtatggtttggcaggacagagatgtgtacctgcaaggacccatttgggccaaaattcctcacacggacggcaactttcacccttctccgctgatgggagggtttggaatgaagcacccgcctcctcagatcctcatcaaaaacacacctgtacctgcggatcctccaacggccttcaacaaggacaagctgaactctttcatcacccagtattctactggccaagtcagcgtggagatcgagtgggagctgcagaaggaaaacagcaagcgctggaacccggagatccagtacacttccaactattacaagtctaataatgttgaatttgctgttaatactgaaggtgtatatagtgaaccccgccccattggcaccagatacctgactcgtaatctg

SEQ ID NO: 626 - DNA, 2208 bp, Artificial Sequence
  Description of Artificial Sequence: Synthetic polynucleotide
atggctgccgatggttatcttccagattggctcgaggacaaccttagtgaaggaattcgcgagtggtgggctttgaaacctggagcccctcaacccaaggcaaatcaacaacgtcaagacaacgctcgaggtcttgtgcttccgggttacaaataccttggacccggcaacggactcgacaagggggagccggtcaacgcagcagacgcggcggccctcgagcacgacaaggcctacgaccagcagctcaaggccggaggcaacccgtgcctcaagtacaaccacgccgacgccgagttccaggagcggctcaaagaagatacgtcttttgggggcaacctcgggcgagcagtcttccaggccaaaaagaggcttcttgaacctcttggtctggttgaggaagcggctaagacggctcctggaaagaagaggcctgtagagcagtctcctcaggaaccggactcctccgcgggtattggcagatcgggtgcacagcccgctaaaaagagactcaatttcggtcagactggcgacacagagtcagtcccagaccctcaaccaatcggagaacctcccgcagccccctcaggtgtgggatctcttacaatggcttcaggtggtggcgcaccagtggcagacaataacgaaggtgccgatggagtgggtagttcctcgggaaattggcattgcgattcccaatggctgggggacagagtcatcaccaccagcacccgaacctgggccctgcccacctacaacaatcacctctacaagcaaatctccaacagcacatctggaggatcttcaaatgacaacgcctacttcggctacagcaccccctgggggtattttgacttcaacagattccactgccacttctcaccacgtgactggcagcgactcatcaacaacaactggggattccggcctaagcgactcaacttcaagctcttcaacattcaggtcaaagaggttacggacaacaatggagtcaaggccatcgccaataaccttaccagcacggtccaggtcttcacggactcagactatcagctcccgtacgtgctcgggtcggctcacgagggctgcctcccgccgttcccagcggacgttttcatgattcctcagtacgggtatctgacgcttaatgatggaagccaggccgtgggtcgttcgtccttttactgcctggaatatttcccgtcgcaaatgctaagaacgggtaacaacttccagttcagctacgagtttgagaacgtacctttccatagcagctacgctcacagccaaagcctggaccgactaatgaatccactcatcgaccaatacttgtactatctctcaaagactattgacggttctggacagaatcaacaaacgctaaaattcagtgtggccggacccagcaacatggctgtccagggaagaaactacatacctggacccagctaccgacaacaacgtgtctcaaccactgtgactcaaaacaacaacagcgaatttgcttggcctggagcttcttcttgggctctcaatggacgtaatagcttgatggatcctggacctgctatggccagccacaaagaaggagaggaccgtttctttcctttgtctggatctttaatttttggcaaacaaggaactggaagagacaacgtggatgcggacaaagtcatgataaccaacgaagaagaaattaaaactactaacccggtagcaacggagtcctatggacaagtggccacaaaccaccagagtgcccaagcacaggcgcagaccggctgggttcaaaaccaaggaatacttccgggtatggtttggcaggacagagatgtgtacctgcaaggacccatttgggccaaaattcctcacacgggcggcaactttcacccttctccgctgatgggagggtttggaatgaagcacccgcctcctcagatcctcatcaaaaacacacctgtacctgcggatcctccaacggccttcaacaaggacaagctgaactctttcatcacccagtattctactggccaagtcagcgtggagatcgagtgggagctgcagaaggaaaacagcaagcgctggaacccggagatccagtacacttccaactattacaagtctaataatgttgaatttgctgttaatactgaaggtgtatatagtgaaccccgccccattggcaccagatacctgactcgtaatctg

SEQ ID NO: 627 - DNA, 2208 bp, Artificial Sequence
  Description of Artificial Sequence: Synthetic polynucleotide
atggctgccgatggttatcttccagattggctcgaggacaaccttagtgaaggaattcgcgagtggtgggctttgaaacctggagcccctcaacccaaggcaaatcaacaacatcaagacaacgctcgaggtcttgtgcttccgggttacaaataccttggacccggcaacggactcgacaagggggagccggtcaacgcagcagacgcggcggccctcgagcacgacaaggcctacgaccagcagctcaaggccggagacaacccgtacctcaagtacaaccacgccgacgccgagttccaggagcggctcaaagaagatacgtcttttgggggcaacctcgggcgagcagtcttccaggccaaaaagaggcttcttgaacctcttggtctggttgaggaagcggctaagacggctcctggaaagaagaggcctgtagagcagtctcctcaggaaccggactcctccgcgggtattggcaaatcgggtgcacagcccgctaaaaagagactcaatttcggtcagactggcgacacagagtcagtcccagaccctcaaccaatcggagaacctcccgcagccccctcaggtgtgggatctcttacaatggcttcaggtggtggcgcaccagtggcagacaataacgaaggtgccgatggagtgggtagttcctcgggaaattggcattgcgattcccaatggctgggggacagagtcatcaccaccagcacccgaacctgggccctgcccacctacaacaatcacctctacaagcaaatctccaacagcacatctggaggatcttcaaatgacaacgcctacttcggctacagcaccccctgggggtattttgacttcaacagattccactgccacttctcaccacgtgactggcagcgactcatcaacaacaactggggattccggcctaagcgactcaacttcaagctcttcaacattcaggtcaaagaggttacggacaacaatggagtcaagaccatcgccaataaccttaccagcacggtccaggtcttcacggactcagactatcagctcccgtacgtgctcgggtcggctcacgagggctgcctcccgccgttcccagcggacgttttcatgattcctcagtacgggtatctgacgcttaatgatggaagccaggccgtgggtcgttcgtccttttactgcctggaatatttcccgtcgcaaatgctaagaacgggtaacaacttccagttcagctacgagtttgagaacgtacctttccatagcagctacgctcacagccaaagcctggaccgactaatgaatccactcatcgaccaatacttgtactatctctcaaagactattaacggttctggacagaatcaacaaacgctaaaattcagtgtggccggacccagcaacatggctgtccagggaagaaactacatacctggacccagctaccgacaacaacgtgtctcaaccactgtgactcaaaacaacaacagcgaatttgcttggcctggagcttcttcttgggctctcaatggacgtaatagcttgatgaatcctggacctgctatggccagccacaaagaaggagaggaccgtttctttcctttgtctggatctttaatttttggcaaacaaggaactggaagagacaacgtggatgcggacaaagtcatgataaccaacgaagaagaaattaaaactactaacccggtagcaacggagtcctatggacaagtggccacaaaccaccagagtgcccaagcacaggcgcagaccggctgggttcaaaaccaaggaatacttccgggtatggtttggcaggacagagatgtgtacctgcaaggacccatttgggccaaaattcctcacacggacggcaactttcacccttctccgctgatgggagggtttggaatgaagcacccgcctcctcagatcctcatcaaaaacacacctgtacctgcggatcctccaacggccttcaacaaggacaagctgaactctttcatcacccagtattctactggccaagtcagcgtggagatcgagtgggagctgcagaaggaaaacagcaagcgctggaacccggagatccagtacacttccaactattacaagcctaataatgttgaatttgctgttaatactgaaggtgtatatagtgaaccccgccccattggcaccagatacctgactcgtaatctg

SEQ ID NO: 628 - DNA, 2208 bp, Artificial Sequence
  Description of Artificial Sequence: Synthetic polynucleotide
atggctgccgatggttatcttccagattggctcgaggacaaccttagtgaaggaattcgcgagtggtgggctttgaaacctggagcccctcaacccaaggcaaatcaacaacatcaagacaacgctcgaggtcttgtgcttccgggttacaaataccttggacccggcaacggactcgacaagggggagccggtcaacgcagcagacgcggcggccctcgagcacaacaaggcctacgaccagcagctcaaggccggagacaacccgtacctcaagtgcaaccacgccgacgccgagttccaggagcggctcaaagaagatacgtcttttgggggcaacctcgggcgagcagtcttccaggccaaaaagaggcctcttgaacctcttggtctggttgaggaagcggctaagacggctcctggaaagaagaggcctgtagagcagtctcctcaggaaccggactcctccgcgggtattggcaaatcgggtgcacagcccgctaaaaagagactcaatttcggtcagactggcgacacagagtcagtcccagaccctcaaccaatcggagaacctcccgcagccccctcaggtgtgagatctcttacaatggcttcaggtggtggcgcaccagtggcagacaataacgaaggtgccgatggagtgggtagttcctcgggaaattggcattgcgattcccaatggctgggggacagagtcatcaccaccagcacccgaacctgggccctgcccacctacaacaatcacctctacaagcaaatctccaacagcacatctggaggatcttcaaatgacaacgcctacctcggctacagcaccccctgggggtattttgacttcaacagattccactgccacttctcaccacgtgactggcagcgactcatcaacaacaactggggattccggcctaagcgactcaacttcaagctcttcaacattcaggtcaaagaggttacggacaacaatggagtcaagaccatcgccaataaccttaccagcacggtccaggtcttcacggactcagactatcagctcccgtacgtgctcgggtcggctcacgagggctgcctcccgccgttcccagcggacgttttcatgattcctcagtacgggtatctgacgcttaatgatggaagccaggccgtgggtcgttcgtccttttactgcctggaatatttcccgtcgcaaatgctaagaacgggtaacaacttccagttcagctacgagtttgagaacgtacctttccatagcagctacgctcacagccaaagcctggaccgactaatgaatccactcatcgaccaatacttgtactatctctcaaagactattaacggttctggacagaatcaacaaacgctaaaattcagtgtggccggacccagcaacatggctgtccagggaagaaactacatacctggacccagctaccgacaacaacgtgtctcaaccactgtgactcaaaacaacaacagcgaatttgcttggcctggagcttcttcttgggctctcaatggacgtaatagcttgatgaatcctggacctactatggccagccacaaagaaggagaggaccgtttctttcctttgtctggatctttaatttttggcaaacaaggaactggaagagacaacgtggatgcggacaaagtcatgataaccaacgaagaagaaattaaaactactaacccggtagcaacggagtcctatggacaagtggccacaaaccaccagagtgcccaagcacaggcgcagaccggctgggttcaaaaccaaggaatacttccgggtatggtttggcaggacagagatgtgtacctgcaaggacccatttgggccaaaattcctcacacggacggcaactttcacccttctccgctgatgggagggtttggaatgaagcacccgcctcctcagatcctcatcaaaaacacacctgtacctgcggatcctccaacggccttcaacaaggacaagctgaactctttcatcacccagtattctactggccaagtcagcgtggagatcgagtgggagctgcagaaggaaaacagcaagcgctggaacccggagatccagtacacttccaactattacaagtctaataatgttgaatttgctgttaatactgaaggtgtatatagtgaaccccgccccattggcaccagatacctgactcgtaatctg

SEQ ID NO: 629 - DNA, 2208 bp, Artificial Sequence
  Description of Artificial Sequence: Synthetic polynucleotide
atggctgccgatggttatcttccagattggctcgaggacaaccttagtgaaggaattcgcgagtggtgggctttgaaacctggagcccctcaacccaaggcaaatcaacaacatcaagacaacgctcgaggtcttgtgcttccgggttacaaataccttggacccggcaacggactcgacaagggggagccggtcaacgcagcagacgcggcggccctcgtgcacgacaaggcctacgaccagcagctcaaggccggagacaacccgtacctcaagtgcaaccacgccgacgccgagttccaggagcggctcaaagaagatacgtcttttgggggcaacctcgggcgagcagtcttccaggccaaaaagaggcttcttgaacctcttggtctggttgaggaagcggctaagacggctcctggaaagaagaggcctgtagagcagtctcctcaggaaccggactcctccgcgggtattggcaaatcgggtgcacagcccgctaaaaagagactcaatttcggtcagactggcgacacagagtcagtcccagaccctcaaccaatcggagaacctcccgcagccccctcaggtgtgggatctcttacaatggcttcaggtggtggcgcaccagtggcagacaataacgaaggtgccgatggagtgggtagttcctcgggaaattggcattgcgattcccaatggctgggggacagagtcatcaccaccagcacccgaacctgggccctgcccacctacaacaatcacctctacaagcaaatctccaacagcacatctggaggatcttcaaatgacaacgcctacctcggctacagcaccccctgggggtattttgacttcaacagattccactgccacttctcaccacgtgactggcagcgactcatcaacaacaactggggattccggcctaagcgactcaacttcaagctcttcaacattcaggtcaaagaggttacggacaacaatggagtcaagaccatcgccaataaccttaccagcacggtccaggtcttcacggactcagactatcagctcccgtacgtgctcgggtcggctcacgagggctgcctcccgccgttcccagcggacgttttcacgattcctcagtacgggtatctgacgcttaatgatggaagccaggccgtgggtcgttcgtccttttactgcctggaatatttcccgtcgcaaatgctaagaacgggtaacaacttccagttcagctacgagtttgagaacgtacctttccatagcagctacgctcacagccaaagcctggaccgactaatgaatccactcatcgaccaatacttgtactatctctcaaagactattaacggttctggacagaatcaacaaacgctaaaattcagtgtggccggacccagcaacatggctgtccagggaagaaactacatacctggacccagctaccgacaacaacgtgtctcaaccactgtgactcaaaacaacaacagcgaatttgcttggcctggagcttcttcttgggctctcaatggacgtaatagcttgatgaatcctggacctgctatggccagccacaaagaaggagaggaccgtttctttcctttgtctggatctttaatttttggcaaacaaggaactggaagagacaacgtggatgcggacaaagtcatgataaccaacgaagaagaaattaaaactactaacccggtagcaacggagtcctatggacaagtggccacaaaccaccagagtgcccaagcacaggcgcagaccggctgggttcaaaaccaaggaatacttccgggtatggtttggcaggacagagatgtgtacctgcaaggacccatttgggccaaaattcctcacacggacggcaactttcacccttctccgctgatgggagggtttggaatgaagcacccgcctcctcagatcctcatcaaaaacacacctgtacctgcggatcctccaacggccttcaacaaggacaagctgaactctttcatcacccagtattctactggccaagtcagcgtggagatcgagtgggagctgcagaaggaaaacagcaagcgctggaacccggagatccagtacacttccaactattacaagtctaataatgttgaatttgctgttaatactgaaggtgtatatagtgaaccccgccccattgggccccgatacctgactcgtaatttt

SEQ ID NO: 630 - DNA, 2208 bp, Artificial Sequence
  Description of Artificial Sequence: Synthetic polynucleotide
atggctgccgatggttatcttccagattggctcgaggacaaccttagtgaaggaattcgcgagtggtgggctttgaaacctggagcccctcaacccaaggcaaatcaacaacatcaagacaacgctcgaggtcttgtgcttccgggttacaaataccttggacccggcaacggactcgacaagggggagccggtcaacgcagcagacgcggcggccctcgagcacaacaaggcctacgaccagcagctcaaggccggagacaacccgtacctcaagtgcaaccacgccgacgccgagttccaggagcggctcaaagaagatacgtcttttgggggcaacctcgggcgagcagtcttccaggccaaaaagaggcttcttgaacctcttggtctggttgaggaagcggctaagacggctcctggaaagaagaggcctgtagagcagtctcctcaggaaccggactcctccgcgggtattggcaaatcgggtgcacagcccgctaaaaagagactcaatttcggtcagactggcgacacagagtcagtcccagaccctcaaccaatcggagaacctcccgcagccccctcaggtgtgagatctcttacaatggcttcaggtggtggcgcaccagtggcagacaataacgaaggtgccgatggagtgggtagttcctcgggaaattggcattgcgattcccaatggctgggggacagagtcatcaccaccagcacccgaacctgggccctgcccacctacaacaatcacctctacaagcaaatctccaacagcacatctggaggatcttcaaatgacaacgcctacctcggctacagcaccccctgggggtattttgacttcaacagattccactgccacttctcaccacgtgactggcagcgactcatcaacaacaactggggattccggcctaagcgactcaacttcaagctcttcaacattcaggtcaaagaggttacggacaacaatggagtcaagaccatcgccaataaccttaccagcacggtccaggtcttcacggactcagactatcagctcccgtacgtgctcgggtcggctcacgagggctgcctcccgccgttcccagcggacgttttcatgattcctcagtacgggtatctgacgcttaatgatggaagccaggccgtgggtcgttcgtccttttactgcctggaatatttcccgtcgcaaatgctaagaacgggtaacaacttccagttcagctacgagtttgagaacgtacctttccatagcagctacgctcacagccaaagcctggaccgactaatgaatccactcatcgaccaatacttgtactatctctcaaagactattaacggttctggacagaatcaacaaacgctaaaattcagtgtggccggacccagcaacatggctgtccagggaagaaactacatacctggacccagctaccgacaacaacgtgtctcaaccactgtgactcaaaacaacaacagcgaatttgcttggcctggagcttcttcttgggctctcaatggacgtaatagcttgatgaatcctggacctgctatggccagccacaaagaaggagaggaccgtttctttcctttgtctggatctttaatttttggcaaacaaggaactggaagagacaacgtggatgcggacaaagtcatgataaccaacgaagaagaaattaaaactactaacccggtagcaacggagtcctatggacaagtggccacaaaccaccagagtgcccaagcacaggcgcagaccggctgggttcaaaaccaaggaatacttccgggtatggtttggcaggacagagatgtgtacctgcaaggacccatttgggccaaaattcctcacacggacggcaactttcacccttctccgctgatgggagggtttggaatgaagcacccgcctcctcagatcctcatcaaaaacacacctgtacctgcggatcctccaacggccttcaacaaggacaagctgaactctttcatcacccagtattctactggccaagtcagcgtggagatcgagtgggagctgcagaaggaaaacagcaagcgctggaacccggagatccagtacacttccaactattacaagtctaataatgttgaatttgctgttaatactgaaggtgtatatagtgaaccccgccccattggcaccagatacctgactcgtaatctg

SEQ ID NO: 631 - DNA, 2208 bp, Artificial Sequence
  Description of Artificial Sequence: Synthetic polynucleotide
atggctgccgatggttatcttccagattggctcgaggacaaccttagtgaaggaattcgcgagtggtgggctttgaaacctggagcccctcaacccaaggcaaatcaacaacatcaagacaacgctcgaggtcttgtgcttccgggttacaaataccttggacccggcaacggactcgacaagggggagccggtcaacgcagcagacgcggcggccctcgagcacgacaaggcctacgaccagcagctcaaggccggagacaacccgtacctcaagtgcaaccacgccgacgccgagttccaggagcggctcaaagaagatacgtcttttgggggcaacctcgggcgagcagtcttccaggccaaaaagaggcttcttgaacctcttggtctggttgaggaagcggctaagacggctcctggaaagaagaggcctgtagagcagtctcctcaggaaccggactcctccgcgggtattggcaaatcgggtgcacagcccgctaaaaagagactcaatttcggtcagactggcgacacagagtcagtcccagaccctcaaccaatcggagaacctcccgcagccccctcaggtgtgggatctcttacaatggcttcaggcggtggcgcaccagtggcagacaataacgaaggtgccgatggagtgggtagttcctcgggaaattggcattgcgattcccaatggctgggggacagagtcatcaccaccagcacccgaacctgggccctgcccacctacaacaatcacctctacaagcaaatctccaacagcacatctggaggatcttcaaatgacaacgcctacctcggctacagcaccccctgggggtattttgacttcaacagattccactgccacttctcaccacgtgactggcagcgactcatcaacaacaactggggattccggcctaagcgactcaacttcgagctcttcaacattcaggtcaaagaggttacggacaacaatggagtcaagaccatcgccaataaccttaccagcacggtccaggtcttcacggactcagactatcagctcccgtacgtgctcgggtcggctcacgagggctgcctcccgccgttcccagcggacgttttcatgattcctcagtacgggtatctgacgcttaatgatggaagccaggccgtgggtcgttcgtccttttactgcctggaatatttcccgtcgcaaatgctaagaacgggtaacaacttccagtccagctacgagtttgagaacgtacctttccatagcagctacgctcacagccaaagcctggaccgactaatgaatccactcatcgaccaatacttgtactatctctcaaagactattaacggttctggacagaatcaacaaacgctaaaattcagtgtggccggacccagcaacatggctgtccagggaagaaactacatacctggacccagctaccgacaacaacgtgcctcaaccactgtgactcaaaacaacaacagcgaatttgcttggcctggagcttcttcttgggctctcaatggacgtaatagcttgatgaatcctggacctgctatggccagccacaaagaaggggaggaccgtttctttcctttgtctggatctttaatttttggcaaacaaggaactggaagagacaacgtggatgcggacaaagtcatgataaccaacgaagaagaaattaaaactactaacccggtagcaacggagtcctatggacaagtggccacaaaccaccagagtgcccaagcacaggcgcagaccggctgggttcaaaaccaaggaatacttccgggtatggtttggcaggacagagatgtgtacctgcaaggacccatttgggccaaaattcctcacacggacggcaactttcacccttctccgctgatgggagggtttggaatgaagcacccgcctcctcagatcctcatcaaaaacacacctgtacctgcggatcctccaacggccttcaacaaggacaagctgaactctttcatcacccagtattctactggccaagtcagcgtggagatcgagtgggagctgcagaaggaaaacagcaagcgctggaacccggagatccagtacacttccaactattacaagtctaataatgttgaatttgctgttaatactgaaggtgtatatagtgaaccccgccccattggcaccagatacctgactcgtaatctg

SEQ ID NO: 632 - DNA, 2208 bp, Artificial Sequence
  Description of Artificial Sequence: Synthetic polynucleotide
atggctgccgatggttatcttccagattggctcgaggacaaccttagtgaaggaattcgcgagtggtgggctttgaaacctggagcccctcaacccaaggcaaatcaacaacatcaagacaacgctcgaggtcttgtgcttccgggttacaaataccttggacccggcaacggactcgacaagggggagccggtcaacgcagcagacgcggcggccctcgagcacgacaaggcctacgaccagcagctcaaggccggagacaacccgtacctcaagtgcaaccacgccgacgccgagttccaggagcggctcaaagaagatacgtcttttgggggcaacctcgggcgagcagtcttccaggccaaaaagaggcttcttgaacctcttggtctggttgaggaagcggctaagacggctcctggaaagaagaggcctgtagagcagtctcctcaggaaccggactcctccgcgggtattggcaaatcgggtgcacagcccgctaaaaagagactcaatttcggtcagactggcgacacagagtcagtcccagaccctcaaccaatcggagaacctcccgcagcccccccaggtgtgggatctcttacaatggcttcaggtggtggcgcaccagtggcggacaataacgaaggtgccgatggagtgggtagttcctcgggaaattggcattgcgattcccaatggctgggggacagagtcatcaccaccagcacccgaacctgggccctgcccacctacaacaatcacctctacaagcaaatctccaacagcacatctggaggatcttcaaatgacaacgcctacctcggctacagcaccccctgggggtattttgacttcaacagattccactgccacttctcaccacgtgactggcagcgactcatcaacaacaactggggattccggcctaagcgactcaacttcaagctcttcaacattcaggtcaaagaggttacggacaacaatggagtcaagaccatcgccaataaccttaccagcacggtccaggtcttcacggactcagactatcagctcccgtacgtgctcgggtcggctcacgagggctgcctcccgccgttcccagcggacgttttcatgattcctcagtacgggtatctgacgcttaatgatggaagccaggccgtgggtcgttcgtccttttactgcctggaatatttcccgtcgcaaatgctaagaacgggtaacaacttccagttcagctacgagtttgagaacgtacctttccatagcagctacgctcacagccaaagcctggaccgactaatgaatccactcatcgaccaatacttgtactatctctcaaagactattagcggttctggacagaatcaacaaacgctaaaattcagtgtggccggacccagcaacatggctgtccagggaagaaactacatacctggacccagctaccgacaacaacgtgtctcaaccactgtgactcaaaacaacagcagcgaatttgcttggcctggagcttcttcttgggctctcaatggacgtaatagcttgatgaatcctggacctgctatggccagccacaaagaaggagaggaccgtttctttcctttgtctggatctttaatttttggcaaacaaggaactggaagagacaacgtggatgcggacaaagtcatgataaccaacgaagaagaaattaaaactactaacccggtagcaacggagtcctatggacaagtggccacaaaccaccagagtgcccaagcacaggcgcagaccggctgggttcaaaaccaaggaatactttcgggtatggtttggcaggacagagatgtgtacctgcaaggacccatttgggccaaaattcctcacacggacggcaactttcacccttctccgctgatgggagggtttggaatgaagcacccgcctcctcagatcctcatcaaaaacacacctgtacctgcggatcctccaacggccttcaacaaggacaagctgaactctttcatcacccagtattctactggccaagtcagcgtggagatcgagtgggagctgcagaaggaaaacagcaagcgctggaacccggagatccagtacacttccaactattacaagtctaataatgttgaatttgctgttaatactgaaggtgtatatagtgaaccccgccccattggcaccagatacctgactcgtaatctg

SEQ ID NO: 633 - DNA, 2208 bp, Artificial Sequence
  Description of Artificial Sequence: Synthetic polynucleotide
atggctgccgatggttatcttccagattggctcgaggacaaccttagtgaaggaattcgcgagtggtgggctttgaaacctggagcccctcaacccaaggcaaatcaacaacatcaagacaacgctcgaggtcttgtgcttccgggttacaaataccttggacccggcaacggactcgacaagggggagccggtcaacgcagcagacgcggcggccctcgagcacgacaaggcctacgaccagcagctcaaggccggagacaacccgtacctcaagtgcaaccacgccgacgccgagttccaggagcggctcaaagaagatacgtcttttgggggcaacctcgggcgagcagtcttccaggccaaaaagaggcttcttgaacctcttggtctggttgaggaagcggctaagacggctcctggaaagaagaggcctgtagagcagtctcctcaggaaccggactcctccgcgggtattggcaaatcgggtgcacagcccgctaaaaagagactcaatttcggtcagactggcgacacagagtcagtcccagaccctcaaccaatcggagaacctcccgcagccccctcaggtgtgggatctcttacaatggcttcaggtggtggcgcaccagtggcagacaataacgaaggtgccgatggagtgggtagttcctcgggaaattggcattgcgattcccaatggctgggggacagagtcatcaccaccagcacccgaacctgggccctgcccacctacaacaatcacctctacaagcaaatctccaacagcacatctggaggatcttcaaatgacaacgcctacctcggctacagcaccccctgggggtattttgacttcaacagattccactgccacttctcaccacgtgactggcagcgactcatcaacaacaactggggattccggcctaagcgactcaacttcaagctcttcaacattcaggtcaaagaggttacggacaacaatggagtcaagaccatcgccaataaccttaccagcacggtccaggtcttcacggactcagactatcagctcccgtacgtgctcgggtcggctcacgagggctgcctcccgccgttcccagcggacgttttcatgattcctcagtacgggtatctgacgcttaatgatggaagccaggccgtgggtcgttcgtccttttactgcctggaatatttcccgtcgcaaatgctaagaacgggtaacaacttccagttcagctacgagtttgagaacgtacctttccatagcagctacgctcacagccaaagcctggaccgactaatgaatccactcatcgaccaatacttgtactatctctcaaagactattaacggttctggacagaatcaacaaacgctaaaattcagtgtggccggacccagcaacatggctgtccagggaagaaactacatacctggacccagctaccgacaacaacgtgtctcaaccactgtgactcaaaacaacaacagcgaatttgcttggcctggagcttcttcttgggctctcaatggacgtaatagcttgatgaatcctggacctgctatggccagccacaaagaaggagaggaccgtttctttcctttgtctggatctttaatttttggcaaacaaggaactggaagagacaacgtggatgcggacaaagtcatgataaccaacgaagaagaaattaaaactactaacccggtagcaacggagtcctatggacaagtggccacaaaccaccagagtgcccaagcacaggcgcagaccggctgggttcaaaaccaaggaatacttccgggtatggtttggcaggacagagatgtgtacctgcaaggacccatttgggccaaaattcctcacacggacggcaactttcacccttctccgctgatgggagggtttggaatgaagcacccgcctcctcagatcctcatcaaaaacacacctgtacctgcggatcctccaacggccttcaacaaggacaagctgaactctttcatcacccagtattctactggccaagtcagcgtggagatcgagtgggagctgcagaaggaaaacagcaagcgctggaacccggagatccagtacacttccaactattacaagtctaataatgttgaatttgctgttaatactgaaggtgtatatagtgaaccccgccccattggcaccagatacctgactcgtaatctg

SEQ ID NO: 634 - DNA, 2208 bp, Artificial Sequence; identical to SEQ ID NO: 633
  Description of Artificial Sequence: Synthetic polynucleotide

SEQ ID NO: 635 - DNA, 2208 bp, Artificial Sequence
  Description of Artificial Sequence: Synthetic polynucleotide
atggctgccgatggttatcttccagattggctcgaggacaaccttagtgaaggaattcgcgagtggtgggctttgaaacctggagcccctcaacccaaggcaaatcaacaacatcaagacaacgctcgaggtcttgtgcttccgggttacaaataccttggacccggcaacggactcgacaagggggagccggtcaacgcagcagacgcggcggccctcgagcacgacaaggcctacgaccagcagctcaaggccggagacaacccgtacctcaagtgcaaccacgccgacgccgagttccaggagcggctcaaagaagatacgtcttttgggggcaacctcgggcgagcagtcttccaggccaaaaagaggcttcttgaacctcttggtctggttgaggaagcggctaagacggctcctggaaagaagaggcctgtagagcagtctcctcaggaaccggactcctccgcgggtattggcaaatcgggtgcacagcccgctaaaaagagactcaatttcggtcagactggcgacacagagtcagtcccagaccctcaaccaatcggagaacctcccgcagccccctcaggtgtgggatctcttacaatggcttcaggtggtggcgcaccagtggcagacaataacgaaggtgccgatggagtgggtagttcctcgggaaattggcattgcgattcccaatggctgggggacagagtcatcaccaccagcacccgaacctgggccctgcccacctacaacaatcacctctacaagcaaatctccaacagcacatctggaggatcttcaaatgacaacgcctacctcgactacagcaccccctgggggtattttgacttcaacagattccactgccacttctcaccacgtgactggcagcggctcatcaacaacaactggggattccggcctaagcgactcaacttcaagctcttcaacattcaggtcaaagaggttacggacaacaatggagtcaagaccatcgccaataaccttaccagcacggtccaggtcttcacggactcagactatcagctcccgtacgtgctcgggtcggctcacgagggctgcctcccgccgttcccagcggacgttttcatgattcctcagtacgggtatctgacgcttaatgatggaagccaggccgtgggtcgttcgtccttttactgcctggaatatttcccgtcgcaaatgctaagaacgggtaacaacttccagttcagctacgagtttgagaacgtacctttccatagcagctacgctcacagccaaagcctggaccgactaatgaatccactcatcgaccaatacttgtactatctctcaaagactattaacggttctggacagaatcaacaaacgctaaaattcagtgtggccggacccagcaacatggctgtccagggaagaaactacatacctggacccagctaccgacaacaacgtgtctcaaccactgtgactcaaaacaacaacagcgaatttgcttggcctggagcttcttcttgggctctcaatggacgtaatagcttgatgaatcctggacctgctatggccagccacaaagaaggagaggaccgtttctttcctttgtctggatctttaatttttggcaaacaaggaactggaagagacaacgtggatgcggacaaagtcatgataaccaacgaagaagaaattaaaactactaacccggtagcaacggagtcctatggacaagtggccacaaaccaccagagtgcccaagcacaggcgcagaccggctgggttcaaaaccaaggaatacttccgggtatggtttggcagggcagagatgtgtacctgcaaggacccatttgggccaaaattcctcacacggacggcaactttcacccttctccgctgatgggagggtttggaatgaagcacccgcctcctcagatcctcatcaaaaacacacctgtacctgcggatcctccaacggccttcaacaaggacaagctgaactctttcatcacccagtattctactggccaagtcagcgtggagatcgagtgggagctgcagaaggaaaacagcaagcgctggaacccggagatccagtacacttccaactattacaagtctaataatgttgaatttgctgttaatactgaaggtgtatatagtgaaccccgccccattggcaccagatacctgactcgtaatctg

SEQ ID NO: 636 - DNA, 2208 bp, Artificial Sequence; identical to SEQ ID NO: 633
  Description of Artificial Sequence: Synthetic polynucleotide

SEQ ID NO: 637 - DNA, 2208 bp, Artificial Sequence
  Description of Artificial Sequence: Synthetic polynucleotide
atggctgccgatggttatcctccagattggctcgaggacaaccttagtgaaggaattcgcgagtggtgggctttgaaacctggagcccctcaacccaaggcaaatcaacaacatcaagacaacgctcgaggtcttgtgcttccgggttacaaataccttggacccggcaacggactcgacaagggggagccggtcaacgcagcagacgcggcggccctcgagcacgacaaggcctacgaccagcagctcaaggccggggacaacccgcacctcaagtacaaccacgccgacgccgagttccaggagcggctcaaagaagatacgtcttttgggggcaacctcgggcgagcagtcttccaggccaaaaagaggcttcttgaacctcttggtctggttgaggaagcggctaagacggctcctggaaagaagaggcccgtagagcagtctcctcaggaaccggactcctccgcgggtattggcaaatcgggtgcacagcccgctaagaagagactcaatttcggtcagactggcgacactgagtcagtcccagaccctcaaccaatcggagaacctcccgcagccccctcaggtgtgggatctcttacaatggcttcaggtggtggcgcaccagtggcagacaataacgaaggtgccgatggagtgggtagttcctcgggaaattggcattgcgattcccaatggctgggggacagagtcatcaccaccagcacccgaacctgggccctgcccacctacaacaatcacctctacaagcaaatctccaacagcacatctggaggatcttcaaatgacaacgcctacttcggctacagcaccccctgggggtattttgacttcaacagattccactgccacttctcaccacgtgactggcagcgactcatcaacaacaactggggattccggcctaagcgactcaacttcaagctcttcaacattcaggtcaaagaggttacggacaacaatggagtcaagaccatcgccaataaccttaccagcacggtccaggtcttcacggactcagactatcagctcccgtacgtgctcgggtcggctcacgagggctgcctcccgccgttcccagcggacgttttcatgattcctcagtacgggtatctgacgcttaatgatggaagccaggccgtgggtcgttcgtccttttactgcctggaatatttcccgtcgcaaatgctaagaacgggtaacaacttccagttcagctacgagtttgagaacgtacctttccatagcagctacgctcacagccaaagcctggaccgactaatgaatccactcatcgaccaatacttgtactatctctcaaagactattaacggttctggacagaatcaacaaacgctaaaattcagtgtggccggacccagcaacatggctgtccagggaagaaactacatacctggacccagctaccgacaacaacgtgtctcaaccactgtgactcaaaacaacaacagcgaatttgcttggcctggagcttcttcttgggctctcaatggacgtaatagcttgatgaatcctggacctgctatggccagccacaaagaaggagaggaccgtttctttcctttgtctggatctttaatttttggcaaacaaggaactggaagagacaacgtggatgcggacaaagtcatgataaccaacgaagaagaaattaaaactactaacccggtagcaacggagtcctatggacaagtggccacaaaccaccagagtgcccaagcacaggcgcagaccggctgggttcaaaaccaaggaatacttccgggtatggtttggcaggacagagatgtgtacctgcaaggacccatttgggccaaaattcctcacacggacggcaactttcacccttctccgctgatgggagggtttggagtgaagcacccgcctcctcagatcctcatcaaaaacacacctgtacctgcggatcctccaacggccttcaacaaggacaggctgaactctttcatcacccagtattctactggccaagtcagcgtggagatcgagtgggagctgcagaaggaaaacagcaagcgctggaacccggagatccagtacacttccaactattacaagtctaataatgttgaatttgctgttaatactgaaggtgtatatagtgaaccccgccccattggcaccagatacctgactcgtaatctg

SEQ ID NO: 638 - DNA, 2208 bp, Artificial Sequence
  Description of Artificial Sequence: Synthetic polynucleotide
atggctgccgatggttatcttccagattggctcgaggacaaccttagtgaaggaattcgcgagtggtgggctttgaaacctggagcccctcaacccaaggcaaatcaacaacatcaagacaacgctcgaggtcttgtgcttccgggttacaaataccttggacccggcaacggactcgacaagggggagccggtcaacgcagcagacgcggcggccctcgagcacgacaaggcctacgaccagcagctcaaggccggagacaacccgtacctcaagtacaaccacgccgacgccgagttccaggagcggctcaaagaagatacgtcttttgggggcaacctcgggcgagcagtcttccaggccaaaaagaggcttcttgaacctcttggtctggttgaggaagcggctaagacggctcctggaaagaagaggcctgtagagcagtctcctcaggaaccggactcctccgcgggtattggcaaatcgggtgcacagcccgctaaaaagagactcaatttcggtcagactggcgacacagagtcagtcccagaccctcaaccaatcggagaacctcccgcagccccctcaggtgtgggatctcttacaatggcttcaggtggtggcgcaccagtggcggacaataacgaaggtgccgatggagtgggtagttcctcgggaaattggcattgcgattcccaatggctgggggacagagtcatcaccaccagcacccgaacctgggccctgcccacctacaacaatcacctctacaagcaaatctccaacagcacatctggaggatcttcaaatgacaacgcctacttcggctacagcaccccctgggggtattttgacttcaacagattccactgccacttctcaccacgtgactggcagcgactcatcaacaacaactggggattccggcctaagcgactcaacttcaagctcttcaacattcaggtcaaagaggttacggacaacaatggagtcaagaccatcgccaataaccttaccagcacggtccaggtcttcacggactcagactatcagctcccgtacgtgctcgggtcggctcacgagggctgcctcccgccgttcccagcggacgttttcatgattcctcagtacgggtatctgacgcttaatgatggaagccaggccgtgggtcgttcgtccttttactgcctggaatatttcccgtcgcaaatgctaagaacgggtaacaacttccagttcagctacgagtttgagaacgtacctttccatagcagctacgctcacagccaaagcctggaccgactaatgaatccactcatcgaccaatacttgtactatctctcaaagactattaacggttctggacagaatcaacaaacgctaaaattcagtgtggccggacccagcaacatggctgtccagggaagaaactacatacctggacccagctaccgacaacaacgtgtctcaaccactgtgactcaaaacaacaacagcgaatttgcttggcctggagcttcttcttgggctctcaatggacgtaatagtttgatgaatcctggacctgctatggccagccacaaagaaggagaggaccgtttctttcctttgtctggatctttaatttttggcaaacaaggaactggaagagacaacgtggatgcggacaaagtcatgataaccaacgaagaagaaattaaaactactaacccggtagcaacggagtcctatggacaagtggccacaaaccaccagagtgcccaagcacaggcgcagaccggctgggttcaaaaccaaggaatacttccgggtatggtttggcaggacagagatgtgtacctgcaaggacccatttgggccaaaattcctcacacggacggcaactttcacccttctccgctgatgggagggtttggagtgaagcacccgcctcctcagatcctcatcaaaaacacacctgtacctgcggatcctccaacggccttcaacaaggacaagctgaactctttcatcacccagtattctactggccaagtcagcgtggagatcgagtgggagctgcagaaggaaaacagcaagcgctggaacccggagatccagtacacttccaactattacaagtctaataatgttgaatttgctgttaatactgaaggtgtatatagtgaaccccgccccattggcaccagatacctgactcgtaatctg

SEQ ID NO: 639 - DNA, 2208 bp, Artificial Sequence
  Description of Artificial Sequence: Synthetic polynucleotide
atggctgccgatggttatcttccagattggctcgaggacaaccttagtgaaggaattcgcgagtggtgggctttgaaacctggagcccctcaacccaaggcaaatcaacaacatcaagacaacgctcgaggtcttgtgcttccgggttacaaataccttggacccggcaacggactcgacaagggggagccggtcaacgcagcagacgcggcggccctcgagcacgacaaggcctacgaccagcagctcaaggccggagacaacccgtacctcaagtacaaccacgccgacgccgagttccaggagcggctcaaagaagatacgtcttttgggggcaacctcgggcgagcagtcttccaggccaaaaagaggcttcttgaacctcttggtctggttgaggaagcggctaagacggctcctggaaagaagaggcctgtagagcagtctcctcaggaaccggactcctccgcgggtattggcaaatcgggtgcacagcccgctaaaaagagactcaatttcggtcagactggcgacacagagtcagtcccagaccctcaaccaatcggagaacctcccgcagccccctcaggtgtgggatctcttacaatggcttcaggtggtggcgcaccagtggcagacaataacgaaggtgccgatggagtgggtagttcctcgggaaattggcattgcgattcccaatggctgggggacagagtcatcaccaccagcacccgaacctgggccctgcccacttacaacaatcacctctacaagcaaatctccaacagcacatctggaggatcttcaaatgacaacgcctacttcggctacagcaccccctgggggtattttgacttcaacagattccactgccacttctcaccacgtgactggcagcgactcaccaacaacaactggggattccggcctaagcgactcaacttcaagctcttcaacattcaggtcaaagaggttacggacaacaatggagtcaagaccatcgccaataaccttaccagcacggtccaggtcttcacggactcagactatcagctcccgtacgtgctcgggtcggctcacgagggctgcctcccgccgttcccagcggacgttttcatgattcctcagtacgggtatctgacgcttaatgatggaagccaggccgtgggtcgttcgtccttttactgcctggaatatatcccgtcgcaaatgctaagaacgggtaacaacttccagttcagctacgagtttgagaacgtacctttccatagcagctacgctcacagccaaagcctggaccgactaatgaatccactcatcgaccaatacttgtactatctctcaaagactattaacggttctggacagaatcaacaaacgctaaaattcagtgtggccggacccagcaacatggctgtccagggaagaaactacatacctggacccagctaccgacaacaacgtgtctcaaccactgtgactcaaaacaacaacagcgaatttgcttggcctggagcttcttcttgggctctcaatggacgtaatagcttgatgaatcctggacctgctatggccagccacaaagaaggagaggaccgtttctttcctttgtctggatctttaatttttggcaaacaaggaactggaagagacaacgtggatgcggacaaagtcatgataaccaacgaagaagaaattaaaactactaacccggtagcaacggagtcctatggacaagtggccacaaaccaccagagtgcccaagcacaggcgcagaccggctgggttcaaaaccaaggaatacttccgggtatggtttggcaggacagagatgtgtacctgcaaggacccatttgggccaaaattcctcacacggacggcaactttcacccttctccgctgatgggagggtttggagtgaagcacccgcctcctcagatcctcatcaaaaacacacctgtacctgcggatcctccaacggccttcaacaaggacaagctgaactctttcatcacccagtattctactggccaagtcagcgtggagatcgagtgggagctgcagaaggaaaacagcaagcgctggaacccggagatccagtacacttccaactattacaagtctaataatgttgaatttgctgttaatactgaaggtgtatatagtgaaccccgccccattggcaccagatacctgactcgtaatctg

SEQ ID NO: 640 - DNA, 2208 bp, Artificial Sequence
  Description of Artificial Sequence: Synthetic polynucleotide
atggctgccgatggttatcttccagattggctcgaggacaaccttagtgaaggaattcgcgagtggtgggctttgaaacctggagcccctcaacccaaggcaaatcaacaacatcaagacaacgctcgaggtcttgtgcttccgggttacaaataccttggacccggcaacggactcgacaagggggagccggtcaacgcagcagacgcggcggccctcgagcacgacaaggcctacgaccagcagctcaaggccggagacaacccgtacctcaagtacaaccacgccgacgccgagttccaggagcggctcaaagaagatacgtcttttgggggcaacctcgggcgagcagtcttccaggccaaaaagaggcttcttgaacctcttggtctggttgaggaagcggctaagacggctcctggaaagaagaggcctgtagagcagtctcctcaggaaccggactcctccgcgggtattggcaaatcgggtgcacagcccgctaaaaagagactcaatttcggtcagactggcgacacagagtcagtcccagaccctcaaccaatcggagaacctcccgcagccccctcaggtgtgggatctcttacaatggcttcaggtggtggcgcaccagtggcagacaataacgaaggtgccgatggagtgggtagttcctcgggaaattggcattgcgattcccaatggctgggggacagagtcatcaccaccagcacccgaacctgggccctgcccacctacaacaatcacctctacaagcaaatctccaacagcacatctggaggatcttcaaatgacaacgcctacttcggctacagcaccccctgggggtattttgacttcaacagattccactgccacttctcaccacgtgactggcagcgactcatcaacaacaactggggattccggcctaagcgactcaacttcaagctcttcaacattcaggtcaaagaggttacggacaacaatggagtcaagaccatcgccaataaccttaccagcacggtccaggtcttcacggactcagactatcagctcccgtacgtgctcgggtcggctcacgagggctgcctcccgccgttcccagcggacgttttcatgattcctcagtacgggtatctgacgcttaatgatggaagccaggccgtgggtcgttcgtccttttactgcctggaatatttcccgtcgcaaatgctaagaacgggtaacaacttccagtttagctacgagtttgagaacgtacctttccatagcagctacgctcacagccaaagcctggaccgactaatgaatccactcatcgaccaatacttgtactatctctcaaagactattaacggttctggacagaatcaacaaacgctaaaattcagtgtggccggacccagcaacatggctgtccagggaagaaactacatacctggacccagctaccgacaacaacgtgtctcaaccactgtgactcaaaacaacaacagcgaatttgcttggcctggagcttcttcttgggctctcaatggacgtaatagcttgatgaatcctggacctgctatggccagccacaaagaaggagaggaccgtttctttcctttgtctggatctttaatttctggcaaacaaggaactggaagagacaacgtggatgcgaacaaagtcatgataaccaacgaagaagaaattaaaactactaacccggtagcaacggagtcctatggacaagtggccacaaaccaccagagtgcccaagcacaggcgcagaccggctgggttcaaaaccaaggaatacttccgggtatggtttggcaggacagagatgtgtacctgcaaggacccatttgggccaaaattcctcacacggacggcaactttcacccttctccgctgatgggagggtttgaaatgaagcacccgcctcctcagatcctcatcaaaaacacacctgtacctgcggatcctccaacggccttcaacaaggacaagctgaactctttcatcacccagtattctactggccaagtcagcgtggagatcgagtgggagctgcagaaggaaaacagcaagcgctggaacccggagatccagtacacttccaactattacaagtctaataatgttgaatttgctgttaatactgaaggtgtatatagtgaaccccgccccattggcaccagatacctgactcgtaatctg

SEQ ID NO: 641 - DNA, 2208 bp, Artificial Sequence
  Description of Artificial Sequence: Synthetic polynucleotide
atggctgccgatggttatcttccagattggctcgaggacaaccttagtgaaggaattcgcgagtggtgggctttgaaacctggagcccctcaacccaaggcaaatcaacaacatcaagacaacgctcgaggtcttgtgcttccgggttacaaataccttggacccggcaacggactcgacaagggggagccggtcaacgcagcagacgcggcggccctcgagcacgacaaggcctacgaccagcagctcaaggccggagacaacccgtacctcaagtacaaccacgccgacgccgagttccaggagcggctcaaagaagatacgtcttttgggggcaacctcgggcgagcagtcttccaggccaaaaagaggcttcttgaacctcttggtctggttgaggaagcggctaagacggctcctggaaagaagaggcctgtagagcagtctcctcaggaaccggactcctccgcgggtattggcaaatcgggtgcacagcccgctaaaaagagactcaatttcggtcagactggcgacacagagtcagtcccagaccctcaaccaatcggagaacctcccgcagccccctcaggtgtgggatctcttacaatagcttcaggtggtggcgcaccagtggcagacaataacgaaggtgccgatggagtgggtagttcctcgggaaattggcattgcgattcccaatggctgggggacagagtcatcaccaccagcacccgaacctgggccctgcccacctacaacaatcacctctacaagcgaatctccaacagcacatctggaggatcttcaaatgacaacgcctacttcggctacagcaccccctgggggtattttgacttcaacagattccactgccacttctcaccacgtgactggcagcgactcatcaacaacaactggggattccggcctaagcgactcaacttcaagcttttcaacattcgggtcaaagaggttacggacaacaatggagtcaagaccatcaccaataaccttaccagcacggtccaggtcttcacggactcagactatcagctcccgtacgtgcttgggtcggctcacgagggctgcctcccgccgttcccagcggacgttttcatgattcctcagtacgggtatctgacgcttaatgatggaagccaggccgtgggtcgttcgtccttttactgcctggaatatttcccgtcgcaaatgctaagaacgggtaacaacttccagttcagctacgagtttgagaacgtacctttccatagcagctacgctcacagccaaagcctggaccgactaatgaatccactcatcgaccaatacttgtactatctctcaaagactattaacggttctggacagaatcaacaaacgctaaaattcagtgtggccggacccagcaacatggctgtccagggaagaaactacatacctggacccagctaccgacaacaacgtgtctcaaccactgtgactcgaaacaacaacagcgaatttgcttggcctggagcttcttcttgggctctcaatggacgtaatagcttgatgaatcctggacctgctatggccagccacaaagaaggagaggaccgtttctttcctttgtctggatctttaatttttggcaaacaaggaactggaagagacaacgtggatgcggacaaagtcatgataaccaacgaagaagaaattaaaactactaacccggtagcaacggagtcctatggacaagtggccacaaaccaccagagtgcccaagcacaggcgcagaccggctgggttcaaaaccaaggaatacttccgggtatggtttggcaggacagagatgtgtacctgcaaggacccatttgggccaaaattcctcacacggacggcaactttcacccttctccgctgatgggagggtttggagtgaagcacccgcctcctcagatcctcatcaaaaacacacctgtacctgcggatcctccaacggccttcaacaaggacaagctgaactctttcatcacccagtattctactggccaagtcagcgtggagatcgagtgggagctgcagaaggaaaacagcaagcgctggaacccggagatccagtacacttccaactattacaagtctaataatgttgaatttgctgttaatactgaaggtgtatatagtgaaccccgccccattggcaccagatacctgactcgtaatctg

SEQ ID NO: 642 - DNA, 2208 bp, Artificial Sequence
  Description of Artificial Sequence: Synthetic polynucleotide
atggctgccgatggttatcttccagattggctcgaggacaaccttagtgaaggaattcgcgagtggtgggctttgaaacctggagcccctcaacccaaggcaaatcaacaacatcaagacaacgctcgaggtcttgtgcttccgggttacaaataccttggacccggcaacggactcgacaagggggagccggtcaacgcagcagacgcggcggccctcgagcacgacaaggcctacgaccagcagctcaaggccggagacaacccgtacctcaagtacaaccacgccgacgccgagttccaggagcggctcaaagaagatacgtcttttgggggcaacctcgggcgagcagtcttccaggccaaaaagaggcttcttgaacctcttggtctggttgaggaagcggctaagacggctcctggaaagaagaggcctgtagagcagtctcctcaggaaccggactcctccgcgggtattggcaaatcgggcgcacagcccgctaaaaagagactcaatttcggtcagactggcgacacagagccagtcccagaccctcaaccaatcggagaacctcccgcagccccctcaggtgtgggatctcttacaatggcttcaggtggtggcgcaccagtggcagacaataacgaaggtgccgatggagtgggtagttcctcgggaaattggcattgcgattcccaatggctgggggacagagtcatcaccaccagcacccgaacctgggccctgcccacctacaacaatcacctctacaagcaaatctccaacagcacatctggaggatcttcaaatgacaacgcctacttcggctacagcaccccctgggggtattttgacttcaacagattccactgccacttctcaccacgtgactggcagcgactcatcaacaacaactggggattccggcctaagcgactcaacttcaagctcttcaacattcaggtcaaagaggttacggacaacaatggagtcaagaccatcgccaataaccttaccagcacggtccaggtcttcacggactcagactatcagctcccgtacgtgctcgggtcggctcacgagggctgcctcccgccgttcccagcgggcgttttcatgattcctcagtacgggtatctgacgcttaatgatggaagccaggccgtgggtcgttcgtccttttactgcctggaatatttcccgtcgcaaatgctaagaacgggtaacaacttccagttcagctacgagtttgagaacgtacctttccatagcagctacgctcacagccaaagcctggaccgactaatgaatccactcatcgaccaatacttgtactatctctcaaagactattaacggttctggacagaatcaacaaacgctaaaattcagtgtggccggacccagcaacatggctgtccagggaagaaactacatacctggacccagctaccgacaacaacgtgtctcaaccactgcgactcaaaacaacaacagcgaatttgcttggcctggagcttcttcttgggctctcaatggacgtaatagcttgatgaatcctggacctgctatggccagccacaaagaaggagaggaccgtttctttcctttgtctggatctttaatttttggcaaacaaggaactggaagagacaacgtggatgcggacaaagtcatgataaccaacgaagaagaaattaaaactactaacccggtagcaacggagtcctatggacaagtggccacaaaccaccagagtgcccaagcacaggcgcagaccggctgggttcaaaaccaaggaatacttccgggtatggtttggcaggacagagatgtgtacctgcaaggacccatttgggccaaaattcctcacacggacggcaactttcacccttctccgctgatgggagggtttggaatgaagcacccgcctcctcagatcctcatcaaaaacacacctgtacctgcggatcctccaacggccttcaacaaggacaagctgaactctttcatcacccagtattctactggccaagtcagcgtggagatcgagtgggagctgcagaaggaaaacagcaagcgctggaacccggagatccagtacacttccaactattacaagtctaataatgttgaatttgctgttaatactgaaggtgtatatagtgaaccccgccccattggcaccagatacctgactcgtaatctg

SEQ ID NO: 643 - DNA, 2208 bp, Artificial Sequence
  Description of Artificial Sequence: Synthetic polynucleotide
atggctgccgatggttatcttccagattggctcgaggacaaccttagtgaaggaattcgcgagtggtgggctttgaaacctggagcccctcaacccaaggcaaatcaacaacatcaagacaacgctcgaggtcttgtgcttccgggttacaaataccttggacccggcaacggactcgacaagggggagccggtcaacgcagcagacgcggcggccctcgagcacgacaaggcctacgaccagcagctcaaggccggagacaacccgtacctcaagtacaaccacgccgacgccgggttccaggagcggctcaaagaagatacgtcttttgggggcaacctcgggcgagcagtcttccaggccaaaaagaggcttcttgaacctcttggtctggttgaggaagcggctaagacggctcctggaaagaagaggcctgtagagcagtctcctcaggaaccggactcctccgcgggtattggcaaatcgggtgcacagcccgctaaaaagagactcaatttcggtcagactggcgacacagagtcagtcccagtccctcaaccaatcggagaacctcccgcagccccctcaggtgtgggatctcttacaatggcttcaggtggtggcgcaccagtggcagacaataacgaaggtgccgatggagtgggtagttcctcgggaaattggcattgcgattcccaatggctgggggacagagtcatcaccaccagcacccgaacctgggccctgcccacctacaacaatcacctctacaagcaaatctccaacagcacatctggaggatcttcaaatgacaacgcctacttcggctacagcaccccctgggggtattttgacttcaacagattccactgccacttctcaccacgtgactggcagcgactcatcaacaacaactggggattccggcctaagcgactcaacttcaagctcttcaacattcaggtcaaagaggttacggacaacaatggagtcaagaccatcgccaataaccttaccagcacggtccaggtcttcacggactcagactatcagctcccgtacgtgctcgggtcggctcacgagggctgcctcccgccgttcccagcggacgttttcatgattcctcagtacgggtatctgacgcttaatgatggaagccaggccgtgggtcgttcgtccttttactgcctggaatatttcccgtcgcaaatgctaagaacgggtaacaacttccagttcagctacgagtttgagaacgtacctttccatagcagctacgctcacagccaaagcctggaccgactaatgaatccactcatcgaccaatacttgtactatctctcaaagactattaacggttctggacagaatcaacaaacgctaaaattcagtgtggccggacccagcaacatggctgtccagggaagaaactacatacctggacccagctaccgacaacaacgtgtctcaaccactgtgactcaaaacaacaacagcgaatttgcttggcctggagcttcttcttgggctctcaatggacgtaatagcttgatgaatcctggacctgctatggccagccacaaagaaggagaggaccgtttctttcctttgtctggatctttaatttttggcaaacaaggagctggaagagacaacgtggatgcggacaaagtcatgataaccaacgaagaagaaattaaaactactaacccggtagcaacggagtcctatggacaagtggccacaaaccaccagagtgcccaagcacaggcgcagaccggctgggttcaaaaccaaggaatacttccgggtatggtttggcaggacagagatgtgtacctgcaaggacccatttgggccaaaattcctcacacggacggcaactttcacccttctccgctgatgggagggtttggaatgaagcacccgcctcctcagatcctcatcaaaaacacacctgtacctgcggatcctccaacggccttcaacaaggacaagctgaactctttcatcacccagtattctactggccaagtcagcgtggagatcgagtgggagctgcagaaggaaaacagcaagcgctggaacccggagatccagtacacttccaactattacaagtctaataatgttgaatttgctgttaatactgaaggtgtatatagtgaaccccgccccattggcaccagatacctgactcgtaatctg

SEQ ID NO: 644 - DNA, 2208 bp, Artificial Sequence
  Description of Artificial Sequence: Synthetic polynucleotide
  misc_feature (377)..(377): n is a, c, t, or g
atggctgccgatggttatcttccagattggctcgaggacaaccttagtgaaggaattcgcgagaggtgggctttgaaacctggagcccctcaacccaaggcaaatcaacaacatcaagacaacgctcgaggtcttgtgcttccgggttacaaataccttggacccggcaacggactcgacaagggggagccggtcaacgcagcagacgcggcggccctcgagcacgacaaggcctacgaccagcagctcaaggccggagacaacccgtacctcaagtacaaccacgccgacgccgagttccaggagcggctcaaagaagatacgtcttttgggggcaacctcgggcgagcagtcttccaggccaaaaagaggcttcntgaacctcttggtctggttgaggaagcggctaagacggctcctggaaagaagaggcctgtagagcagtctcctcaggaaccggactcctccgcgggtattggcaaatcgggtgcacagcccgctaaaaagagactcaatttcggtcagactggcgacacagagtcagtcccagaccctcaaccaatcggagaacctcccgcagccccctcaggtgtgggatctcttacaatggcttcaggtggtggcgcaccagtggcagacaataacgaaggtgccgatggagtgggtagttcctcggggaattggcattgcgattcccaatggctgggggacagagtcatcaccaccagcacccgaacctgggccctgcccacctacaacaatcacctctacaagcaaatctccaacagcacatctggaggatcttcaaatgacaacgcctacttcggctacagcaccccctgggggtattttgacttcaacagattccactgccacttctcaccacgtgactggcagcgactcatcaacaacaactggggattccggcctaagcgactcaacttcaagctcttcaacattcaggtcaaagaggttacggacaacaatggagtcaagaccatcgccaataaccttaccagcacggtccaggtcttcacggactcagactatcagctcccgtacgtgctcgggtcggctcacgagggctgcctcccgccgttcccagcggacgttttcatgattcctcagtacgggtatctgacgcttaatgatggaagccaggccgtgggtcgttcgtccttttactgcctggaatatttcccgtcgcaaatgctaagaacgggtaacaacttccagttcagctacgagtttgagaacgtacctttccatagcagctacgctcacagccaaagcccggaccgactaatgaatccactcatcgaccaatacttgtactatctctcaaagactattaacggttctggacagaatcaacaaacgctaaaattcagtgtggccggacccagcaacatggctgtccagggaagaaactacatacctggacccagctaccgacaacaacgtgtctcaaccactgtgactcaaaacaacaacagcgaatttgcttggcctggagcttcttcttgggctctcaatggacgtaatagcttgatgaatcctggacctgctatggccagccacaaagaaggagaggaccgtttctttcctttgtctggatctttaatttttggcaaacaaggaactggaagagacaacgtggatgcggacaaagtcatgataaccaacgaagaagaaattaaaactactaacccggtagcaacggagtcctatggacaagtggccacaaaccaccagagtgcccaagcacaggcgcagaccggctgggttcaaaaccaaggaatacttccgggtatggtttggcaggacagagatgtgtacctgcaaggacccatttgggccaaaattcctcacacggacggcaactttcacccttctccgctgatgggagggtttggagtgaagcacccgcctcctcagatcctcatcaaaaacacacctgtacctgcggatcctccaacggccttcaacaaggacaagctgaactctttcatcacccagtattctactggccaagtcagcgtggagatcgagtgggagctgcagaaggaaaacagcaagcgctggaacccggagatccagtacacttccaactattacaagtctaataatgttgaatttgctgttaatactgaaggtgtatatagtgaaccccgccccattggcaccagatacctgactcgtaatctg

SEQ ID NO: 645 - DNA, 2208 bp, Artificial Sequence
  Description of Artificial Sequence: Synthetic polynucleotide
atggctgccgatggttatcttccagattggctcgaggacaaccttagtgaaggaattcgcgagtggtgggctttgaaacctggagcccctcaacccaaggcaaatcaacaacatcaagacaacgctcgaggtcttgtgcttccgggttacaaataccttggacccggcaacggactcgacaagggggagccggtcaacgcagcagacgcggcggccctcgagcacgacaaggcctacgaccagcagctcaaggccggagacaacccgtacctcaagtacaaccacgccgacgccgagttccaggagcggctcaaagaagatacgtcttttgggggcaacctcgggcgagcagtcttccaggccaaaaagaggcttcttgaacctcttggtctggttgaggaagcggctaagacggctcctggaaagaagaggcctgtagagcagtctcctcaggaaccggactcctccgcgggtattggcaaatcgggtgcacagcccgctaaaaagagactcaatttcggtcagactggcgacacagagtcagtcccagaccctcaaccaatcggagaacctcccgcagccccctcaggtgtgggatctcttacaatggcttcaggtggtggcgcaccagtggcagacaataacgaaggtgccgatggagtgggtagttcctcgggaaattggcattgcgattcccaatggctgggggacagagtcatcaccaccagcacccgaacctgggccctgcccacctacaacaatcacctctacaagcaaatctccaacagcacatctggaggatcttcaaatgacaacgcctacctcggctacagcaccccctgggggtattttgacttcaacagattccactgccacttctcaccacgtgactggcagcgactcatcaacaacaactggggattccggcctaagcgactcaacttcaagctcttcaacattcaggtcaaagaggttacggacaacaatggagtcaagaccatcgccaataaccttaccagcacggtccaggtcttcacggactcagactatcagctcccgtacgtgctcgggtcggctcacgagggctgcctcccgccgttcccagcggacgttttcatgattcctcagtacgggtatctgacgcttaatgatggaagccaggccgtgggtcgttcgtccttttactgcctggaatatttcccgtcgcaaatgctaagaacgggtaacaacttccagttcagctacgagtttgagaacgtacctttccatagcagctacgctcacagccaaagcctggaccgactaatgaatccactcatcgaccaatacttgtactatctctcaaagactattaacggttctggacagaatcaacaaacgctaaaattcagtgtggccggacccagcaacatggctgtccagggaagaaactacatacctggacccagctaccgacaacaacgtgtctcaaccactgtgactcaaaacaacaacagcgaatttgcttggcctggagcttcttcttgggctctcaatggacgtaatagcttgatgaatcctggacctgctatggccagccacaaagaaggagaggaccgtttctttcctttgtctggatctttaatttttggcaaacaaggaactggaagagacaacgtggatgcggacaaagtcatgataaccaacgaagaagaaattaaaactactaacccggtagcaacggagtcctatggacaagtggccacaaaccaccagagtgcccaagcacaggcgcagaccggctgggttcaaaaccaaggaatacttccgggtatggtttggcaggacagagatgtgtacctgcaaggacccatttgggccaaaattcctcacacggacggcaactttcacccttctccgctgatgggagggtttggaatgaagcacccgcctcctcagatcctcatcaaaaacacacctgtacctgcggatcctccaacggccttcaacaaggacaagctgaactctttcatcacccagtattctactggccaagtcagcgtggagatcgagtgggagctgcagaaggaaaacagcaagcgctggaacccggagatccagtacacttccaactattacaagtctaataatgttgaatttgctgttaatactgaaggtgtatatagtgaaccccgccccattggcaccagatacctgactcgtaatctg

SEQ ID NO: 646 - DNA, 2208 bp, Artificial Sequence
  Description of Artificial Sequence: Synthetic polynucleotide
atggctgccgatggttatcttccagattggctcgaggacaaccttagtgaaggaattcgcgagtggtgggctttgaaacctggagcccctcaacccaaggcaaatcaacaacatcaagacaacgctcgaggtcttgtgcttccgggttacaaataccttggacccggcaacggactcgacaagggggagccggtcaacgcagcagacgcggcggccctcgagcacgacaaggcctacgaccagcagctcaaggccggagacaacccgtacctcaagtacaaccacgccgacgccgagttccaggagcggctcaaagaagatacgtcttttgggggcaacctcgggcgagcagtcttccaggccaaaaagaggcttcttgaacctcttggtctggttgaggaagcggctaagacggctcctggaaagaagaggcctgtagagcagtctcctcaggaaccggactcctccgcgggtattggcaaatcgggtgcacagcccgctaaaaagagactcaatttcggtcagactggcgacacagagtcagtcccagaccctcaaccaatcggagaacctcccgcagccccctcaggtgtgggatctcttacaatggcttcaggtggtggcgcaccagtggcagacaataacgaaggtgccgatggagtgggtagttcctcgggaaattggcattgcgattcccaatggctgggggacagagtcatcaccaccagcacccgaacctgggccctgcccacctacaacaatcacctctacaagcaaatctccaacagcacatctggaggatcttcaaatgacaacgcctacttcggctacagcaccccctgggggtattttgacttcaacagattccactgccacttctcaccacgtgactggcagcgactcatcaacaacaactggggattccggcctaagcgactcaacttcaagctcttcaacattcaggtcaaagaggttacggacaacaatggagtcaagaccatcgccaataaccttaccagcacggtccaggtcttcacggactcagactatcagctcccgtacgtgctcgggtcggctcacgagggctgcctcccgccgttcccagcggacgttttcatgattcctcagtacgggtatctgacgcttaatgatggaagccaggccgtgggtcgttcgtccttttactgcctggaatatttcccgtcgcaaatgctaagaacgggtaacaacttccagttcagctacgagtttgagaacgtacctttccatagcagctacgctcacagccagagcctggaccgactaatgaatccactcatcgaccaatacttgtactatctctcaaagactattaacggttctggacagaatcaacaaacgctaaaattcagtgtggccggacccagcaacatggctgtccagggaagaaactacatacctggacccagctaccgacaacaacgtgtctcaaccactgtgactcaaaacaacaacagcgaatttgcttggcctggagcttcttcttgggctctcaatggacgtaatagcttgatgaatcctggacctgctatggccagccacaaagaaggagaggaccgtttctttcctttgtctggatctttaatttttggcaaacaaggaactggaagagacaacgtggatgcggacaaagtcatgataaccaacgaagaagaaattaaaactactaacccggtagcaacggagtcctatggacaagtggccacaaaccaccagagtgcccaagcacaggcgcagaccggctgggttcaaaaccaaggaatacttccgggtatggtttggcaggacagagatgtgtacctgcaaggacccatttgggccaaaattcctcacacggacggcaactttcacccttctccgctgatgggagggtttggaatgaagcacccgcctcctcagatcctcatcaaaaacacacctgtacctgcggatcctccaacggccttcaacaaggacaagctggactctttcatcacccagtattctactggccaagtcagcgtggagatcgagtgggagctgcagaaggaaaacagcaagcgctggaacccggtgatccagtacacttccaactattacaagtctaataatgttgaatttgctgttaatactgaaggtgtatatagtgaaccccgccccattggcaccagatacctgactcgtaatctg

SEQ ID NO: 647 - DNA, 2208 bp, Artificial Sequence
  Description of Artificial Sequence: Synthetic polynucleotide
atggctgccgatggttatcttccagattggctcgaggacaacctctctgagggcattcgcgagtggtgggacttgaaacctggagccccgaagcccaaagccaaccagcaaaagcaggacgacggccggggtctggtgcttcctggctacaagtacctcggacccttcaacggactcgacaagggggagcccgtcaacgcggcggacgcagcggccctcgagcacgacaaggcctacgaccagcagctcaaagcgggtgacaatccgtacctgcggtataaccacgccgacgccgagtttcaggagcgtctgcaagaagatacgtcttttgggggcaacctcgggcgagcagtcttccaggccaagaagcgggttctcgaacctctcggtctggttgaggaaggcgctaagacggctcctggaaagaaacgtccggtagagcagtcgccacaagagccagactcctcctcgggcatcggcaagacaggccagcagcccgctaaaaagagactcaattttggtcagactggcgactcagagtcagtccccgatccacaacctctcggagaacctccagcaacccccgctgctgtggggcctactacaatggcttcaggcggtggcgcaccaatggcagacaataacgaaggcgtcgacggagtgggtaatgcctcaggaaattggcattgcgattccacatggctgggcgacagagtcatcaccaccagcacccgcacctgggccttgcccacctacaataaccacctctacaagcaaatctccagtgcttcaacgggggccagcaacgacaaccactacttcggctacagcaccccctgggggtattttgatttcaacagattccactgccacttttcaccacgtgactggcagcgactcatcaacaacaattggggattccggcccaagagactcaacttcaaactcttcaacatccaagtcaaggaggtcacgacgaatgatggcgttacaaccatcgctaataaccttaccagcacggttcaagtcttctcggactcggagtaccagcttccgtacgtcctcggctctgcgcaccagggctgcctccctccgttcccggcggacgtgttcatgattccgcaatacggctacctgacgctcaacaatggcagccaagccgtgggacgttcatccttttactgcctggaatatttcccttctcagatgctgagaacgggcaacaactttaccttcagctacacctttgaggaagtgcctttccacagcagctacgcgcacagccagagcctggaccggctgatgaatcctctcatcgaccaatacctgtattacctgaacagaactcaaaatcagtccggaagtgcccaaaacaaggacttgctgtttagccgtgggtctccagctggcatgtctgttcagcccaaaaactggctacctggaccctgttatcggcagcagcgcgtttctaaaacaaaaacagacaacaacaacagcaattttacctggactggtgcttcaaaatataacctcaatgggcgtgaatccatcatcaaccctggcactgctatggcctcacacaaagacgacgaagacaagttctttcccatgagcggtgtcatgatttttggaaaagagagcgccggagcttcaaacactgcattggacaatgtcatgattacagacgaagaggaaattaaagccactaaccctgtggccaccgaaagatttgggaccgtggcagtcaatttccagagcagcagcacagaccctgcgaccggagatgtgcatgctatgggagcattacctggcatggtgtggcaagatagagacgtgtacctgcagggtcccatttgggccaaaattcctcacacagatggacactttcacccgtctcctcttatgggcggctttggactcaagaacccgcctcctcagatcctcatcaaaaacacgcctgttcctgcgaatcctccggcggagttttcagccacaaagcttgcttcattcatcacccaatactccacaggacaagtgagtgtggaaattgaatgggagctgcagaaagaaaacagcaagcgctggaatcccgaagtgcagtacacatccaattatgcaaaatctgccaacgttgattttactgtggacaacaatggactttatactgagcctcgccccattggcacccgttaccttacccgtcccctg

SEQ ID NO: 648 - DNA, 2208 bp, Artificial Sequence
  Description of Artificial Sequence: Synthetic polynucleotide
atggctgccgatggttatcttccagattggctcgaggacaacctctctgagggcattcgcgagtggtgggacttgaaacctggagccccgaagcccaaagccaaccagcaaaagcaggacgacggccggggtctggtgcttcctggctacaagtacctcggacccttcaacggactcgacaagggggagcccgtcaacgcggcggacgcagcggccctcgagcacgacaaggcctacgaccagcagctcaaagcgggtgacaatccgtacctgcggtataaccacgccgacgccgagtttcaggagcgtctgcaagaagatacgtcttttgggggcaacctcgggcgagcagtcttccaggccaagaagcgggttctcgaacctctcggtctggttgaggaaggcgctaagacggctcctggaaagagacgtccggtagagcagtcgccacaagagccagactcctcctcgggcatcggcaagacaggccagcagcccgctaaaaagagactcaattttggtcagactggcgactcagagtcagtccccgatccacaacctctcggagaacctccagcaacccccgctgctgtgggacctactacaatggcttcaggcggtggcgcaccaatggcagacaataacgaaggcgccgacggagtgggtaatgcctcaggaaattggcattgcgattccacatggctgggcgacagagtcatcaccaccagcacccgcacctgggccttgcccacctacaataaccacctctacaagcaaatctccagtgcttcaacgggggccagcaacgacaaccactacttcggctacagcaccccctgggggtattttgatttcaacagattccactgccacttttcaccacgtgactggcagcgactcatcaacaacaattggggattccggcccaagagactcaacttcaaactcttcaacatccaagtcaaggaggtcacgacgaatgatggcgtcacaaccatcgctaataaccttaccagcacggttcaagtcttctcggactcggagtaccagcttccgtacgtcctcggctctgcgcaccagggctgcctccctccgttcccggcggacgtgttcatgattccgcaatacggctacctgacgctcaacaatggcagccaagccgtgggacgttcatccttttactgcctggaatatttcccttctcagatgctgagaacgggcaacaactttaccttcagctacacctttgaggaagtgcctttccacagcagctacgcgcacagccagagcctggaccggctgatgaatcctctcatcgaccaatacctgtattacctgaacagaactcaaaatcagtccggaagtgcccaaaacaaggacttgctgtttagccgtgggtctccagctggcatgtctgttcagcccaaaaactggctacctggaccctgttatcggcagcagcgcgtttctaaaacaaaaacagacaacaacaacagcaattttacctggactggtgcttcaaaatataacctcaatgggcgtgaatccatcatcaaccctggcactgctatggcctcacacaaagacgacgaagacaagttctttcccatgagcggtgtcatgatttttggaaaagagagcgccggagcttcaaacactgcattggacaatgtcatgattacagacgaagaggaaattaaagccactaaccctgtggccaccgaaagatttgggaccgtggcagtcaatttccagagcagcagcacagaccctgcgaccggagatgtgcatgctatgggagcattacctggcatggtgtggcaagatagagacgtgtacctgcagggtcccatttgggccaaaattcctcacacagatggacactttcacccgtctcctcttatgggcggctttggactcaagaacccgcctcctcagatcctcatcaaaaacacgcctgttcctgcgaatcctccggcggagttttcagctacaaagtttgcttcgttcatcacccaatactccacaggacaagtgagtgtggaaattgaatgggagctgcagaaagaaaacagcaagcgctggaatcccgaagtgcagtacacatccaattatgcaaaatctgccaacgttgattttactgtggacaacaatggactttatactgagcctcgccccattggcacccgttaccttacccgtcccctg

SEQ ID NO: 649 - DNA, 2208 bp, Artificial Sequence
  Description of Artificial Sequence: Synthetic polynucleotide
atggctgccgatggttatcttccagattggctcgaggacaacctctctgagggcattcgcgagtggtgggacttgaaacctggagccccgaagcccaaagccaaccagcaaaagcaggacgacggccggggtctggtgcttcctggctacaagtacctcggacccttcaacggactcgacaagggggagcccgtcaacgcggcggacgcagcggccctcgagcacgacaaggcctacgaccagcagctcaaagcgggtgacaatccgtacccgcggtataaccacgccgacgccgagtttcaggagcgtctgcaagaagatacgtcttttgggggcaacctcgggcgagcagtcttccaggccaagaagcgggttctcgaacctctcggtctggttggggaaggcgctaagacggctcctggaaagaaacgtccggtagagcagtcgccacaagagccagactcctcctcgggcatcggcaagacaggccagcagcccgctaaaaagagactcaattttggtcagactggcgactcagagtcagtccccgatccacaacctctcggagaacctccagcaacccccgctgctgtgggacctactacaatggcttcaggcggtggcgcaccaatggcagacaataacgaaggcgccgacggagtgggtaatgcctcaggaaattggcattgcgattccacatggctgggcgacagagtcatcaccaccagcacccgcacctgggccttgcccacctacaataaccacctctacaagcaaatctccagtgcttcaacgggggccagcaacgacaaccactacttcggctacagcaccccctgggggtattttgatttcaacagattccactgccacttttcaccacgtgactggcagcgactcatcaacaacaattggggattccggcccaagagactcaacttcaaactcttcaacatccaagtcaaggaggtcacgacgaatgatggcgtcacaaccatcgctaataaccttaccagcacggttcaagtcttctcggactcggagtaccagcttccgtacgtcctcggctctgcgcaccagggctgcctccctccgttcccggcggacgtgttcatgattccgcaatacggctacctgacgctcaacaatggcagccaagccgtgggacgttcatccttttactgcctggaatatttcccttctcagatgctgagaacgggcaacaactttaccttcagctacacctttgaggaagtgcctttccacagcagctacgcgcacagccagagcctggaccggctgatgaatcctcccatcgaccaatacctgtattacctgaacagaactcaaaatcagtccggaagtgcccaaaacaaggacttgctgtttagccgtgggtctccagctggcatgtctgttcagcccaaaaactggctacctggaccctgttatcggcagcagcgcgtttctaaaacaaaaacagacaacaacaacagcaattttacctggactggtgcttcaaaatataacctcaatgggcgtgaatccatcatcaaccctggcactgctatggcctcacacaaagacgacgaagacaagttctttcccatgagcggtgtcatgatttttggaaaagagagcgccggagcttcaaacactgcattggacaatgtcatgattacagacgaagaggaaattaaagccactaaccctgtggccaccgaaagatttgggaccgtggcagtcaatttccagagcagcagcacagaccctgcgaccggagatgtgcatgctatgggagcattacctggcatggtgtggcaagatagagacgtgtacctgcagggtcccatttgggccaaaattcctcacacagatggacactttcacccgtctcctcttatgggcggctttggactcaagaacccgcctcctcagatcctcatcaaaaacacgcctgttcctgcgaatcctccggcggagttttcagctacaaagtttgcttcattcatcacccaatactccacaggacaagtgagtgtggaaattgaatgggagctgcagaaagaaaacagcaagcgctggaatcccgaagtgcagtacacatccaattatgcaaaatctgccaacgttgattttactgtggacaacaatggactttatactgagcctcgccccattggcacccgttaccttacccgtcccctg

SEQ ID NO: 650 - DNA, 2208 bp, Artificial Sequence
  Description of Artificial Sequence: Synthetic polynucleotide
atggctgccgatggttatcttccagattggctcgaggacaacctctctgagggcattcgcgagtggtgggacttgaaacctggagccccgaagcccaaagccaaccagcaaaagcaggacgacggccggggtctggtgcttcctggctacaagtacctcggacccttcaacggactcgacaagggggagcccgtcaacgcggcggacgcagcggccctcgagcacgacaaggcctacgaccagcagctcaaagcgggtgacaatccgtacctgcggtataaccacgccgacgccgagtttcaggagcgtctgcaagaagatacgtcttttgggggcaacctcgggcgagcagtcttccaggccaagaagcgggttctcgaacctctcggtctggttgaggaaggcgctaagacggctcctggaaagaaacgtccggtagagcagtcgccacaagagccagactcctcctcgggcatcggcaagacaggccagcagcccgctaaaaagagactcaattttggtcagactggcgactcagagtcagtccccgatccacgacctctcggagaacctccagcaacccccgctgctgtgggacctactacaatggcttcaggcggtggcgcaccaatggcagacaataacgaaggcgccgacggagtgggtaatgcctcaggaaattggcattgcgattccacatggctgggcgacagagtcatcaccaccagcacccgcacctgggccttgcccacctacaataaccacctctacaagcaaatctccagtgcttcaacgggggccagcaacgacaaccactacttcggctacagcaccccctgggggtattttgatttcaacagattccactgccacttttcaccacgcgactggcagcgactcatcaacaacaattggggattccggcccaagagactcaacttcaaactcttcaacatccaagtcaaggaggtcacgacgaatgatggcgtcacaaccatcgctaataaccttaccagcacggttcaagtcttctcggactcggagtaccagcttccgtacgtcctcggctctgcgcaccagggctgcctccctccgttcccggcggacgtgttcatgattccgcaatacggctacctgacgctcaacaatggcagccaagccgtgggacgttcatccttttactgcctggaatatttcccttctcagatgctgagaacgggcaacaactttaccttcagctacacctttgaggaagtgcctttccacagcagctacgcgcacagccagagcctggaccggctgatgaatcctctcatcgaccaatacctgtattacctgaacagaactcaaaatcagtccggaagtgcccaaaacaaggacttgctgtttagccgtgggcctccagctggcatgtctgttcagcccaaaaactggctacctggaccctgttatcggcagcagcgcgtttctaaaacaaaaacagacaacaacaacagcaattttacctggactggtgcttcaaaatataacctcaatgggcgtgaatccatcatcaaccctggcactgctatggcctcacacaaagacgacgaagacaagttctttcccatgagcggtgtcatgatttttggaaaagagagcgccggagcttcaaacactgcattggacaatgtcatgattacggacgaagaggaaattaaagccactaaccctgtggccaccgaaagatttgggaccgtggcagtcaatttccagagcagcagcacagaccctgcgaccggagatgtgcatgctatgggagcattacctggcatggtgtggcaagatagagacgtgtacctgcagggtcccatttgggccaaaattcctcacacagatggacactttcacccgtctcctcttatgggcggctttggactcaagaacccgcctcctcagatcctcatcaaaaacacgcctgttcctgcgaatcctccggcggagttttcagctacaaagtttgcttcattcatcacccaatactccacaggacaagtgagtgtggaaattgaatgggagctgcagaaagaaaacagcaagcgctggaatcccgaagtgcagtacacatccaattatgcaaaatctgccaacgttgattttactgtggacaacaatggactttatactgagcctcgccccattggcacccgttaccttacccgtcccctg

SEQ ID NO: 651 - DNA, 2208 bp, Artificial Sequence
  Description of Artificial Sequence: Synthetic polynucleotide
atggctgccgatggttatcttccagattggctcgaggacaacctctctgagggcattcgcgagtggtgggacttgaaacctggagccccgaagcccaaagccaaccagcaaaagcaggacgacggccggggtctggtgcttcctggctacaagtacctcggacccttcaacggactcgacaagggggagcccgtcaacgcggcggacgcagcggccctcgagcacgacaaggcctacgaccagcagctcaaagcgggtgacaatccgtacctgcggtataaccacgccgacgccgagtttcaggagcgtctgcaagaagatacgtcttttgggggcaacctcgggcgagcagtcttccaggccaagaagcgggttctcgaacctctcggtctggttgaggaaggcgctaagacggctcctggaaagaaacgtccggtagagcagtcgccacaagagccagactcctcctcgggcatcggcaagacaggccagcagcccgctaaaaagagactcaattttggtcagactggcggctcagagtcagtccccgatccacaacctctcggagaacctccagcaacccccgctgctgtgggacctactacaatggcttcaggcggtggcgcaccaatggcagacaataacgaaggcgccgacggagtgggtaatgcctcaggaaattggcattgcgattccacatggctgggcgacagagtcatcaccaccagcacccgcacctgggccttgcccacctacaataaccacctctacaagcaaatctccagtgcttcaacgggggccagcaacgacaaccactacttcggctacagcaccccctgggggtattttgatttcaacagattccactgccacttttcaccacgtgactggcagcgactcatcaacaacaattggggattccggcccaagagactcaacttcaaactcttcaacatccaagtcaaggaggtcacgacgaatgatggcgtcacaaccatcgctaataaccttaccagcacggttcaagtcttctcggactcggagtaccagcttccgtacgtcctcggctctgcgcaccagggctgcctccctccgttcccggcggacgtgttcatgattccgcaatacggctacctgacgctcaacaatggcagccaagccgtgggacgttcatccttttactgcctggaatatttcccttctcagatgctgagaacgggcaacaactttaccttcagctacacctttgaggaagtgcctttccacagcagctacgcgcacagccagagcctggaccggctgatgaatcctcccatcgaccaatacctgtattacctgaacagaactcaaaatcagtccgggagtgcccaaaacaaggacttgctgtttagccgtgggtctccagctggcatgtctgttcagcccaaaaactggctacctggaccctgttatcggcagcagcgcgtttctaaaacaaaaacagacaacaacaacagcaattttacctggactggtgcttcaaaatataacctcaatgggcgtgaatccatcatcaaccctggcactgctatggcctcacacaaagacgacgaagacaagttctttcccatgagcggtgtcatgatttttggaaaagagagcgccggagcttcaaacactgcattggacaatgtcatgattacagacgaagaggaaattaaagccactaaccctgtggccaccgaaagatttgggaccgtggcagtcaatttccagagcagcagcacagaccctgcgaccggagatgtgcatgctatgggagcattacctggcatggtgtggcaagatagagacgtgtacctgcagggtcccatttgggccaaaattcctcacacagatggacactttcacccgtctcctcttatgggcggctttggactcaagaacccgcctcctcagatcctcatcaaaaacacgcctgttcctgcgaatcctccggcggagttttcagctacaaagtttgcttcattcatcacccaatactccacaggacaagtgagtgtggaaattgaatgggagctgcagaaagaaaacagcaagcgctggaatcccgaagtgcagtacacatccaattatgcaaaatctgccaacgttgactttactgtggacaacaatggactttatactgagcctcgccccattggcacccgttaccttacccgtcccctg

SEQ ID NO: 652 - DNA, 2208 bp, Artificial Sequence
  Description of Artificial Sequence: Synthetic polynucleotide
atggctgccgatggttatcttccagattggctcgaggacaacctctctgagggcattcgcgagtggtgggacttgaaacctggagccccgaagcccaaagccaaccagcaaaagcaggacgacggccggggtctggtgcttcctggctacaagtacctcggacccttcaacggactcgacaagggggagcccgtcaacgcggcggacgcagcggccctcgagcacgacaaggcctacgaccagcagctcaaagcgggtgacaatccgtacctgcggtataaccacgccgacgccgagtttcaagagcgtctgcaagaagatacgtcttttgggggcaacctcgggcgagcagtcttccaggccaagaagcgggttctcgaacctctcggtctggttgaggaaggcgctaagacggctcctggaaagaaacgtccggtagagcagtcgccacaagagccagactcctcctcgggcatcggcaagacaggccagcagcccgctaaaaagagactcaattttggtcagactggcgactcagagtcagtccccgatccgcaacctctcggagaacctccagcaacccccgctgctgtgggacctactacaatggcttcaggcggtggcgcaccaatggcagacaataacgaaggcgccgacggagtgggtaatgcctcaggaaattggcattgcgattccacatggctgggcgacagagtcatcaccaccagcacccgcacctgggccttgcccacctacaataaccacctctacaagcaaatctccagtgcttcaacgggggccagcaacgacaaccactacttcggctacagcaccccctgggggtattttgatttcaacagattccactgccacttttcaccacgtgactggcagcgactcatcaacaacaattggggattccggcccaagagactcaacttcaaactcttcaacatccaagtcaaggaggtcacgacgaatgatggcgtcacaaccatcgctaataaccttaccagcacggttcaagtcttctcggactcggagtaccagcttccgtacgtcctcggctctgcgcaccagggctgcctccctccgttcccggcggacgtgttcatgattccgcaatacggctacctgacgctcaacaatggcagccaagccgtgggacgttcatccttttactgcctggaatatttcccttctcagatgctgagaacgggcaacaactttaccttcagctacacctttgaggaagtgcctttccacagcagctacgcgcacagccagagcctggaccggctgatgaatcctctcatcgaccaatacctgtattacctgaacagaactcaaaatcagtccggaagtgcccaaaacaaggacttgctgtttagccgtgggtctccagctggcatgtctgttcagcccaaaaactggctacctggaccctgttatcggcagcagcgcgtttctaaaacaaaaacagacaacaacaacagcaattttacctggactggtgcttcaaaatataacctcaatgggcgtgaatccatcatcaaccctggcactgctgtggcctcacacaaagacgacgaagacaagttctttcccatgagcggtgtcatgatttttggaaaagagagcgccggagcttcaaacactgcattggacaatgtcatgattacagacgaagaggaaattaaagccactaaccctgtggccaccgaaagatttgggaccgtggcagtcaatttccagagcagcagcacagaccctgcgaccggagatgtgcatgctatgggagcattacctggcatggtgtggcaagatagagacgtgtacctgcagggtcccatttgggccaaaattcctcacacagatggacactttcacccgtctcctcttatgggcggctttggactcaagaacccgcctcctcagatcctcatcaaaaacacgcctgttcctgcgaatcctccggcggagttttcagctacaaagtttgcttcattcatcacccaatactccacaggacaagtgagtgtggaaattgaatgggagctgcagaaagaaaacagcaagcgctggaatcccgaagtgcagtacacatccaattatgcaaaatctgccaacgttgattttactgtggacaacaatggactttatactgagcctcgccccattggcacccgttaccttacccgtcccctg

SEQ ID NO: 653 - DNA, 2208 bp, Artificial Sequence
  Description of Artificial Sequence: Synthetic polynucleotide
atggctgccgatggttatcttccagattggctcgaggacaacctctctgagggcattcgcgagtggtgggacttgaaacctggagccccgaagcccaaagccaaccagcaaaagcaggacgacggccggggtctggtgcttcctggctacaagtacctcggacccttcaacggactcgacaagggggagcccgtcaacgcggcggacgcagcggccctcgagcacgacaaggcctacgaccagcagctcaaagcgggtgacaatccgtacctgcggtataaccacgccgacgccgagtttcaggagcgtctgcaagaagatacgtcttttgggggcaacctcgggcgagcagtcttccaggccaagaagcgggttctcgaacctctcggtctggttgaggaaggcgctaagacggctcctggaaagaaacgtccggtagagcagtcgccacaagagccagactcctcctcgggcatcggcaagacaggccagcagcccgctaaaaagagactcaattttggtcagactggcgactcagagtcagtccccgatccacaacctctcggagaacctccagcaacccccgctgctgtgggacctactacaatggcttcaggcggtggcgcaccaatggcagacaataacgaaggcgccgacggagtgggtaatgcctcaggaaattggcattgcgattccacatggctgggcgacagagtcatcaccaccagcacccgcacctgggccttgcccacctacaataaccacctctacaagcaaatctccagtgcttcaacgggggccagcaacgacaaccactacttcggctacagcaccccctgggggtattttgatttcaacagattccactgccacttttcaccacgtgactggcagcaactcatcaacaacaattggggattccggcccaagagactcaacttcaaactcttcaacatccaagtcaaggaggtcacgacgaatgatggcgtcacaaccatcgctaataaccttaccagcacggttcaagtcttctcggactcggagtaccagcttccgtacgtcctcggctctgcgcaccagggctgcctccctccgttcccggcggacgtgttcatgattccgcaatacggctacctgacgctcaacaatggcagccaagccgtgggacgttcatccttttactgcctggaatatttcccttctcagatgctgagaacgggcaacaactttaccttcagctacacctttgaggaagtgcctttccacagcagctacgcgcacagccagagcctggaccggctgatgaatcctctcatcgaccaatacctgtattacctgaacagaactcaaaatcagtccggaagtgcccaaaacaaggacttgctgtttagccgtgggtctccagctggcatgtctgttcagcccaaaaactggctacctggaccctgttatcggcagcagcgcgtttctaaaacaaaaacagacaacaacaacagcaattttacctggactggtgcttcaaaatataacctcaatgggcgtgaatccatcatcaaccctggcactgctatggcctcacacaaagacgacgaagacaagttctttcccatgagcggtgtcatgatttttggaaaagagagcgccggagcttcaaacactgcattggacaatgtcatgattacagacgaagaggaaattaaagccactaaccctgtggccaccgaaagatttgggaccgtggcagtcaatttccagagcaccagcacagaccctgcgaccggagatgtgcatgctatgggagcattacctggcatggtgtggcaagatagagacgtgtacctgcagggtcccatttgggccaaaattcctcacacagatggacactttcacccgtctcctcttatgggcggctttggactcaagaacccgcctcctcagatcctcatcaaaaacacgcctgttcctgcgaatcctccggcggagttttcagctacaaagtttgcttcattcatcacccaatactccacaggacaagtgagtgtggaaattgaatgggagctgcagaaagaaaacagcaagcgctggaatcccgaagtgcagtacacatccaattatgcaaaatctgccgacgttgattttactgtggacaacaatggactttatactgagcctcgccccattggcacccgttaccttacccgtcccctg

SEQ ID NO: 654 - DNA, 2208 bp, Artificial Sequence
  Description of Artificial Sequence: Synthetic polynucleotide
atggctgccgatggttatcttccagattggctcgaggacaacctctctgagggcattcgcgagtggtgggacttgaaacctggagccccgaagcccaaagccaaccagcaaaagcaggacgacggccggggtctggtgcttcctggctacaagtacctcggacccttcaacggactcgacaagggggagcccgtcaacgcggcggacgcagcggccctcgagcacgacaaggcctacgaccagcagctcaaagcgggtgacaatccgtacctgcggtataaccacgccgacgccgagtttcaagagcgtctgcaagaagatacgtcttttgggggcaacctcgggcgagcagtcttccaggccaagaagcgggttctcgaacctctcggtctggttgaggaaggcgctaagacggctcctggaaagaaacgtccggtagagcagtcgccacaagagccagactcctcctcgggcatcggcaagacaggccagcagcccgctaaaaagagactcaattttggtcagactggcgactcagagtcagtccccgatccgcaacctctcggagaacctccagcaacccccgctgctgtgggacctactacaatggcttcaggcggtggcgcaccaatggcagacaataacgaaggcgccgacggagtgggtaatgcctcaggaaattggcattgcgattccacatggctgggcgacagagtcatcaccaccagcacccgcacctgggccttgcccacctacaataaccacctctacaagcaaatctccagtgcttcaacgggggccagcaacgacaaccactacttcggctacagcaccccctgggggtattttgatttcaacagattccactgccacttttcaccacgtgactggcagcgactcatcaacaacaattggggattccggcccaagagactcaacttcaaactcttcaacatccaagtcaaggaggtcacgacgaatgatggcgtcacaaccatcgctaataaccttaccagcacggttcaagtcttctcggactcggagtaccagcctccgtacgtcctcggctctgcgcaccagggctgcctccctccgttcccggcggacgtgttcatgattccgcaatacggccacctgacgctcaacaatggcagccaagccgtgggacgttcatccttttactgcctggaatatttcccttctcagatgctgagaacgggcaacaactttaccttcagctacacctttgaggaagtgcctttccacagcagctacgcgcacagccagagcctggaccggctgacgaatcctctcatcgaccaatacctgtattacctgaacagaactcaaaatcagtccggaagtgcccaaaacaaggacttgctgtttagccgtgggtctccagctggcatgtctgttcagcccaaaaactggctacctggaccctgttatcggcagcagcgcgtttctaaaacaaaaacagacaacaacaacagcaattttacctggactggtgcttcaaaatataacctcaatgggcgtgaatccatcatcaaccctggcactgctatggcctcacacaaagacgacgaagacaagttctttcccatgagcggtgtcatgatttttggaaaagagagcgccggagcttcaaacactgcattggacaatgtcatgattacagacgaagaggaaattaaagccactaaccctgtggccaccgaaagatttgggaccgtggcagtcaatttccagagcagcagcacagaccctgcgaccggagatgtgcatgctatgggagcattacctggcatggtgtggcaagatagagacgtgtacctgcagggtcccatttgggccaaaattcctcacacagatggacactttcacccgtctcctcttatgggcggctttggactcaagaacccgcctcctcagatcctcatcaaaaacacgcctgttcctgcgaatcctccggcggagttttcagctacaaagtttgcttcattcatcacccaatactccacaggacaagtgagtgtggaaattgaatgggagctgcagaaagaaaacagcaagcgctggaatcccgaagtgcagtacacatccaattatgcaaaatctgccaacgttgattttactgtggacaacaatggactttatactgagcctcgccccattggcacccgttaccttacccgtcccctg

SEQ ID NO: 655 - DNA, 2208 bp, Artificial Sequence
  Description of Artificial Sequence: Synthetic polynucleotide
atggctgccgatggttatcttccagattggctcgaggacaacctctctgagggcattcgcgagtggtgggacttgaaacctggagccccgaagcccaaagccaaccagcaagagcaggacgacggccggggtctggtgcttcctggctacaagtacctcggacccttcaacggactcgacaagggggagcccgtcaacgcggcggacgcagcggccctcgagcacgacaaggcctacgaccagcagctcaaagcgggtgacaatccgtacctgcggtataaccacgccgacgccgagtttcaggagcgtctgcaagaagatacgtcttttgggggcaacctcgggcgagcagtcttccaggccaagaagcgggttctcgaacctctcggtctggttgaggaaggcgctaagacggctcctggaaagaaacgtccggtagagcagtcgccacaagagccagactcctcctcgggcatcggcaagacaggccagcagcccgctaaaaagagactcaattttggtcagactggcgactcagagtcagtccccgatccacaacctctcggagaacctccagcaacccccgctgctgtgggacctactacaatggcttcaggcggtggcgcaccaatggcagacaataacgaaggcgccgacggagtgggtaatgcctcaggaaattggcattgcgattccacatggctgggcgacagagtcatcaccaccagcacccgcacctgggccttgcccacctacaataaccacctctacaagcaaatctccagtgcttcaacgggggccagcaacgacaaccactacttcggctacagcaccccctgggggtattttgatttcaacagattccactgccacttttcaccacgtgactggcagcgactcatcaacaacaattggggattccggcccaagagactcaacttcaaactcttcaacatccaagtcaaggaggtcacgacgaatgatggcgtcacaaccatcgctaataaccttaccagcacggttcaagtcttctcggactcggagtaccagcttccgtacgtcctcggctctgcgcaccagggctgcctccctccgttcccggcggacgtgttcatgattccgcaatacggctacctgacgctcaacaatggcagccaagccgtgggacgttcatccttttactgcctggaatatttcccttctcagatgctgagaacgggcaacaactttaccttcagctacacctttgaggaagtgcctttccacagcagctacgcgcacagccagagcctggaccggctgatgaatcctctcatcgaccaatacctgtattacctgaacagaactcaaaatcagtccggaagtgcccaaaacaaggacttgctgtttagccgtgggtctccagctggcatgtctgttcagcccaaaaactggctacctggaccctgttatcggcagcagcgcgtttctaaaacaaaaacagacaacaacaacagcaattttacctggactggtgcttcaaaatataacctcaatgggcgtgaatccatcatcaaccctggcactgctatggcctcacacaaagacgacgaagacaagttctttcccatgagcggtgtcatgatttttggaaaagagagcgccggagcttcaaacactgcattggacaatgtcatgattacagacgaagaggaaattaaagccactaaccctgtggccaccgaaagatttgggaccgtggcagtcaatttccagagcagcagcacagaccctgcgaccggagatgtgcatgctacgggaacattacctggcatggtgtggcaagatagagacgtgtacctgcagggtcccatttgggccaaaattcctcacacagatggacactttcacccgtctcctcttatgggcggctttggactcaagaacccgcctcctcagatcctcatcaaaaccacgcctgttcctgcgaatcctccggcggagttttcagctacaaagtttgcttcattcatcacccagtactccacaggacaagtgagtgtggaaattgaatgggagctgcagaaagaaaacagcaagcgctggaatcccgaagtgcagtacacatccaattatgcaaaatctgccaacgttgattttactgtggacgacaatggactttatactgagcctcgccccattggcacccgttaccttacccgtcccctg

SEQ ID NO: 656 - DNA, 2208 bp, Artificial Sequence
  Description of Artificial Sequence: Synthetic polynucleotide
atggctgccgatggttatcttccagattggctcgaggacaacctctctgagggcattcgcgagtggtgggacttgaaacctggagccccgaagcccaaagccaaccagcaaaagcaggacgacggccggggtctggtgcttcctggctacaagtacctcggacccttcaacggactcgacaagggggagcccgtcaacgcggcggacgcagcggccctcgagcacgacaaggcctacgaccagcagctcaaagcgggtgacaatccgtacctgcggtataaccacgccgacgccgagtttcaggagcgtctgcaagaagatacgtcttttgggggcaacctcgggcgagcagtcttccaggccaagaagcgggttctcgaacctctcggtctggttgaggaaggcgctaagacggctcctggaaagaaacgtccggtagagcagtcgctacaagagccagactcctcctcgggcatcggcaagacaggccagcagcccgctaaaaagagactcaattttggtcagactggcgactcagagtcagtccccgatccacaacctctcggagaacctccagcaacccccgctgctgtgggacctactacaatggcttcaggcggtggcgcaccaatggcagacaataacgaaggcgccgacggagtgggtaatgcctcaggaaattggcattgcgattccacatggctgggcgacagagtcatcaccaccagcacccgcacctgggccttgcccacctacaataaccacctctacaagcaaatctccagtgcttcaacgggggccagcaacgacaaccactacttcggctacagcaccccctgggggtattttgatttcaacagattccactgccacttttcaccacgtgactggcagcgactcatcaacaacaattggggattccggcccaagagactcaacttcaaactcttcaacatccaagtcaaggaggtcacgacgaatgatggcgtcacaaccatcgctaataaccttaccagcacggttcaagtcttctcggactcggagtaccagcttccgtacgtcctcggctctgcgcaccagggctgcctccctccgttcccggcggacgtgttcatgattccgcaatacggctacctgacgctcaacaatggcagccaagccgtgggacgttcatccttttactgcctggaatatttcccttctcagatgctgagaacgggcaacaactttaccttcagctacacctttgaggaagtgcctttccacagcagctacgcgcacagccagagcctggaccggctgatgaatcctctcatcgaccaatacctgtattacctgaacagaactcaaaatcagtccggaagtgcccaaaacaaggacttgctgtttagccgtgggtctccagctggcatgtctgttcagcccaaaaactggctacctggaccctgttatcggcagcagcgcgtttctaaaacaaaaacagacaacgacaacagcaattttacctggactggtgcttcaaaatataacctcaatgggcgtgaatccatcatcaaccctggcactgctatggcctcacacaaagacgacgaagacaagttctttcccatgagcggtgtcatgatttttggaaaagagagcgccggagcttcaaacactgcattggacaatgtcatgattacagacgaagaggaaattaaagccactaaccctgtggccaccgaaagatttgggaccgtggcagtcaatttccagagcagcagcacagaccctgcgaccggagatgtgcatgctatgggagcattacctggcatggtgtggcaagatagagacgtgtacctgcagggtcccatttgggccaaaattcctcacacagatggacactttcacccgtctcctcttatgggcggctttggactcaagaacccgcctcctcagatcctcatcaaaaacacgcctgttcctgcgaatcctccggcggagttttcagctacaaagtttgcttcattcatcacccaatactccacaggacaagtgagtgtggaaattgaatgggagctgcagaaagaaaacagcaagcgctggaatcccgaagtgcagtacacatccaattatgcaaaatctgccaacgttgattttactgtggacaacaatggactttatactgagcctcgccccattggcacccgttaccttacccgtcccctg

SEQ ID NO: 657 - DNA, 2208 bp, Artificial Sequence
  Description of Artificial Sequence: Synthetic polynucleotide
atggctgccgatggttatcttccagattggctcgaggacaacctctctgagggcattcgcgagtggtgggacttgaaacctggagctccgaagcccaaagccaaccagcaaaagcaggacgacggccggggtctggtgcttcctggctacaagtacctcggacccttcaacggactcgacaagggggagcccgtcaacgcggcggacgcagcggccctcgagcacgacaaggcctacgaccagcagctcaaagcgggtgacaatccgtacctgcggtataaccacgccgacgccgagtttcaggagcgtctgcaagaagatacgtcttttgggggcaacctcgggcgagcagtcttccaggccaagaagcgggttctcgaacctctcggtctggttgaggaaggcgctaagacggctcctggaaagaaacgtccggtagagcagtcgccacaagagccagactcctcctcgggcatcggcaagacaggccagcagcccgctaaaaagagactcaattttggtcagactggcgactcagagtcagtccccgatccacaacctctcggagaacctccagcaacccccgctgctgtgggacctactacaatggcttcaggcggtggcgcaccaatggcagacaataacgaaggcgccgacggagtgggtaatgcctcaggaaattggcattgcgattccacatggctgggcgacagagtcatcaccaccagcacccgcacctgggccttgcccacctacaataaccacctctacaagcaaatctccagtgcttcaacgggggccagcaacgacaaccactacttcggctacagcaccccctgggggtattttgatttcaacagattccactgccacttttcaccacgtgactggcagcgactcatcaacaacaattggggattccggcccaagagactcaacttcaaactcttcaacatccaagtcaaggaggtcacgacgaatgatggcgtcacaaccatcgctaataaccttaccagcacggttcaagtcttctcggactcggagtaccagcttccgtacgtcctcggctctgcgcaccagggctgcctccctccgttcccggcggacgtgttcatgattccgcaatacggctacctgacgctcaacaatggcagccaagccgtgggacgttcatccttttactgcctggaatatttcccttctcagatgctgagaacgggcaacaactttaccttcagctacacctttgaggaagcgcctttccacagcagctacgcgcacagccagagcctggaccggctgatgaatcctctcatcgaccaatacctgtattacctgaacagaactcaaaatcagtccggaagtgcccaaaacaaggacttgctgtttagccgtgggtctccagctggcatgtctgttcagcccaaaaactggctacctggaccctgttatcggcagcagcgcgtttctaaaacaaaaacagacaacaacaacagcaattttacctggactggtgcttcaaaatataacctcaatgggcgtgaatccatcatcaaccctggcactgctatggcctcacacaaagacgacgaagacaagttctttcccatgagcggtgtcatgatttttggaaaagagagcgccggagcttcaaacactgcattggacaatgtcatgattacagacgaagaggaaattaaagccactaaccctgtggccaccgaaagatttgggaccgtggcagtcaatttccagagcagcagcacagaccctgcgaccggagatgtgcatgctatgggagcattacctggcatggtgtggcaagatagagacgtgtacctgcagggtcccatttgggccaaaattcctcacacagatggacactttcacccgtctcctcttatgggcggctttggactcaagaacccgcctcctcagatcctcatcaaaaacacgcctgttcctgcgaatcctccggcggagttttcagctacaaagtttgcttcattcatcacccaatactccacaggacaagtgagtgtggaaattgaatgggagctgcagaaagaaaacagcaagcgctggaatcccgaagtgcagtacacatccaattatgcgaaatctgccaacgttgattttactgtggacaacaatggactttatactgagcctcgccccgttggcacccgttaccttacccgtcccctg

SEQ ID NO: 658 - DNA, 2208 bp, Artificial Sequence
  Description of Artificial Sequence: Synthetic polynucleotide
atggctgccgatggttatcttccagattggctcgaggacaacctctctgagggcattcgcgagtggtgggacttgaaacctggagccccgaagcccaaagccaaccagcaaaagcaggacgacggccggggtctggtgcttcctggctacaagtacctcggacccttcaacggactcgacaagggggagcccgtcaacgcggcggacgcagcggccctcgagcacgacaaggcctacgaccagcagctcaaagcgggtgacaatccatacctgcggtataaccacgccgacgccgagtttcaggagcgtctgcaagaaaatacgtcttttgggggcaacctcgggcgagcagtcttccaggccaagaagcgggttctcgaacctctcggtctggttgaggaaggcgctaagacggctcctggaaagaaacgtccggtagagcagtcgccacaagagccagactcctcctcgggcatcggcaagacaggccagcagcccgctaaaaagagactcaattttggtcagactggcgactcagagtcagtccccgatccacaacctctcggagaacctccagcaacccccgctgctgtgggacctactacaatggcttcaggcggtggcgcaccaatggcagacaataacgaaggcgccgacggagtgggtaatgcctcaggaaattggcattgcgattccacatggctgggcgacagagtcatcaccaccagcacccgcacctgggccttgcccacctacaataaccacctctacaagcaaatctccagtgcttcaacgggggccagcaacgacaaccactacttcggctacagcaccccctgggggtattttgatttcaacagattccactgccactttccaccacgtgactggcagcgactcatcaacaacaattggggattccggcccaagagactcaacttcaaactcttcaacatccaagtcaaggaggtcacgtcgaatgatggcgtcacaaccatcgctaataaccttaccagcacggttcaagtcttctcggactcggagtaccagcttccgtacgtcctcggctctgcgcaccagggctgcctccctccgttcccggcggacgtgttcatgattccgcaatacggctacctgacgctcaacaatggcagccaagccgtgggacgttcatccttttactgcctggaatatttcccttctcagatgctgagaacgggcaacaactttaccttcagctacacctttgaggaagtgcctttccacagcagctacgcgcacagccagagcctggaccggctgatgaatcctctcatcgaccaatacctgtattacctgaacagaactcaaaatcagtccggaagtgcccaaaacaaggacttgctgtttagccgtgggtctccagctggcatgtctgttcagcccaaaaactggctacctggtccctgttatcggcagcagcgcgtttctaaaacaaaaacagacaacaacaacagcaattttacctggactggtgcttcaaaatataacctcaatgggcgtgaatccatcatcaaccctggcactgctatggcctcacacaaagacgacgaagacaagttctttcccatgagcggtgtcatgatttttggaaaagagagcgccggagcttcaaacactgcattggacaatgtcatgattacagacgaagaggaaattaaagccactaaccctgtggccaccgaaagatttgggaccgtggcagtcaatttccagagcagcagcacagaccctgcgaccggagatgtgcatgctatgggagcattacctggcatggtgtggcaagatagagacgtgtacctgcagggtcccatttgggccaaaattcctcacacagatggacactttcacccgtctcctcttatgggcggctttggactcaagaacccgcctcctcagatcctcatcaaaaacacgcctgttcctgcgaatcctccggcggagttttcagctacaaagtttgcttcattcatcacccaatactccacaggacaagtgagtgtggaaattgaatgggagctgcagaaagaaaacagcaagcgctggaatcccgaagtgcagtacacatccaattatgcaaaatctgccaacgttgattttactgtggacaacaatggactttatactgagcctcgccccattggcacccgttaccttacccgtcccctg

SEQ ID NO: 659 - DNA, 2208 bp, Artificial Sequence
  Description of Artificial Sequence: Synthetic polynucleotide
atggctgccgatggttatcttccagattggctcgaggacaacctctctgagggcattcgcgagtggtgggacttgaaacctggagccccgaagcccaaagccaaccagcaaaagcaggacgacggccggggtctggtgcttcctggctacaagtacctcggacccttcaacggactcgacaagggggagcccgtcaacgcggcggacgcagcggccctcgagcacgacaaggcctacgaccagcagctcaaagcgggtgacaatccgtacctgcggtataaccacgccgacgccgagtttcaggagcgtctgcaagaagatacgtcttttgggggcaacctcgggcgagcagtcttccaggccaagaagcgggttctcgaacctctcggtctggttgaggaaggcgctaagacggctcctggaaagaaacgtccggtagagcagtcgccacaagagccagactcctcctcgggcatcggcaagacaggccagcagcccgctaaaaagagactcaattttggtcagactggcgactcagagtcagtccccgatccacaacctctcggagaacctccagcaacccccgctgctgtgggacctactacaatggcttcaggcggtggcgcaccaatggcagacaataacgaaggcgccgacggagtgggtaatgcctcaggaaattggcattgcgattccacatggctgggcgacagagtcatcaccaccagcacccgcacctgggccttgcccacctacaataaccacctctacaagcaaatctccagtgcttcaacgggggccagcaacgacaaccactacttcggctacagcaccccctgggggtattttgatttcaacagattccactgccacttttcaccacgtgactggcagcgactcatcaacaacaattggggattccggcccaagagactcaacttcaaactcttcaacatccaagtcaaggaggtcacgacgaatgatggcgtcacaaccatcgctaataaccttaccagcacggttcaagtcttctcggactcggagtaccagcttccgtacgtcctcggctctgcgcaccagggctgcctccctccgttcccggcggacgtgttcatgattccgcaatacggctacctgacgctcaacaatggcagccaagccgtgggacgttcatccttttactgcctggaatatttcccttctcagatgctgagaacgggcaacaactttaccttcagctacacctttgaggaagtgcctttccacagcagctacgcgcacagccagagcctggaccggctgatgaatcctctcatcgaccaatacctgtattacctgaacagaactcaaaatcagtccggaagtgcccaaaacaaggacttgctgtttagccgtgggtctccagctggcacgtctgttcagcccaaaaactggctacctggaccctgttatcggcagcagcgcgtttctaaaacaaaaacagacaacaacaacagcaattttacctggactggtgcttcaaaatataacctcaatgggcgtgaatccatcatcaaccctggcactgctatggcctcacacaaagacgacgaagacaagttctttcccatgagcggtgtcatgatttttggaaaagagagcgccggagcttcaaacactgcattggacaatgtcatgattacagacgaagaggaaattaaagccactaaccctgtggccaccgaaagatttgggaccgtggcagtcaatttccagagcagcagcacagaccctgcgaccggagatgtgcatgctatgggagcattacctggcatggtgtggcaagatagagacgtgtacctgcagggtcccatttgggccaaaattcctcacacagatggacactttcacccgtctcctcttatgggcggctttggactcaagaacccgcctcctcagatcctcatcaaaaacacgcctgttcctgcgaatcctccggcggagttttcagctacaaagtttgcttcattcatcacccaatactccacaggacaagtgagtgtggaaattgaatgggagctgcagaaagaaaacagcaagcgctggaatcccgaagtgcagtacacatccaattatgcaaaatctgccaacgttgattttactgtggacaacaatggactttatactgggcctcgccccattggcacccgttaccttacccgtcccctg

SEQ ID NO: 660 - DNA, 2208 bp, Artificial Sequence
  Description of Artificial Sequence: Synthetic polynucleotide
atggctgccgatggttatcttccagattggctcgaggacaacctctctgagggcattcgcgagtggtgggacttgaaacctggagccccgaagcccaaagccaaccagcaaaagcaggacgacggccggggtctggtgcttcctggctacaagtacctcggacccttcaacggactcgacaagggggagcccgtcaacgcggcggacgcagcggccctcgagcacgacaaggcctacgaccagcagctcaaagcgggtgacaatccgtacctgcggtataaccacgccgacgccgagtttcaggagcgtctgcaagaagatacgtcttttgggggcaacctcgggcgagcagtcttccaggccaagaagcgggttctcgaacctctcggtctggttgaggaaggcgctaagacggctcctggaaagaaacgtccggtagagcagtcgccacaagagccagactcctcctcgggcatcggcaagacaggccagcagcccgctaaaaagagactcaattttggtcagactggcgactcagagtcagtccccgatccacaacctctcggagaacctccagcaacccccgctgctgtgggacctactacaatggcttcaggcggtggcgcaccaatggcagacaataacgaaggcgccgacggagtgggtaatgccccaggaaattggcattgcgactccacatggctgggcgacagagtcatcaccaccagcacccgcacctgggccttgcccacctacaataaccacctctacaagcaaatctccagtgcttcaacgggggccagcaacgacaaccactacttcggctacagcaccccctgggggtattttgatttcaacagattccactgccacttttcaccacgtgactggcagcgactcatcaacaacaattggggattccggcccaagagactcaacttcaaactcttcaacatccaagtcaaggaggtcacgacgaatgatggcgtcacaaccatcgctaataaccttaccagcacggttcaagtcttctcggactcggagtaccagcttccgtacgtcctcggctctgcgcaccagggctgcctccctccgttcccggcggacgtgttcatgattccgcaatacggctacctgacgctcaacaatggcagccaagccgtgggacgttcatccttttactgcctggaatatttcccttctcagatgctgagaacgggcaacaactttaccttcagctacacctttgaggaagtgcctttccacagcagctacgcgcacagccagagcctggaccggctgatgaatcctctcatcgaccaatacctgtattacctgaacagaactcaaaatcagtccggaagtgcccaaaacaaggacttgctgtttagccgtgggtctccagctggcatgtctgttcagcccaaaaactggctacctggaccctgttatcggcagcagcgcgtttctaaaacaaaaacagacaacaacaacagcaattttacctggactggtgcttcaaaatataacctcaatgggcgtgaatccatcatcaaccctggcacagctatggcctcacacaaagacgacgaagacaagttctttcccatgagcggtgtcatgatttttggaaaagagagcgccggagcttcaaacactgcattggacaatgtcatgattacaggcgaagaggaaattaaagccactaaccctgtggccaccgaaagatttgggaccgtggcagtcaatttccagagcagcagcacagaccctgcgaccggagatgtgcatgctatgggagcattacctggcatggtgtggcaagatagagacgtgtacctgcagggtcccatttgggccaaaattcctcacacagatggacactttcacccgtctcctcttatgggcggctttggactcaagaacccgcctcctcagatcctcatcaaaaacacgcctgttcctgcgaatcctccggcggagttttcagctacaaagtttgcttcattcatcacccaatactccacaggacaagtgagtgtggaaattgaatgggagctgcagaaagaaaacagcaagcgctggaatcccgaagtgcagtacacatccaattatgcaaaatctgccaacgttgattttactgtggacaacaatggactttatactgagcctcgccccattggcacccgttaccttacccgtcccctg

SEQ ID NO: 661 - DNA, 2208 bp, Artificial Sequence
  Description of Artificial Sequence: Synthetic polynucleotide
atggctgccgatggttatcttccagattggctcgaggacaacctctctgagggcattcgcgagtggtgggacttgaaacctggagccccgaagcccaaagccaaccagcaaaagcaggacgacggccggggtctggtgcttcctggctacaagtacctcggacccttcaacagactcgacaagggggagcccgtcaacgcggcggacgcagcggccctcgagcacgacaaggcctacgaccagcagctcaaagcgggtgacaatccgtacctgcggtataaccacgccgacgccgagtttcaggagcgtctgcaagaagatacgtcttttgggggcaacctcgggcgagcagtcttccaggccaagaagcgggttctcgaacctctcggtctggttgaggaaggcgctaagacggctcctggaaggaaacgtccggtagagcagtcgccacaagagccagactcctcctcgggcatcggcaagacaggccagcagcccgctaaaaagagactcaattttggtcagactggcgactcagagtcagtccccgatccacaacctctcggagaacctccagcaacccccgctgctgtgggacctactacaatggcttcaggcggtggcgcgccaatggcagacaataacgaaggcgccgacggagtgggtaatgcctcaggaaattggcattgcgattccacatggctgggcgacagagtcatcaccaccagcacccgcacctgggccttgcccacctacaataaccacctctacaagcaaatctccagtgcttcaacgggggccagcaacgacaaccactacttcggctacagcaccccctgggggtattttgatttcaacagattccactgccacttttcaccacgtgactggcagcgactcatcaacaacaattggggattccggcccaagagactcaacttcaaactcttcaacatccaagtcaaggaggtcacgacgaatgatggcgtcacaaccatcgctaataaccttaccagcacggttcaagtcttctcggactcggagtaccagcttccgtacgtcctcggctctgcgcaccagggctgcctccctccgttcccggcggacgtgttcatgattccgcaatacggctacctgacgctcaacaatggcggccaagccgtgggacgttcatccttttactgcctggaatatttcccttctcagatgctgagaacgggcaacaactttaccttcagctacacctttgaggaagtgcctttccacagcagctacgcgcacagccagagcctggaccggctgatgaatcctctcatcgaccaatacctgtattacctgaacagaactcaaaatcagtccggaagtgcccaaaacaaggacttgctgtttagccgtgggtctccagctggcatgtctgttcagcccaaaaactggctacctggaccctgttatcggcagcagcgcgtttctaaaacaaaaacagacaacaacaacagcaattttacctggactggtgcttcaaaatatagcctcaatgggcgtgaatccatcatcaaccctggcactgctatggcctcacacaaagacgacgaagacaagttctttcccatgggcggtgtcatgatttttggaaaagagagcgccggagcttcaaacactgcattggacaatgccatgattacagacgaagaggaaattaaagccactaaccctgtggccaccgaaagatttgggaccgtggcagtcaatttccagagcagcagcacagaccctgcgaccggagatgtgcatgctatgggagcattacctggcatggtgtggcaagatagagacgtgtacctgcagggtcccatttgggccaaaattcctcacacagatggacactttcacccgtctcctcttatgggcggctttggactcaagaacccgcctcctcagatcctcatcaaaaacacgcctgttcctgcgaatcctccggcggagttttcagctacaaagtttgcttcattcatcacccaatactccacaggacaagtgagtgtggaaattgaatgggagctgcagaaagaaaacagcaagcgctggaatcccgaagtgcagtacacatccaattatgcaaaatctgccaacgttgattttactgtggacaacaatggactttatactgagcctcgccccattggcacccgttaccttacccgtcccctg

SEQ ID NO: 662 - DNA, 2208 bp, Artificial Sequence
  Description of Artificial Sequence: Synthetic polynucleotide
atggctgccgatggttatcttccagattggctcgaggacaacctctctgagggcattcgcgagtggtgggacttgaaacctggagccccgaagcccaaagccaaccagcaaaagcaggacgacggccggggtctggtgcttcctggctacaagtacctcggacccttcaacggactcgacaagggggagcccgtcaacgcggcggacgcagcggccctcgagcacgacaaggcctacgaccagcagctcaaagcgggtgacaatccgtacctgcggtataaccacgccgacgccgagtttcaggagcgtctgcaagaagatacgtcttttgggggcaacctcgggcgagcagtcttccaggccaagaagcgggttctcgaacctctcggtctggttgaggaaggcgctaagacggctcctggaaagaaacgtccggtagagcagtcgccacaagagccagactcctcctcgggcatcggcaagacaggccagcagcccgctaaaaagagactcaattttggtcagactggcgactcagagtcagtccccgatccacaacctctcggagaacctccagcaacccccgctgctgtgggacctactacaatggcttcaggcggtggcgcaccaatggcagacaataacgaaggcgccgacggagtgggtaatgcctcaggaaattggcattgcgattccacatggctgggcggcagagtcatcaccaccagcacccgcacctgggccttgcccacctacaataaccacctctacaagcaaatctccagtgcttcaacgggggccagcaacgacaaccactacttcggctacagcaccccctgggggtattttgatttcaacagattccactgccacttttcaccacgtgactggcagcgactcatcaacaacaattggggattccggcccaagagactcaacttcaaactcttcaacatccaagtcaaggaggtcacgacgaatgatggcgtcacaaccatcgctaataaccttaccagcacggttcaagtcttctcggactcggagtaccagcttccgtacgtcctcggctctgcgcaccagggctgcctccctccgttcccggcggacgtgttcatgattccgcaatacggctacctgacgctcaacaatggcagccaagccgtgggacgttcatccttttactgcctggaatatttcccttctcagatgctgagaacgggcaacaactctaccttcagctacacctttgaggaagtgcctttccacagcagctacgcgcacagccagagcctggaccggctgatgaatcctctcatcgaccaatacctgtattacctgaacagaactcaaaatcagtccggaagtgcccaaaacaaggacttgctgtttagccgtgggtctccagctggcatgtctgttcagcccaaaaactggctacctggaccctgttatcggcagcagcgcgtttctaaaacaaaaacagacaacaacaacagcaattttacctggactggtgcttcaaaatataacctcaatgggcgtgaatccatcatcaaccctggcactgctatggcctcacacaaagacgacgaagacaagttctttcccatgagcggtgtcatgatttttggaaaagagagcgccggagcttcaaacactgcattggacaatgtcatgattacagacgaagaggaaattaaagccactaaccctgtggccaccgaaagatttgggaccgtggcagtcaatttccagagcagcagcacagaccctgcgaccggagatgtgcatgctatgggaacattacctggcatggtgtggcaagatagagacgtgtacctgcagggtcccatttgggccaaaattcctcacacagatggacactttcacccgtctcctcttatgggcggctttggactcaagaacccgcctcctcagatcctcatcaaaaacacgcctgttcctgcgaatcctccggcggagttttcagctacaaagtttgcttcattcatcacccaatactccacaggacaagtgagtgtggaaattgaatgggagctgcagaaagaaaacagcaagcgctggaatcccgaagtgcagtacacatccaattatgcaaaatctgccaacgttgattttactgtggacaacaatggactttatactgagcctcgccccattggcacccgttaccttacccgtcccctg

SEQ ID NO: 663 - DNA, 2208 bp, Artificial Sequence
  Description of Artificial Sequence: Synthetic polynucleotide
atggctgccgatggttatctcccagattggctcgaggacaacctctctgagggcattcgcgagtggtgggacttgaaacctggagccccgaagcccaaagccaaccagcaaaagcaggacgacggccggggtctggtgcttcctggctacaagtacctcggacccttcaacggactcgacaagggggagcccgtcagcgcggcggacgcagcggccctcgagcacgacaaggcctacgaccagcagctcaaagcgggtgacaatccgtacctgcggtataaccacgccgacgccgagtttcaggagcgtctgcaagaagatacgtcttttgggggcaacctcgggcgagcagtcttccaggccaagaagcgggttctcgaacctctcggtctggttgaggaaggcgctaagacggctcctggaaagaaacgtccggtagagcagtcgccacaagagccagactcctcctcgggcatcggcaagacaggccagcagcccgctaaagagagactcaattttggtcagactggcgactcagagtcagtccccgatccacaacctctcggagaacctccagcaacccccgctgctgtgggacctactacaatggcttcaggcggtggcgcaccaatggcagacaataacgaaggcgccgacggagtgggtaatgcctcaggaaattggcattgcgattccacatggctgggcgacagagtcatcaccaccagcacccgcacctgggccttgcccacctacaataaccacctctacaagcaaatctccagtgcttcaacgggggccagcaacgacaaccactacttcggctacagcaccccctgggggtattttgatttcaacagattccactgccacttttcaccacgtgactggcagcgactcatcaacaacaattggggattccggcccaagagactcaacttcaaactcttcaacatccaagtcaaggaggtcacgacgaatgatggcgtcacaaccatcgccaataaccttaccagcacggttcaagtcttctcggactcggagtaccagcttccgtacgtcctcggctctgcgcaccagggctgcctccctccgttcccggcggacgtgttcatgattccgcaatacggctacctgacgctcaacaatggcagccaagccgtgggacgttcatccttttactgcctggaatatttcccttctcagatgctgagaacgggcaacaactttaccttcagctacacctttgaggaagtgcctttccacagcagctacgcgcacagccagagcctggaccggctgatgaatcctctcatcgaccaatacctgtattacctgaacagaactcaaaatcagtccggaagtgcccaaaacaaggacttgctgtttagccgtgggtctccagctggcatgtctgttcagcccaaaaactggctacctggaccctgttatcggcagcagcgcgtttctaaaacaaaaacagacaacaacaacagcaattttacctggactggtgcttcaaaatataacctcaatgggcgtgaatccatcatcaaccctggcactgctatggcctcacacaaagacgacgaagacaagttctttcccatgagcggtgtcatgatttttggaaaagagagcgccggagcttcaaacactgcattggacaatgtcatgattacagacgaagaggaaattaaagccactaaccctgtggccaccgaaagatttgggaccgtggcagtcaatttccagagcagcagcacagaccctgcgaccggagatgtgcatgctatgggagcattacctggcatggtgtggcaagatagagacgtgtacctgcagggtcccatttgggccaaaattcctcacacagatggacactttcacccgtctcctcttatgggcggctttggactcaagaacccgcctcctcagatcctcatcaaaaacacgcctgttcctgcgaatcctccggcggagttttcagctacaaagtttgcttcattcatcacccaatactccacaggacaagtgagtgtggaaattgaatgggagctgcagaaagaaaacagcaagcgctggaatcccgaagtgcagtacacatccaattatgcaaaatctgccaacgttgattttactgtggacaacaatggactttatactgagcctcgccccattggcacccgttaccttacccgtcccctg

SEQ ID NO: 664 - DNA, 2208 bp, Artificial Sequence
  Description of Artificial Sequence: Synthetic polynucleotide
atggctgccgatggttatcttccagattggctcgaggacaacctctctgagggcattcgcgagtggtgggacttgaaacctggagccccgaagcccaaagccaaccagcaaaagcaggacgacggccggggtctggtgcttcctggctacaagtacctcggacccttcaacggactcgacaagggggagcccgtcaacgcggcggacgcagcggccctcgagcacgacaaggcctacgaccagcagctcaaagcgggtgacaatccgtacctgcggtataaccacgccgacgccgagtttcaggagcgtctgcaagaagatacgtcttttgggggcaacctcgggcgagcagtcttccaggccaagaagcgggttctcgaacctctcggtctggttgaggaaggcgctaagacggctcctggaaagaaacgtccggtagagcagtcgccacaagagccagactcctcctcgggcatcggcaagacaggccagcagcccgctaaaaagagactcaattttggtcagactggcgactcagagtcagtccccgatccacaacctctcggagaacctccagcaacccccgctgctgtgggacctactacaatggcttcaggcggtggcgcaccaatggcagacaataacgaaggcgccgacggagtgggtaatgcctcaggaaattggcattgcgattccacatggctgggcgacagagtcatcaccaccagcacccgcacctgggccttgcccacctacaataaccacctctacaagcaaatctccagtgcttcaacgggggccagcaacgacaaccactacttcggctacagcaccccctgggggtattttgatttcaacagattccactgccacttttcaccacgtgactggcagcgactcatcaacaacaattggggattccggcccaagagactcaacttcaaactcttcaacatccaagtcaaggaggtcacgacgaatgatggcgtcacaaccatcgctaataaccttaccagcacggttcaagtcttctcggactcggagtaccagcttccgtacgtcctcggctctgcgcaccagggctgcctccctccgttcccggcggacgtgttcatgattccgcaatacggctacctgacgctcaacaatggcagccaagccgtgggacgttcatccttttactgcctggaatatttcccttctcagatgctgagaacgggcaacaactttaccttcagctacacctttgaggaagtgcctttccacagcagctacgcgcacagccagagcctggaccggctgatgaatcctctcatcgaccaatacctgtattacctgaacagaactcaaaatcagtccggaagtgcccaaaacaaggacttgctgtttagccgtgggtctccagctggcatgtctgttcagcccaaaaactggctacctggaccctgttatcggcagcagcgcgtttctaaaacaaaaacagacaacaacaacagcaattttacctggactggtgcttcaaaatataacctcaatgggcgtgaatccatcatcaaccctggcactgctatggcctcacacaaagacgacgaagacaagttctttcccatgagcggtgtcatgatttttggaaaagagagcgccggagcttcaaacactgcattggacaatgtcatgattacagacgaaggggaaattaaagccactaaccctgtggccaccgaaagatttgggaccgtggcagtcaatttccagagcagcagcacagaccctgcgaccggagatgtgcatgctatgggagcattacctggcatggtgtggcaagatagagacgtgtacctgcagggtcccatttgggccaaaattcctcacacagatggacactttcacccgtctcctcttatgggcggctttggactcaagaacccgcctcctcagatcctcatcaaaaacacgcctgttcctgcgaatcctccggcggagttttcagctacaaagtttgcttcattcatcacccaatactccacaggacaagtgagtgtggaaattgaatgggagctgcagaaagaaaacagcaagcgctggaatcccgaagtgcagtacacatccaattatgcaaaatctgccaacgttgattttactgtggacaacaatggactttatactgagcctcgccccattggcacccgttaccttacccgtcccctg

SEQ ID NO: 665 - DNA, 2208 bp, Artificial Sequence
  Description of Artificial Sequence: Synthetic polynucleotide
atggctgccgatggttatcttccagattggctcgaggacaacctctctgagggcattcgcgagtggtgggacttgaaacctggagccccgaaacctaaagccaaccagcaaaagcaggacgacggccggggtctggtgcttcctggctacaagtacctcggacccttcaacggactcgacaagggggagcccgtcaacgcggcggacgcagcggccctcgagcacgacaaggcctacgaccagcagctcaaagcgggtgacaatccgtacctgcggtataaccacgccgacgccgagtttcaggagcgtctgcaagaagatacgtcttttgggggcaacctcgggcgagcagtcttccaggccaagaagcgggttctcgaaccttttggtctggttgaggaaggcgctaagacggctcctggaaagaaacgtccggtagagcagtcgccacaagagccagactcctcctcgggcatcggcaagacaggccagcagcccgctaaaaagagactcaattttggtcagactggcgactcagagtcagtccccgacccacaacctctcggagaacctccagcaacccccgctgctgtgggacctactacaatggcttcaggcggtggcgcaccaatggcagacaataacgaaggcgccgacggagtgggtaatgcctcaggaaattggcattgcgattccacatggctgggcgacagagtcatcaccaccagcacccgcacctgggccttgcccacctacaataaccacctctacaagcaaatctccagtgcttcaacgggggccagcaacgacaaccactacttcggctacagcaccccctgggggtattttgatttcaacagattccactgccacttttcaccacgtgactggcagcgactcatcaacaacaattggggattccggcccaagagactcaacttcaagctcttcaacatccaagtcaaggaggtcacgacgaacgatggcgtcacgaccatcgctaataaccttaccagcacggttcaagtcttctcggattcagagtaccaactgccgtacgtcctcggctctgcgcaccagggctgcctccctccgttcccggcggacgtgtttatgattccgcagtacggctacctaacgctcaacaatggcagccaggccgtgggacgttcatccttttactgcccggaatatttcccttctcagatgctgagaacgggcaacaactttaccttcagctacacctttgaggaagtgcctttccacagcagctacgcgcacagccagagcctggaccggctgatgaatcctctcatcgaccaatacctgtattacctgaacagaactcaaaatcagtccggaagtgcccaaaacaaggacttgctgtttagccgtgggtctccagctggcatgtctgttcagcccaaaaactggctacctggaccctgttatcggcagcagcgcgtttctaaaacaaaaacagacaacaacaacagcaattttacctggactggtgcttcaaaatataacctcaatgggcgtgaatccatcatcaaccctggcactgctatggcctcacacaaagacgacaaagacaagttctttcccatgagcggtgtcatgatttttggaaaagagagcgccggagcttcaaatactgcattggacaatgtcatgatcacagatgaagaggaaattaaagccactaaccctgtggccaccgaaagatttgggaccgtggcagtcaatttccagagcagcaacacagaccccgcgaccggagatgtgcatgttatgggagccttacctggcatggtgtggcaagacagagacgtatacctgcagggtcccatttgggccaaaattcctcacacggatggacactttcacccgtctcctctcatgggcggctttggacttaagcacccgcctcctcaaatcctcatcaaaaacacgcctgttcctgcgaatcctccggcagagttttcggctacaaagtttgcttcattcatcacccagtactccacaggacaagtgagtgtggaaattgaatgggagctgcagaaagaaaacagcaagcgctggaatcccgaagtgcagtacacatccaattatgcaaaatctgccaacgttgatttcactgtggacaacaatggactttatactgagcctcgccccattggcacccgttaccttacccgtcccttg

SEQ ID NO: 666 - DNA, 2208 bp, Artificial Sequence
  Description of Artificial Sequence: Synthetic polynucleotide
atggctgccgatggttatcttccagattggctcgaggacaacctctctgagggcattcgcgagtggtgggacttgaaacctggagccccgaaacctaaagccaaccagcaaaagcaggacgacggccggggtctggtgcttcctggctacaagtacctcggacccttcaacggactcgacaagggggagcccgtcaacgcggcggacgcagcggccctcgagcacgacaaggcctacgaccagcagctcaaagcgggtgacaatccgtacctgcggtataaccacgccgacgccgagtttcaggagcgtctacaagaagatacgtcttttgggggcaacctcgggcgagcagtcttccaggccaagaagcgggttctcgaaccttttggtctggttgaggaaggcgctaagacggctcctggaaagaaacgtccggtagagcagtcgccacaagagccagactcctcctcgggcatcggcaagacaggccagcagcccgctaaaaagagactcaattttggtcagactggcgactcagagtcagtccccgacccacaacctctcggagaacctccagcaacccccgctgctgtgggacctactacaatggcttcaggcggtggcgcaccaatggcagacaataacgaaggcgccgacggagtgggtaatgcctcaggaaattggcattgcgattccacatggctgggcgacagagtcatcaccaccagcacccgcacctgggccttgcccacctacaataaccacctctacaagcaaatctccagtgcttcaacgggggccagcaacgacaaccactacttcggctacagcaccccctgggggtattttgatttcaacagattccactgccacttttcaccacgtgactggcagcgactcatcaacaacaattggggattccggcccaagagactcaacttcaagctcttcaacatccaagtcaaggaggtcacgacgaacgatggcgtcacgaccatcgctaataaccttaccagcacggttcaagtcttctcggattcagagtaccaactgccgtacgtcctcggctctgcgcaccagggctgcctccctccgttcccggcggacgtgttcatgattccgcagtacggctacctaacgctcaacaatggcagccaggccgtgggacgttcatccttttactgcctggaatatttcccttctcagatgctgagaacgggcaacaactttaccttcagctacacctttgaggaagtgcctttccacagcagctacgcgcacagccagagcctggaccggctgatgaatcctctcatcgaccaatacctgtattacctgaacagaactcaaaatcagtccggaagtgcccaaaacaaggacttgctgtttagccgtgggtctccagctggcatgtctgttcagcccaaaaactggctacctggaccctgttatcggcagcagcgcgtttctaaaacaaaaacagacaacaacaacagcaattttacctggactggtgcttcaaaatataacctcaatgggcgtgaatccatcatcaaccctggcactgctatggcctcacacaaagacgacaaagacaagttctttcccatgagcggtgtcatgatttttggaaaagagagcgccggagcttcaaatactgcattggacaatgtcatgatcacagatgaagaggaaattaaagccactaaccctgtggccaccgaaagatttgggaccgtggcagtcaatttccagagcagcgacacagaccccgcgaccggagatgtgcatgttatgggagccttacctggcatggtgtggcaagacagagacgtatacctgcagggtcccatttgggccaaaattcctcacacggatggacactttcacccgtctcctctcatgggcggctttggacttaagcacccgcctcctcaaatcctcatcaaaaacacgcctgttcctgcgaatcctccggcagagttttcggctacaaagtttgcttcattcatcacccagtactccacaggacaagtgagtgtggaaattgaatgggagctgcagaaagaaaacagcaagcgctggaatcccgaagtgcagtacacatccaattatgcaaaatctgccaacgttgatttcactgtggacaacaatggactttatactgagcctcgccccattggcacccgttaccttacccgtcccttg

SEQ ID NO: 667 - DNA, 2208 bp, Artificial Sequence
  Description of Artificial Sequence: Synthetic polynucleotide
atggctgccgatggttatcttccagattggctcgaggacaacctctctgagggcattcgcgagtggtgggacttgaaacctggagccccgaaacctaaagccaaccagcaaaagcagggcgacggccggggtctggtgcttcctggctacaagtacctcggacccttcaacggactcgacaagggggagcccgtcaacgcggcggacgcagcggccctcgagcacgacaaggcctacgaccagcagctcaaagcgggtgacaatccgtacctgcggtataaccacgccgacgccgagtttcaggagcgtctgcaagaagatacgtcttttgggggcaacctcgggcgagcagtcttccaggccaagaagcgggttctcgaaccttttggtctggttgaggaaggcgctaagacggctcctggaaagaaacgtccggtagagcagtcgccacaagagccagactcctcctcgggcatcggcaagacaggccagcagcccgctaaaaagagactcaattttggtcagactggcgactcagagtcagtccccgacccacaacctctcggagaacctccagcaacccccgctgctgtgggacctactacaatggcttcaggcggtggcgcaccaatggcagacaataacgaaggcgccgacggagtgggtaatgcctcaggaaattggcattgcgattccacatggctgggcgacagagtcatcaccaccaacactcgcacctgggccttgcccacctacaataaccacctctacaagcaaatctccagtgcttcaacgggggccagcaacgacaaccactacttcggctacagcaccccctgggggtattttgatttcaacagattccactgccacttttcaccacgtgactggcagcgactcatcaacaacaattggggattccggcccaagagactcaacttcaagctcttcaacatccaagtcaaggaggtcacgacgaacgatggcgtcacgaccatcgctaataaccttaccagcacggttcaagtcttctcggattcagagtaccaactgccgtacgtcctcggctctgcgcaccagggctgcctccctccgttcccggcggacgtgttcatgattccgcagtacggctacctaacgctcaacaatggcagccaggccgtgggacgttcatccttttactgcctggaatatttcccttctcagatgctgagaacgggcaacaactttaccttcagctacacctttgaggaagtgcctttccacagcagttacgggcacagccagagcctggaccggctgatgaatcttctcatcgaccaatacctgtattacctgaacagaactcaaaatcagtccggaagtgcccaaaacaaggacttgctgtttagccgtgggtctccagctggcatgtttgttcagcccaaaaactggctacctggaccctgttatcggcagcagcgcgtttctaaaacaaaaacagacaacaacaacagcaattttacctggactggtgcttcaaaatataacctcaatgggcgtgaatccatcatcaaccctggcactgctatggcctcacacaaagacgacgaagacaagttctttcccatgagcggtgtcatgatttttggaaaagagagcgccggagcttcaaatactgcattggacaatgtcatgatcacagatgaagaggaaattaaagccactaaccctgtggccaccgaaagatttgggaccgtggcagtcaatttccagagcagcagcacagaccccgcgaccggagatgtgcatgttatgggagccttacctggcatggtgtggcaagacagagacgtatacctgcagggtcccatttgggccaaaattcctcacacggatggacactttcacccgtctcctctcatgggcggctttggacttaagcacccgcctcctcaaatcctcatcaaaaacacgcctgttcctgcgaatcctccggcagagttttcggctacaaagtttgcttcattcatcacccagtactccacaggacaagtgagtgtggaaattgaatgggagctgcagaaagaaaacagcaagcgctggaatcccgaagtgcagtacacatccaattatgcaaaatctgccaacgttgatttcactgtggacaacaatggactttatactgagcctcgccccattggcacccgttaccttacccgtcccttg

SEQ ID NO: 668 - DNA, 2208 bp, Artificial Sequence
  Description of Artificial Sequence: Synthetic polynucleotide
atggctgccgatggttatcttccagattggctcgaggacaacctctctgagggcattcgcgagtggtgggacttgaaacctggagccccgaaacctaaagccaaccagcaaaagcaggacgacggccggggtctggtgcttcctggctacaagtacctcggacccttcaacggactcgacaagggggagcccgtcaacgcggcggacgcagcggccctcgagcacgacaaggcctacgaccagcagctcaaagcgggtgacaatccgtacctgcggtataaccacgccgacgccgagtttcaggagcgtctgcaagaagatacgtcttttgggggcaacctcgggcgagcagtcttccaggccaagaagcgggttctcgaaccttttggtctggttgaggaaggcgctaagacggctcctggaaagaaacgtccggtagagcagtcgccacaagagccagactcctcctcgggcatcggcaagacaggccagcagcccgctaaaaagagactcaattttggtcagactggcgactcagagtcagtccccgacccacaacctctcggagaacctccagcaacccccgctgctgtgggacctactacaatggcttcaggcggtggcgcaccaatggcagacaataacgaaggcgccgacggagtgggtaatgcctcaggaaattggcattgcgattccacatggctgggcgacagagtcatcaccaccaacacccgcacctgggccttgcccacctacaataaccacctctacaagcaaatctccagtgcttcaacgggggccagcaacgacaaccactacttcggctacagcaccccctgggggtattttgatttcaacagattccactgccacttttcaccacgtgactggcagcgactcatcaacaacaattggggattccggcccaagagactcaacttcaagctcttcaacatccaagtcaaggaggtcacgacgaacgatggcgtcacgaccatcgctaataaccttaccagcacggttcaagtcttctcggattcagagtaccaactgccgtacgtcctcggctctgcgcaccagggctgcctccctccgttcccggcggacgtgttcatgattccgcagtacggctacctaatgctcaacaatggcagccaggccgtgggacgttcatccttttactgcctggaatatttcccttctcagatgctgagaacgggcaacaactttaccttcagctacacctttgaggaagtgcctttccacagcagctacgcgcacagccagagcctggaccggctgatgaatcctctcatcgaccaatacctgtattacctgaacagaactcaaaatcagtccggaagtgcccaaaacaaggacttgctgtttagccgtgggtctccagctggcatgtctgttcagcccaaaaactggctacctggaccctgttatcggcagcagcgcgtttctaaaacaaaaacagacaacaacaacagcaattttacctggactggtgcttcaaaatataacctcaatgggcgtgaatccatcatcaaccctggcactgctatggcctcacacaaagacgacgaagacaagttctttcccatgagcggtgtcatgatttttggaaaagagagcgccggagcttcaaatactgcattggacaatgtcatgatcacagatgaagaggaaattaaagccactaaccctgcggccaccgaaagatttgggaccgtggcagtcaatttccagagcagcagcacagaccccgcgaccggagatgtgcatgttatgggagccttacctggcatggtgtggcaagacagagacgtatacctgcagggtcccatttgggccaaaattcctcacacggatggacactttcacccgtctcctctcatgggcggctttggacttaagcacccgcctcctcaaatcctcatcaaaaacacgcctgttcctgcgaatcctccggcagagttttcggctacaaagtttgcttcattcatcacccagtactccacaggacaagtgagtgtggaaattgaatgggagctgcagaaagaaaacagcaagcgctggaatcccgaagtgcagtacacatccaattatgcaaaatctgccaacgttgatttcactgtggacaacaatggactttatactgagcctcgccccattggcacccgttaccttacccgtcccttg

SEQ ID NO: 669 - DNA, 2208 bp, Artificial Sequence
  Description of Artificial Sequence: Synthetic polynucleotide
atggctgccgatggttatcttccagattggctcgaggacaacctctctgagggcattcgcgagtggtgggacttgaaacctggagccccgaaacctaaagccaaccagcaaaagcaggacgacggccggggtctggtgcttcctggctacaagtacctcggacccttcaacggactcgacaagggggagcccgtcaacgcggcggacgcagcggccctcgagcacgacaaggcctacgaccagcagctcaaagcgggtgacaatccgtacctgcggtataaccacgccgacgccgagtttcaggagcgtctgcaagaagatacgtcttttgggggcaacctcgggcgagcagtcttccaggccaagaagcgggttctcgaaccttttggtctggttgaggaaggcgctaagacggctcctggaaagaaacgtccggtagagcagtcgccacaagagccagactcctcctcgggcatcggcaagacgggccagcagcccgctaaaaagagactcaattttggtcagactggcgactcagagtcagtccccgacccacaacctctcggagaacctccagcaacccccgctgctgtgggacctactacaatggcttcaggcggtggcgcaccaatggcagacaataacgaaggcgccgacggagtgggtaatgcctcaggaaattggcattgcgattccacatggctgggcgacagagtcatcaccaccagcacccgcacctgggccttgcccacctacaataaccacctctacaagcaaatctccagtgcttcaacgggggccagcaacgacaaccactacttcggctacagcaccccctgggggtattttgatttcaacagattccactgccacttttcaccacgtgactggcagcgactcatcaacaacaattggggattccggcccaagagactcaacttcaagctcttcaacatccaagtcaaggaggtcacgacgaacgatggcgtcacgaccatcgctaataaccttaccagcacggttcaagtcttctcggattcagagtaccaactgccgtacgtcctcggctctgcgcaccagggctgcctccctccgttcccggcggacgtgttcatgattccgcagtacggctacctaacgctcaacaatggcagccaggccgtgggacgttcatccttttactgcctggaatatttcccttctcagatgctgagaacgggcaacaactttaccttcagctacacctttgaggaagtgcctttccacagcagctacgcgcacagccagagcctggaccggctgatgaatcctctcatcgaccaatacctgtattacctgaacagaactcaaaatcagtccggaagtgcccaaaacaaggacttgctgtttagccgtgggtctccagctggcatgtccgttcagcccaaaaactggctacctggaccctgttatcggcagcagcgcgtttctaaaacaaaaacagacaacaacaacagcaattttacctggactggtgcttcaaaatataacctcaatgggcgtgaatccatcatcaaccctggcactgctatggcctcacacaaagacgacgaagacaagttctttcccatgagcggtgtcatgatttttggaaaagagagcgccggagcttcaaatactgcattggacaatgtcatgatcacagatgaagaggaaattaaagccactaaccctgtggccaccgaaagatttgggaccgtggcagtcaatttccagagcagcagcacagaccccgcgaccggagatgtgcatgttatgggagccttacctggcatggtgtggcaagacagagacgtatacctgcagggtcccatttgggccaaaattcctcacacggatggacactttcacccgtctcctctcatgggcggctttggacttaagcacccgcctcctcaaatcctcatcaaaaacacgcctgttcctgcgaatcctccggcagagttttcggctacaaagtttgcttcattcatcacccagtactccacaggacaagtgagtgtggaaattgaatgggagctgcagaaagaaaacagcaagcgctggaatcccgaagtgcagtacacatccaattatgcaaaatctgccaacgttgatttcactgtggacaacaatggactttatactgagcctcgccccattggcacccgttaccttacccgtcccttg

SEQ ID NO: 670 - DNA, 2208 bp, Artificial Sequence
  Description of Artificial Sequence: Synthetic polynucleotide
  misc_feature (305)..(305): n is a, c, t, or g
atggctgccgatggttatcttccagattggctcgaggacaacctctctgagggcattcgcgagtggtgggacttgaaacctggagccccgaaacctaaagccaaccagcaaaagcaggacgacggccggggtctggtgcttcctggctacaagtacctcggacccttcaacggactcgacaagggggagcccgtcaacgcggcggacgcagcggccctcgagcacgacaaggcctacgaccagcagctcaaagcgggtgacaatccgtacctgcggtataaccacgccgacgccgagtttcaggngcgtctgcaagaagatacgtcttttgggggcaacctcgggcgagcagtcttccaggccaagaagcgggttctcgaaccttttggtctggttgaggaaggcgctaagacggctcctggaaagaaacgtccggtagagcagtcgccacaagagccagactcctcctcgggcatcggcaagacaggccagcagcccgctaaaaagagactcaattttggtcagactggcgactcagagtcagtccccgacccacaacctctcggagaacctccagcaacccccgctgctgtgggacctactacaatggcttcaggcggtggcgcaccaatggcagacaataacgaaggcgccgacggagtgggtaatgcctcaggaaattggcattgcgattccacatggctgggcggcagagtcatcaccaccagcacccgcacctgggccttgcccacctacaataaccacctctacaagcaaatctccagtgcttcaacgggggccagcaacgacaaccactacttcggccacagcaccccctgggggtattttgatttcaacagattccactgccacttttcaccacgtgactggcagcgactcatcaacaacaattggggattccggcccaagagactcaacttcaagctcttcaacatccaagtcaaggaggtcacgacgaacgatggcgtcacgaccatcgctaataaccttaccagcacggttcaagtcttctcggattcagagtaccaactgccgtacgtcctcggctctgcgcaccagggctgcctccctccgtccccggcggacgtgttcatgattccgcagtacggctacctaacactcaacaatggcagccaggccgtgggacgttcatccttttactgcctggaatatttcccttctcagatgctgagaacgggcaacaactttaccttcagctacacctttgaggaagtgcctttccacagcagctacgcgcacagccagagcctggaccggctgatgaatcctctcatcgaccaatacctgtattacctgaacagaactcaaaatcagtccggaagtgcccaaaacaaggacttgctgtttagccgtgggtctccagctggcatgtctgttcagcccaaaaactggctacctggaccctgttatcggcagcagcgcgtttctaaaacaaaaacagacaacaacaacagcaattttacctggactggtgcttcaaaatataacctcaatgggcgtgaatccatcatcaaccctggcactgctatggcctcacacaaagacgacaaagacaagttctttcccatgagcggtgtcatgatttttggaaaagagagcgccggagcttcaaatactgcattggacaatgtcatgatcacagatgaagaggaaattaaagccactaaccctgtggccaccgaaagatttgggaccgtggcagtcaatttccagagcagcaacacagaccccgcgaccggagatgtgcatgttatgggagccttacctggcatggtgtggcaagacagagacgtatacctgcagggtcccatttgggccaaaattcctcacacggatggacactttcacccgtctcctctcatgggcggctttggacttaagcacccgcctcctcaaatcctcatcaaaaacacgcctgttcctgcgaatcctccggcagagttttcggctacaaagtttgcttcattcatcacccagtactccacaggacaagtgagtgtggaaattgaatgggagctgcagaaagaaaacagcaagcgctggaatcccgaagtgcagtacacatccaattatgcaaaatctgccaacgttgatttcactgtggacaacaatggactttatactgagcctcgccccattggcacccgttaccttacccgtcccttg

SEQ ID NO: 671 - DNA, 2208 bp, Artificial Sequence
  Description of Artificial Sequence: Synthetic polynucleotide
atggctgccgatggttattttccagattggctcgaggacaacctttctgagggcattcgcgagtggtgggacttgaaacctggagccccgaaacctaaagccaaccagcaaaagcaggacgacggccggggtctggtgcttcctggctacaagtacctcggacccttcaacggactcgacaagggggagcccgtcaacgcggcggacgcagcggccctcgagcacgacaaggcctacgaccagcagctcaaagcgggtgacaatccgtacctgcggtataaccacgccgacgccgagtttcaggagcgtctgcaagaagatacgtcttttgggggcaacctcgggcgagcagtcttccaggccaagaagcgggttctcgaaccttttggtctggttgaggaaggcgctaagacggctcctggaaagaaacgtccggtagagcagtcgccacaagagccagactcctcctcgggcatcggcaggacaggccagcagcccgctaaaaagagactcaattttggtcagactggcgactcagagtcagtccccgacccacaacctctcggagaacctccagcgacccccgctgctgtgggacctactacaatggcttcaggcggtggcgcaccaatggcagacaataacgaaggtgccgacggagtgggtaatgcctcaggaaattggcattgcgattccacatggctgggcgacagagtcatcaccaccagcacccgcacctgggccttgcccacctacaataaccacctctacaagcaaatctccagtgcttcaacgggggccagcaacgacaaccactacttcggctacagcaccccctgggggtattttgatttcaacagattccactgccacttttcaccacgtgactggcagcgactcatcaacaacaattggggattccggcccaagagactcaacttcaagctcttcaacatccaagtcaaggaggtcacgacgaacgatggcgtcacgaccatcgctaataaccttaccagcacggttcaagtcttctcggattcagagtaccaactgccgtacgtcctcggctctgcgcaccagggctgcctccctccgttcccggcggacgtgttcatgattccgcagtacggctacctaacgctcaacaatggcagccaggccgtgggacgttcatccttttactgcctggaatatttcccttctcagatgctgagaacgggcaacaactttaccttcagctacacctttgaggaagtgcctttccacagcagctacgcgcacagccagagcctggaccggctgatgaatcctctcatcgaccaatacctgtattacctgaacagaactcaaaatcagtccggaagtgcccaaaacaaggacttgctgtttagccgtgggtctccagctggcatgtctgttcagcccaaaaactggctacctggaccctgttatcggcagcagcgcgtttctaaaacaaaaacagacaacaacaacagcaattttacctggactggtgcttcaaaatataacctcaatgggcgtgaatccatcatcaaccctggcactgctatggcctcacacaaagacgacgaagacaagttctttcccatgagcggtgtcatgatttttggaaaagagagcgccggagcttcaaatactgcattggacaatgtcatgatcacagatgaagaggaaattaaagccactaaccctgtggccaccgaaagatttgggaccgtggcagtcaatttccagagcagcagcccagaccccgcgaccggagatgtgcatgttatgggagccttacctggcatggtgtggcaagacagagacgtatacctgcagggtcccatttgggccaaaattcctcacacggatggacactttcacccgtctcctctcatgggcggctttggacttaagcacccgcctcctcaaatcctcatcaaaaacacgcctgttcctgcgaatcctccggcagagttttcggctacaaagtttgcttcattcatcacccagtactccacaggacaagtgagtgtggaaattgaatgggagctgcagaaagaaaacagcaagcgctggaatcccgaagtgcagtacacatccaattatgcaaaatctgccaacgttgatttcactgtggacaacaatggactttatagtgagcctcgccccattggcacccgttaccttacccgtcccttg

SEQ ID NO: 672 - DNA, 2208 bp, Artificial Sequence
  Description of Artificial Sequence: Synthetic polynucleotide
atggctgccgatggttatcttccagattggctcgaggacaacctctctgagggcattcgcgagtggtgggacttgaaacctggagccccgaaacctaaagccaaccagcaaaagcaggacgacggccggggtctggtgcttcctggctacaagtacctcggacccttcaacggactcgacaagggggagcccgtcaacgcggcggacgcagcggccctcgagcacgacaaggcctacgaccagcagctcaaagcgggtgacaatccgtacctgcggtataaccacgccgacgccgagtttcaggagcgtctgcaagaagatacgtcttttgggggcaacctcgggcgagcagtcttccaggccaagaagcgggttctcgaaccttttggtctggttgaggaaggcgctaagacggctcctggaaagaaacgtccggtagagcagtcgccacaagagccagactcctcctcgggcatcggcaagacaggccagcagcccgctaaaaagagactcaattttggtcagactggcgactcagagtcagtccccgacccacaacctctcggagaacctccagcaacccccgctgctgtgggacctactacaatggcttcaggcggtggcgcaccaatggcagacaataacgaaggcgccgacggagtgggtaatgcctcaggaaattggcattgcgattccacatggctgggcgacagagtcatcaccaccagcacccgcacctgggccttgcccacctacaataaccacctctacaagcaaacctccagtgcttcaacgggggccagcaacgacaaccactacttcggctacagcaccccctgggggtattttgatttcaacagattccactgccacttttcaccacgtgactggcagcgactcatcaacaacaattggggattccggcccaagagactcaacttcaagctcttcaacatccaagtcaaggaggtcacgacgaacgatggcgtcacgaccatcgctaataaccttaccagcacggttcaagtcttctcggattcagagtaccaactgccgtacgtcctcggctctgcgcaccagggctgcctccctccgttcccggcggacgtgttcatgattccgcagtacggctacctaacgctcaacaatggcagccaggccgtgggacgttcatccttttactgcctggaatatttcccttctcagatgctgagaacgggcaacaactttaccttcagctacacctttgaggaagtgcctttccacagcagctacgcgcacagccagagcctggaccggctgatgaatcctctcatcgaccaatacctgtattacctgaacagaactcaaaatcagtccggaagtgcccaaaacaaggacttgctgtttagccgtgggtctccagctggcatgtctgttcagcccaaaaactggctacctggaccctgttatcggcagcagcgcgtttctaaaacaaaaacagactacaacaacagcaattttacctggactggtgcttcaaaatataacctcaatgggcgtgaatccatcatcaaccctggcactgctatggcctcacacaaagacgacgaagacaagttctttcccatgagcggtgtcatgatttttggaaaagagagcgccggagcttcaaatactgcattggacaatgtcatgatcacagatgaagaggaaattaaagccactaaccctgtggccaccgaaagatttgggaccgtggcagtcaatttccagagcagcagcacagaccccgcgaccggagatgtgcatgttatgggagccttacctggcatggtgtggcaagacagagacgtatacctgcagggtcccatttgggccaaaattcctcacacggatggacactttcacccgtctcctctcatgggcggctttggacttaagcacccgcctcctcaaatcctcatcaaaaacacgcctgttcctgcgaatcctccggcagagttttcggctacaaagtttgcttcattcatcacccagtactccacaggacaagtgagtgtggaaattgaatgggagctgcagaaagaaaacagcaagcgctggaatcccgaagtgcagtacacatccaattatgcaaaatctgccaacgttgatttcactgtggacaacaatggactttatactgagcctcgccccattggcacccgttaccttacccgtcccttg

SEQ ID NO: 673 - DNA, 2208 bp, Artificial Sequence
  Description of Artificial Sequence: Synthetic polynucleotide
atggctgccgatggttatcctccagattggctcgaggacaacctctctgagggcattcgcgagtggtgggacttgaaacctggagtcccgaaacctaaagccaaccagcaaaagcaggacgacggccggggtctggtgcttcctggctacaagtacctcggacccttcaacggactcgacaagggggagcccgtcaacgcggcggacgcagcggccctcgagcacgacaaggcctacgaccagcagctcaaagcgggtgacaatccgtacctgcggtataaccacgccgacgccgagtttcaggagcgtctgcaagaagatacgtcttttgggggcaacctcgggcgagcagtcttccaggccaagaagcgggttctcgaaccttttggtctggttgaggaaggcgctaagacggctcctggaaagaaacgtccggtagagcagtcgccacaagagccagactcctcctcgggcatcggcaagacaggccagcagcccgctaaaaagagactcaattttggtcagactggcgactcagagtcagtccccgacccacaacctctcggagaacctccagcaacccccgctgctgtgggacctactacaatggcttcaggcggtggcgcaccaatggcagacaataacgaaggcgccgacggagtgggtaatgcctcaggaaattggcattgcgattccacatggctgggcgacagagtcatcaccaccagcacccgcacctgggccttgcccacctacaataaccacctctacaagcaaatctccagtgcttcaacgggggccagcaacgacaaccactacttcggctacagcaccccctgggggtattttgatttcaacagattccactgccacttttcaccacgtgactggcagcgactcatcaacaacaattggggattccggcccaagagactcaacttcaagctcttcaacatccaagtcaaggaggtcacgacgaacgatggcgtcacgaccatcgctaataaccttaccagcacggttcaagtcttctcggattcagagtaccaactgccgtacgtcctcggctctgcgcaccagggctgcctccctccgttcccggcggacgtgttcatgattccgcagtacggctacctaacgctcaacaatggcagccaggccgtgggacgttcatccttttactgcctggaatatttcccttctcagatgctgagaacgggcaacaactttaccttcagctacacctttgaggaagtgcctttccacagcagctacgcgcacagccagagcctggaccggctgatgaatcctctcatcgaccaatacctgtattacctgaacagaactcaaaatcagtccggaagtgcccaaaacaaggacttgctgtttagccgtgggtctccagctggcatgtctgttcagcccaaaaactggctacctggaccctgttatcggcagcagcgcgtttctaaaacaaaaacagacaacaacaacagcaattttacctggactggtgcttcaaaatataacctcaatgggcgtgaatccatcatcaaccctggcactgctatggcctcacacaaagacgacgaagacaagttctttcccatgagcggtgtcatgatttttggaaaagagagcgccggagcttcaaatactgcattggacaatgtcatgatcacagatgaagaggaaattaaagccactaaccctgtggccaccgaaagatttgggaccgtggcagtcaatttccagagcagcagcacagaccccgcgaccggagatgtgcatgttatgggagccttacctggcatggtgtggcaagacagagacgtatacctgcagggtcccatttgggccaaaattcctcacacggatggacactttcacccgtctcctctcatgggcggctttggacttaagcacccgcctcctcaaatcctcatcaaaaacacgcctgttcctgcgaatcctccggcagagttttcggctacaaagtttgcttcattcatcacccagtactccacaggacaagtgagtgtggaaattgaatgggagctgcagaaagaaaacagcaagcgctggaatcccgaagtgcagtacacatccaattatgcaaaatctgccaacgttgatttcactgtggacaacaatggactttatactgagcctcgccccattggcacccgttaccttacccgtcccttg

SEQ ID NO: 674 - DNA, 2196 bp, Artificial Sequence
  Description of Artificial Sequence: Synthetic polynucleotide
atggctgccgatggttatcttccagattggctcgaggacaacctctctgagggcattcgcgagtggtgggacttgaaacctggagccccgaaacctaaagccaaccagcaaaagcaggacgacggccggggtctggtgcttcctggctacaagtacctcggacccttcaacggactcgacaagggggagcccgtcaacgcggcggacgcagcggccctcgagcacgacaaggcctacgaccagcagctcaaagcgggtgacaatccgtacctgcggtataaccacgccgacgccgagtttcaggagcgtctgcaagaagatacgtcttttgggggcaacctcgggcgagcagtcttccaggccaagaagcgggttctcgaaccttttggtctggttgaggaaggcgctaagacggctcctggaaagaaacgtccggtagagcagtcgccacaagagccagactcctcctcgggcatcggcaagacaggccagcagcccgctaaaaagagactcaattttggtcagactggcgactcagagtcagtccccgacccacaacctctcggagaacctccagcaacccccgctgctgtgggacctactacaatggcttcaggcggtggcgcaccaatggcagacaataacgaaggcgccgacggagtgggtaatgcctcaggaaattggcattgcgattccacatggctgggcgacagagtcatcaccaccagcacccgcacctgggccttgcccacctacaataaccacctctacaagcaaatctccagtgcttcaacgggggccagcaacgacaaccactacttcggctacagcaccccctgggggtattttgatttcaacagattccactgccacttttcaccacgtgactggcagcgactcatcaacaacaattggggattccggcccaagagactcaacttcaagctcttcaacatccaagtcaaggaggtcacgacgaacgatggcgtcacgaccatcgctaataaccttaccagcacggttcaagccttctcggattcagagtaccaactgccgtacgtcctcggctctgcgcaccagggctgcctccctccgttcccggcggacgtgttcatgattccgcagtacggctacctaacgctcaacaatggcagccaggccgtgggacgttcatccttttactgcctggaatatttcccttctcagatgctgagaacgggcaacaactttaccttcagctacacctttgaggaagtgcctttccacagcagctacgcgcacagccagagcctggaccggctgatgaatcctctcatcgacccatacctgtattacctgaacagaactcaaaatcagtccggaagtgcccaaaacaaggacttgctgtttagccgtgggtctccagctggcatgtctgttcagcccaaaaactggctacctggaccctgttatcggcagcagcgcgtttctaaaacaaaaacagacaacaacaacagcaattttacctggactggtgcttcaaaatataacctcaatgggcgtgaatccatcatcaaccctggcactgctatggcctcacacaaagacgacgaagacaagttctttcccatgagcggtgtcatgatttttggaaaagagagcgccggagcttcaaatactgcattggacaatgtcatgatcacagatgaagaggaaattaaagccactaaccctgtggccaccgaaagatttgggaccgtggcagtcaatttccagagcagcagcacagaccccgcgaccggagatgtgcatgttatgggagccttacctggcatggtgtggcaagacagagacgtatacctgcagggtcccatttgggccaaaattcctcacacggatggacactttcacccgtctcctctcatgggcggctttggacttaagcacccgcctcctcaaatcctcatcaaaaacacgcctgttcctgcgaatcctccggcagagttttcggctacaaagtttgcttcattcatcacccagtactccacaggacaagtgagtgtggaaattgaatgggagctgcagaaagaaaacagcaagcgctggaatcccgaagtgcagtacacatccaattatgcaaaatctgccaacgttgatttcactgtggacaacaatggactttatactgagcctcgccccattggcacccgttacctt

SEQ ID NO: 675 - DNA, 2208 bp, Artificial Sequence
  Description of Artificial Sequence: Synthetic polynucleotide
atggctgccgatggttatcttccagattggctcgaggacaacctctctgagggcattcgcgagtggtgggacttgaaacctggagccccgaaacctaaagccaaccagcaaaagcaggacgacggccggggtctggtgcttcctggctacaagtacctcggacccttcaacggactcgacaagggggagcccgtcaacgcggcggacgcagcggccctcgagcacgacaaggcctacgaccagcagctcaaagcgggtgacaatccgtacctgcggtataaccacgccgacgccgagtttcaggagcgtctgcaagaagatacgtcttttgggggcaacctcgggcgagcagtcttccaggccaagaagcgggttctcgaaccttttggtctggttgaggaaggcgctaagacggctcctggaaagaaacgtccggtagagcagtcgccacaagagccagactcctcctcgggcatcggcaagacaggccagcagcccgctaaaaagagactcaattttggtcagactggcgactcagagtcagtccccgacccacaacctctcggagaacctccagcaacccccgctgctgtgggacctactacaatggcttcaggcggtggcgcaccaatggcagacaataacgaaggcgccgacggagtgggtaatgcctcaggaaattggcattgcgattccacatggctgggcgacagagtcatcaccaccagcacccgcacctgggccttgcccacctacaataaccacctctacaagcaaatctccagtgcttcaacgggggccagcaacgacaaccactacttcggctacagcaccccctgggggtattttgatttcaacagattccactgccacttttcaccacgtgactggcagcgactcatcaacaacaattggggattccggcccaagagactcaacttcaagctcttcaacatccaagtcaaggaggtcacgacgaacgatggcgtcacgaccatcgctaataaccttaccagcacggttcaagtcttctcggattcagagtaccaactgccgtacgtcctcggctctgcgcaccagggctgcctccctccgttcccggcggacgtgttcatgattccgcagtacggctacctaacgctcaacaatggcagccaggccgtgggacgttcatccttttactgcctggaatatttcccttctcagatgctgagaacgggcaacaactttaccttcagctacacctttgaggaagtgcctttccacagcagctacgcgcacagccagagcctggaccggctgatgaatcctctcatcgaccaatacctgtattacctgaacagaactcaaaatcagtccggaagtgcccaaaacaaggacttgctgtttagccgtgggtctccagctggcatgtctgttcagcccaaaaactggctacctggaccctgttatcggcagcagcgcgtttctaaaacaaaaacagacaacaacaacagcaattttacctggactggtgcttcaaaatataacctcaatgggcgtgaatccatcatcaaccctggcactgctatggcctcacacaaagacgacgaagacaagttctttcccatgagcggtgtcatgatttttggaaaagagagcgccggagcttcaaatactgcattggacaatgtcatgatcacagatgaagaggaaattaaagccactaaccctgtggccaccgaaagatttgggaccgtggcagtcaatttccagagcagcagcacagaccccgcgaccggagatgtgcatgttatgggagccttacctggcatggtgtggcaagacagagacgtatacctgcagggtcccatttgggccaaaattcctcacacggatggacactctcacccgtctcctctcatgggcggctttggacttaagcacccgcctcctcaaatcctcatcaaaaacacgcctgttcctgcgaatcctccggcagagttttcggctacaaagtttgcttcattcatcacccagtactccacaggacaagtgagtgtggaaattgaatgggagctgcagaaagaaaacagcaagcgctggaatcccgaagtgcagtacacatccaattatgcaaaatctgccaacgttgatttcactgtggacaacaatggactttatactgagcctcgccccattggcacccgttaccttacccgtcccttg

SEQ ID NO: 676 - DNA, 2208 bp, Artificial Sequence
  Description of Artificial Sequence: Synthetic polynucleotide
atggctgccgatggttatcttccagattggctcgaggacaacctctctgagggcattcgcgagtggtgggacttgaaacctggagccccgaaacctaaagccaaccagcaaaagcaggacgacggccggggtctggtgcttcctggctacaagtacctcggacccttcaacggactcgacaagggggagcccgtcaacgcggcggacgcagcggccctcgagcacgacaaggcctacgaccagcagctcaaagcgggtgacaatccgtacctgcggtataaccacgccgacgccgagtttcaggagcgtctgcaagaagatacgtcttttgggggcaacctcgggcgagcagtcttccaggccaagaagcgggttctcgaaccttttggtctggttgaggaaggcgctaagacggctcctggaaagaaacgtccggtagagcagtcgccacaagagccagactcctcctcgggcatcggcaagacaggccagcagcccgctaaaaagagactcaattttggtcagactggcgactcagagtcagtccccgacccacaacctctcggagaacctccagcaacccccgctgctgtgggacctactacaatggcttcaggcggtggcgcaccaatggcagacaataacgaaggcgccgacggagtgggtaatgcctcaggaaattggcattgcgattccacatggctgggcgacagagtcatcaccaccagcacccgcacctgggccttgcccacctacaataaccacctctacaagcaaatctccagtgcttcaacgggggccagcaacgacaaccactacttcggctacagcaccccctgggggtattttgatttcaacagattccactgccacttttcaccacgtgactggcagcgactcatcaacaacaattggggattccggcccaagagactcaacttcaagctcttcaacatccaagtcaaggaggtcacgacgaacgatggcgtcacgaccatcgctaataaccttaccagcacggttcaagtcttctcggattcagagtaccaactgccgtacgtcctcggctctgcgcaccagggctgcctccctccgttcccggcggacgtgttcatgattccgcagtacggctacctaacgctcaacaatggcagccaggccgtgggacgttcatccttttactgcctggaatatttcccttctcagatgctgagaacgggcaacaactttaccttcagctacacctttgaggaagtgcctttccacagcagctacgcgcacagccagagcctggaccggctgatgaatcctctcatcgacctatacctgtattacctgaacagaactcaaaatcagtccggaagtgcccaaaacaaggacttgctgtttagccgtgggtctccagctggcatgtctgttcagcccaaaaactggctacctggaccctgttatcggcagcagcgcgtttctaaaacaaaaacagacaacaacaacagcaattttacctggactggtgcttcaaaatataacctcaatgggcgtgaatccatcatcaaccctggcactgctatggcctcacacaaagacgacgaagacaagttctttcccatgagcggtgtcatgatttttggaaaagagagcgccggaacttcaaatactgcattggacaatgtcatgatcacagatgaagaggaaattaaagccactaaccctgtggccaccgaaagatttgggaccgtggcagtcaatttccagagcagcagcacagaccccgcgaccggagatgtgcatgttatgggagccttacctggcatggtgtggcaagacagagacgtatacctgcagggtcccatttgggccaaaattcctcacacggatggacactttcacccgtctcctctcatgggcggctttggacttaagcacccgcctcctcaaatcctcatcaaaaacacgcctgttcctgcgaatcctccggcagagttttcggctacaaagtttgcttcattcatcacccagtactccacaggacaagtgagtgtggaaattgaatgggagctgcagaaagaaaacagcaagcgctggaatcccgaagtgcagtacacatccaattatgcaaaatctgccaacgttgatttcactgtggacaacaatggactttatactgagcctcgccccattggcacccgttaccttacccgtcccttg

SEQ ID NO: 677 - DNA, 2208 bp, Artificial Sequence
  Description of Artificial Sequence: Synthetic polynucleotide
atggctgccgatggttatcttccagattggctcgaggacagcctctctgagggcattcgcgagtggtgggacttgaaacctggagccccgaaacctaaagccaaccagcaaaagcaggacgacggccggggtctggtgcttcctggctacaagtacctcggacccttcaacggactcgacaagggggagcccgtcaacgcggcggacgcagcggccctcgagcacgacaaggcctacgaccagcagctcaaagcgggtgacaatccgtacctgcggtataaccacgccgacgccgagtttcaggagcgtctgcaagaagatacgtcttttgggggcaacctcgggcgagcagtcttccaggccaagaagcgggttctcgaaccttttggtctggttgaggaaggcgctaagacggctcctggaaagaaacgtccggtagagcagtcgccacaagagccagactcctcctcgggcatcggcaagacaggccagcagcccgctaaaaagagactcaattttggtcagactggcgactcagagtcagtccccgacccacaacctctcggagaacctccagcaacccccgctgctgtgggacctactacgatggcttcaggcggtggcgcaccaatggcagacaataacgaaggcgccgacggagtgggtaatgcctcaggaaattggcattgcgattccacatggctgggcgacagagtcatcaccaccagcacccgcacctgggccttgcccacctacaataaccacctctacaagcaaatctccagtgcttcaacgggggccagcaacgacaaccactacttcggctacagcaccccctgggggtattttgatttcaacagattccactgccacttttcaccacgtgactggcagcgactcatcaacaacaattggggattccggcccaagagactcaacttcaagctcttcaacatccaagtcaaggaggtcacgacgaacgatggcgtcacgaccatcgctaataaccttaccagcacggttcaagtcttctcggattcagagtaccaactgccgtacgtcctcggctctgcgcaccagggctgcctccctccgttcccggcggacgtgttcatgattccgcagtacggctacctaacgcccaacaatggcagccaggccgtgggacgttcatccttttactgcctggaatatttcccttctcagatgctgagaacgggcaacaactttaccttcagctacacctttgaggaagtgcctttccacagcagctacgcgcacagccagagcctggaccggctgatgaatcctctcatcgaccaataccagtattacctgaacagaactcaaaatcagtccggaagtgcccaaaacaaggacttgctgtttagccgtgggtctccagctggcatgtctgttcagcccaaaaactggctacctggaccctgttatcggcagcagcgcgtttctaaaacaaaaacagacaacaacaacagcaattttacctggactggtgcttcaaaatataacctcaatgggcgtgaatccatcatcaaccctggcactgctatggcctcacacaaagacgacgaagacaagttctttcccatgagcggtgtcatgatttttggaaaagagagcgccggagcttcaaatactgcattggacaatgtcatgatcacagatgaagaggaaattaaagccactaaccctgtggccaccgaaagatttgggaccgtggcagtcaatttccagagcagcagcacagaccccgcgaccggagatgtgcatgttatgggagccttacctggcatggtgtggcaagacagagacgtatacctgcagggtcccatttgggccaaaattcctcacacggatggacactttcacccgtctcctctcatgggcggctttggacttaagcacccgcctcctcaaatcctcatcaaaaacacgcctgttcctgcgaatcctccggcagagttttcggctacaaagtttgcttcattcatcacccagtactccacaggacaagtgagtgtggaaattgaatgggagctgcagaaagaaaacagcaagcgctggaatcccgaagtgcagtacacatccaattatgcaaaatctgccaacgttgatttcactgtggacaacaatggactttatactgagcctcgccccattggcacccgttaccttacccgtcccttg

SEQ ID NO: 678 - DNA, 2208 bp, Artificial Sequence; identical to SEQ ID NO: 669
  Description of Artificial Sequence: Synthetic polynucleotide

SEQ ID NO: 679 - DNA, 2205 bp, Artificial Sequence
  Description of Artificial Sequence: Synthetic polynucleotide
atggctgccgatggttatcttccagattggctcgaggacactctctctgaaggaataagacagtggtggaagctcaaacctggcccaccaccaccaaagcccgcagagcggcataaggacgacagcaggggtcttgtgcttcctgggtacaagtacctcggacccttcaacggactcgacaagggagagccggtcaacgaggcagacgccgcggccctcgagcacgacaaagcctacgaccggcagctcgacagcggagacaacccgtacctcaagtacaaccacgccgacgcggagtttcaggagcgccttaaagaagatacgtcttttgggggcaacctcggacgagcagtcttccaggcgaaaaagagggttcttgaacctctgggcctggttgaggaacctgttaagacggctccgggaaaaaagaggccggtagagcactctcctgtggagccagactcctcctcgggaaccggaaaggcgggccagcagcctgcaagaaaaagattgaattttggtcagactggagacgcagactcagtacctgacccccagcctctcggacagccaccagcagccccctctggtctgggaactaatacgatggctacaggcagtggcgcaccaatggcagacaataacgagggcgccgacggagtgggtaattcctcgggaaattggcattgcgattccacatggatgggcgacagagtcatcaccaccagcacccgaacctgggccctgcccacctacaacaaccacctctacaaacaaatttccagccaatcaggagcctcgaacgacaatcactactttggctacagcaccccttgggggtattttgacttcaacagattccactgccacttttcaccacgtgactggcaaagactcatcaacaacaactggggattccgacccaagagactcaacttcaagctctttaacattcaagtcaaagaggtcacgcagaatgacggtacgacgacgattgccaataaccttaccagcacggttcaggtgtttactgactcggagtaccagctcccgtacgtcctcggctcggcgcatcaaggatgcctcccgccgttcccagcagacgtcttcatggtgccacagtatggatacctcaccctgaacaacgggagtcaggcagtaggacgctcttcattttactgcctggagtactttccttctcagatgctgcgtaccggaaacaactttaccttcagctacacttttgaggacgttcctttccacagcagctacgctcacagccagagtctggaccgtctcatgaatcctctcatcgaccagtacctgtattacttgagcagaacaaacactccaagtggaaccaccacgcagtcaaggcttcagttttctcgggccggagcgagtgacattcgggaccagtctaggaactggcttcctggaccctgttaccgccagcagcgagtatcaaagacatctgcggataacaacaacagtgaatactcgtggactggagctaccaagtaccacctcaatggcagagactctctggtgaatccgggcccggccatggcaagccacaaggacgatgaagaaaagttttttcctcagagcggggttctcatctttgggaagcaaggctcagagaaaacaaatgtggacattgaaaaggtcatgattacagacgaagaggaaatcaggacaaccaatcccgtggctacggagcagtatggttctgtatctaccaacctccagagaggcaacagacaagcagctaccgcagatgtcaacacacaaggcgttcttccaggcatggtctggcaggacagagatgtgtaccttcaggggcccatctgggcaaagattccacacacggacggacattttcacccctctcccctcatgggtggattcggacttaaacaccctcctccacagattctcatcaagaacaccccggtacctgcgaatccttcgaccaccttcagtgcggcaaagtttgcttccttcatcacacagtactccacgggacaggtcagcgtggagatcgagtgggagctgcagaaggaaaacagcaaacgctggaatcccgaaattcagtacacttccaactacaacaagtctgttaatgtggactttactgtggacactaatggcgtgtattcagagcctcgccccattggcaccagatacctgactcgtaatctg

SEQ ID NO: 680 - protein, 736 aa, Artificial Sequence
  Description of Artificial Sequence: Synthetic polypeptide
MAADGYLPDWLEDNLSEGIREWWALKPGAPQPKANQQHQDNARGLVLPDYKYLGPGNGLDKGEPVNAADVAALEHDKAYDQQLKAGDNPYLKYNHADAEFQERLKEDTSFGGNLGRAVFQAKKRLLEPLGLVEEAAKTAPGKKRPVEQSPQEPDSSAGIGKSGAQPAKKRLNFGQTGDTESVPDPQPIGEPPAAPSGVGSLTMASGGGAPVADNNEGADGVGSSSGNWHCDSQWLGDGVITTSTRTWALPTYNNHLYKQISNSTSGGSSNDNAYFGYSTPWGYFDFNRFHCHFSPRDWQRLINNNWGFRPKRLNFKLFNIQVKEVTDNNGVKTIANNLTSTVQVFTDSDYQLPYVLGSAHEGCLPPFPADVFMIPQYGYLTLNDGSQAVGRSSFYCLEYFPSQMLRTGNNFQFSYEFENVPFHSSYAHSQSLDRLMNPLIDQYLHYLPKTINGSGQNQQTLKFSVAGPSNMAVQGRNYIPGPSYRQQRVSTTVTQNNNSEFAWPGASSWALNGRNSLMNPGPAMASYKEGEDSFFPLSGSLIFGKQGTGRDNVDADKVMITNEEEIKTTNPVATESYGQVATNHQSAQAQAQTGWVQNQGILPGMVWQDRDVYLQGPIWAKIPHTDGNFHPSPLMGGFGMKHPPPQTLIKNTPVPADPPTAFNKDKLNSFITQYSTGQVSVEIEWELQKENSKRWNPEIQYTSNYYKSNNVEFAVNTEGVYSEPRPIGTRYLTRNL

SEQ ID NO: 681 - protein, 736 aa, Artificial Sequence
  Description of Artificial Sequence: Synthetic polypeptide
MAADGYLPDWLEDNLSEGIREWWALKPGAPQPKANQQHQDNARGLVLPGYKYLGPGNGLDKGEPVNAADAAALEHDKAYDQQLKAGDNPYLKYNHADAEFQERLKEDTSFGGNLGRAVFQAKRRLLEPLGLVEEAAKTAPGKKRPVEQSPQEPDSSAGIGKSGAQPAKKRLNFGQTGDTESVPDPQPIGEPPAAPSGVGSLTMASGGGAPVADNNEGADGVGSSSGNWHCDSQWLGDRVITTSTRTWALPTYNNHLYKQISNSTSGGSSNDNAYFGYSTPWGYFDFNRFHCHFSPRDWQRLINNNWGFRPKRLNFKLFNIQIKEVTDNNGVKTIANNLTSTVQVFTDLDYQLPYVLGSAHEGCLPPFPADVFMIPQYGYLTLNDGSQAVGRSSFYCLEYFPSQMLRTGNNFQFSYEFENVPFHSSYAHSQSLDRLMNPLIDQYLHYLSKTINGSGQNQQTLKFSVAGPSNMAVQGRNYIPGPSYRQQRVSTTVTQNNNSEFAWPGASSWALNGRNSLMNPGPAMASYKEGEDSFFPLSGSLIFGKQGTGRDNVDADKVMITNEEEIKTTNPVATESYGQVATNHQSAQAQAQTGWVQNQGILPGMVWQDRDVYLQGPIWAKIPHTDGNFHPSPLMGGFGMKHPPPQTLIKNTPVPADPPTAFNKDKLNSFITQYSTGQVSVEIEWELQKENSKRWNPEIQYTSNYYKSNNVEFAVNTEGVYSEPRPIGTRYLTRNL

SEQ ID NO: 682 - protein, 736 aa, Artificial Sequence
  Description of Artificial Sequence: Synthetic polypeptide
MAADGYLPDWLEDNLSEGIREWWALKPGAPQPKANQQHQDNARGLVLPGYKYLGPGNGLDKGEPVSAADAAALEHDKAYDQQLKAGDNPYLKYNHADAEFQERLKEDTSFGGNLGRAVFQAKKRLLEPLGLVEEAAKTAPGKKRPVEQSPQEPDSSAGIGKSGAQPAKKRLNFGQTGDTESVSDPQPIGEPPAAPSGVGSLTMASGGGAPVADNNEGADGVGSSSGNWHCDSQWLGDRVITTSTRTWALPTYNNHLYKQISNSTSGGSSNDNAYFGYSTPWGYFDFNRFHCHFSPRDWQRLINNNWGFRPKRLNFKLFNIQVKEVTDNNGVKTIANNLTSTVQVFTDSDYQLPYVLGSAHEGCLPPSPADVFMIPQYGYLTLNDGSQAVGRSSFYCLEYFPSQMLRTGNNFQFSYEFENVPFHSSYAHSQSLDRLMNPLIDQYLHYLSKTINGSGQNQQTLKFSVAGPSNMAVQGRNYIPGPSYRQQRVSTTVTQNNNSEFAWPGASSWALNGRNSLMNPGPAMASYKEGEDSFFPLSGSLIFGKQGTGRDDVDADKVIITNEEEIKTTNPVATESYGQVATNHQSAQAQAQTGWVQNQGILPGMVWQDRDVYLQGPIWAKIPHTDGNFHPSPLMGGFGMKHPPPQTLIKNTPVPADPPTAFNKDKLNSFITQYSTGQVSVEIEWELQKENSKRWNPEIQYTSNYYKSNNVEFAVNTEGVYSEPRPIGTRYLTRNL

SEQ ID NO: 683 - protein, 736 aa, Artificial Sequence
  Description of Artificial Sequence: Synthetic polypeptide
MAADGYLPDWLEDNLSEGIREWWALKPGAPQPKANQQHQDNARGLVLPGYKYLGPGNGLDKGEPVNAADAAALEHDKAYDQQLKAGDNPYLKYNHAGAEFQERLKEDTSFGGNLGRAVFQAKKRLLEPLGLVEEAAKTAPGKKRPVEQSPQEPDSSAGIGKSGAQPAKKRLNFGQTGDTESVPDPQPIGEPPAAPSGVGSLTMASGGGAPVADNNEGAGGVGSSSGNWHCDSQWLGDRVVTTSTRTWALPTYNNHLYKQISNSTSGGSSNDNAYFGYSTPWGYFDFNRFHCHFSPRDWQRLINNNWGFRPKRLNFKLFNIQVKEVTDNNGVKTIANNLTSTVQVFTDSDYQLPYVLGSAHGGCLPPFPADVFMIPQYGYLTLNDGSQAVGRSSFYCLEYFPSQMLRTGNNFQFSYEFENVPFHSSYAHSQSLDRLMNPLIDQYLHYLSKTINGSGQNQQTLKFSVAGPSNMAVQGRSYIPGPSYRQQRVSTTVTQNNNSEFAWPGASSWALNGRNSLMNPGPAMASYKEGEDSFFPLSGSLIFGKQGTGRDNVDADKVMITNEEEIKTTNPVATESYGQVATNHQSAQAQAQTGWVQNQGILPGMVWQDRDVYLQGPIWAKIPHTDGNFHPSPLMGGFGMKHPPPQTLIKNTPVPADPPTAFNKDKLNSFITQYSTGQVSVEIEWELQKENSKRWNPEIQYTSNYYKSNNVEFAVNTEGVYSEPRPIGTRYLTRNL

SEQ ID NO: 684 - protein, 736 aa, Artificial Sequence
  Description of Artificial Sequence: Synthetic polypeptide
MAADGYLPDWLEDNLSEGIREWWALKPGAPQPKANQQHQDNARGLVLPGYKYLGPGNGLDKGEPVNAADAAALEHDKAYDQQLKAGDNPYLKYNHADAEFQERLKEDTSFGGNLGRAVFQAKKRLLEPLGLVEEAAKTAPGKKRPVEQSPQEPDSSAGIGKSGAQPAKKRLNFGQTGDTESVPDPQPIGEPPAAPSGVGSLTMASGGGAPVADNNEGADGVGSSSGNWHCDSQWLGDRVVTTSTRTWALPTYNNHLYKQISNSTSGGSSNDNAYFGYSTPWGYFDFNRFHCHFSPRDWQRLINNNWGFRPKRLNFKLFNIQVKEVTDNNGVKTIANNLTSTVQVFTDSDYQLPYVLGSAHEGCLPPFPADVFMIPQYGYLTLNDGSQAVGRSSFYCLEYFPSQMLRTGNNFQFSYEFENVPFHSSHAHSQSLDRLMNPLIDQYLHYLSKTINGSGQNQQTLKFSVAGHSNMAVQGRNYIPGPSYRQQRVSTTVTQNNNSEFAWPGASSWALNGRNSLMNPGPAMASYKEGEDSFFPLSGSLIFGKQGTGRDNVDADKVMITNEEEIKTTNPVATESYGQVATNHQSAQAQAQTGWVQNQGILPGMVWQDRDVYLQGPIWAKIPHTDGNFHPSPLMGGFGMKHPPPQTLIKNTPVPADPPTAFNKDKLNSFITQYSTGQVSVEIGWELQKENSKRWNPEIQYTSNYYKSNNVEFAVNTEGVYSEPRPIGTRYLTRNL

SEQ ID NO: 685 - protein, 736 aa, Artificial Sequence
  Description of Artificial Sequence: Synthetic polypeptide
MAADGYLPDWLEDNLSEGIREWWALKPGAPQPKANQQHQDNARGLVLPGYKYLGPGNGLDKGEPVNAADAAALEHDKAYDQQLKAGDNPYLKYNHADAEFQERLKEDTSFGGNLGRAVFQAKKRLLEPLGLVEEAAKTAPGKKRPVEQSPQEPDSSAGIGKSGAQPAKKRLNFGQTGDTESVPDPQPIGEPPAAPSGVGSLTMASGGGAPVADNNEGADGVGSSSGNWHCDSQWLGDRVITTSTRTWALPTYNNRLYKQISNSTSGGSSNDNAYFGYSTPWGYFDFNRFHCHFSPRDWQRLINNNWGFRPKRLNFKPFNIQVKEVTDNNGVKTIANNLTSTVQVFTDSDYQLPYVLGSAHEGCLPPFPADVFMIPQYGYLTLNDGSQAVGRSSFYCLEYFPSQMLRTGNNFQFSYEFENVPFHSSYAHSQSLDRLMNPLIDQYLHYLSKTINGSGQNQQTLKFSVAGPSNMAVQGRNYIPGPSYRQQRVSTTVTQNNNSEFAWPGASSWALNGRNSLMNPGPAMASYKEGEDSFFPLSGSLIFGKQGTGRDNVDADKVMITNEEEIKTTNPVATESYGQVATNHQSAQAQAQTGWVQNQGILPGMVWQDRDVYLQGPIWAKIPHTDGNFHPSPLMGGFGMKHPPPQTLIKNTPVPADPPTAFNKDKLNSFITQYSTGQVSVEIEWELQKENSKRWNPEIQYTSNYYKSNNVEFAVNTEGVYSEPRPIGTRYLTRNL

SEQ ID NO: 686 - protein, 736 aa, Artificial Sequence
  Description of Artificial Sequence: Synthetic polypeptide
MAADGYLPDWLEDNLSEGIREWWALKPGAPQPKANQQHQDNARGLVLPGYKYLGPGNGLDKGEPVNAADAAALEHDKAYDQQLKAGDNPYLKYNHADAEFQERLKEDTSFGGNLGRAVFQAKKRLLEPLGLVEEAAKTAPGKKRPVEQSPQEPDSSAGIGKSGAQPAKKRLNFGQTGDTESVPDPQPIGEPPAAPSGVGSLTMASGGGAPVADNNEGADGVGSSSGNWHCDSQWLGDRVITTSTRTWALPTYNNHLYKQISNSTSGGSSNDNAYFGYSTPWGYFDFNRFHCHFSPRDWQRLINNNWGFRPKRLNFKLFNIQVKEVTDNNGVKTIANNLTSTVQVFTDSDYQLPYVLGSAHEGCLPPFPADVFMIPQYGYLTLNDGSQAVGRSSFYCLEYFPSQMLRTGNNFQFSYEFENVPFHSSYAHSQSLDRLMNPLIDQYLHYLSKTINGSGQNQQTLKFSVAGPSNMAVQGRNYIPGPSYRQQRVSTTVTQNNNSEFAWPGASSWALNGRNSLMNPGPAMASYKEGEDSFFPLSGSLIFGKQGTGRDNVDADKVMITNEEEIKTTNPVATESYGQVATNHQSAQAQAQTGWVQNQGILPGMVWQDRDVYLQGPIWAKIPHTDGNFHPSPLMGGFGMKHPPPQTLIKNTPVPADPPTAFNKDKLNSFITQYSTGQVSVEIEWELQKENSKRWNPEIQYTSNYYKSNNVEFAVNTEGVYSEPRPIGTRYLTRNL

SEQ ID NO: 687 - protein, 736 aa, Artificial Sequence; identical to SEQ ID NO: 686
  Description of Artificial Sequence: Synthetic polypeptide

SEQ ID NO: 688 - protein, 736 aa, Artificial Sequence
  Description of Artificial Sequence: Synthetic polypeptide
MAADGYLPDWLEDNLSEGIREWWDLKPGAPKPKANQQKQDDGRGLVLPGYKYLGPFNGLDKGEPVNAADAAALEHDKAYDQQLKAGDNPYLRYNHADAEFQERLQEDTSFGGNLGRAVFQAKKRVLEPFGLVEEGAKTAPGKKRPVEQSPQEPDSSSGIGKSGQQPAKKRLNFGQTGDSESVPDPQPLGEPPATPAALGPTTMASGGGAPMADNNEGADGVGNASGNWHCDSTWLGDRVITTSTRTWALPTYNNHLYKQISSASTGASNDNHYFGYSTPWGYFDFNRFHCHFSPRDWQRLINNNWGFRPKRLNFKLFNIQVKEVTTNDGVTTIANNLTSTVQVFSDSEYQLPYVLGSAHQGCLPPFPADVFMIPQYGYLTLNNGSKAVGRSSFYCLEYFPSQMLRTGNNFTFSYTFEEVPFHSSYAHSQSLDRLMNPLIDQYLYYLNRTQNQSGSAQNKDLLFSRGSPAGMSVQPKNWLPGPCYRQQRVSKTKTDNNNSNFTWTGASKYNLNGRESIINPGTAMASHKDDEDKFFPMSGVMIFGKESAGASNTALDNVMITDEEEIKATNPVATERFGTVAVNFQSSSTDPATGDVHVMGALPGMVWQDRDVYLQGPIWAKIPHTDGHFHPSPLMGGFGLKHPPPQILIKNTPVPANPPAEFSATKFASFITQYSTGQVSVEIEWELQKENSKRWNPEVQYTSNYAKSANVDFTVDNNGLYTEPRPIGTRYLTRPL

SEQ ID NO: 689 - protein, 736 aa, Artificial Sequence
  Description of Artificial Sequence: Synthetic polypeptide
MAADGYLPDWLEDNLSEGIREWWDLKPGAPKPKANQQKQDDGRGLVLPGYKYLGPFNGLDKGEPVNAADAAALEHDKAYDQQLKAGDNPYLRYNHADAEFQERLQEDTSFGGNLGRAVFQAKKRVLEPLGLVEEGAKTAPGKKRPVEQSPQEPDSSSGIGKTGQQPAKKRLNFGQTGDSESVPDPQPLGEPPATPAAVGPTTMASGGGAPMADNNEGADGVGNASGNWHCDSTWLGDRVITTSTRTWALPTYNNHLYKQISSTSTGASNDNHYFGYSTPWGYFDFNRFHCHFSPRDWQRLINNNWGFRPKRLNFKLFNIQVKEVTTNDGVTTIANNLTSTVQVFSDSEYQLPYVLGSAHQGCLPPFPADVFMIPQYGYLTLNNGSQAVGRSSFYCLEYFPSQMLRTGNNFTFSYTFEEVPFHSSYAHSQSLDRLMNPLIDQYLYYLNRTQNQSGSAQNKDLLFSRGSPAGMSVQPKNWLPGPCYRQQRVSKTKTDNNNSNFTWTGASKYNLNGRESIINPGTAVASHKDDEDKFFPMSGVMIFGKESAGASNTALDNVMITDEEEIKATNPVATERFGTVAVNFQSSSTDPATGDVHAMGALPGMVWQDRDVYLQGPIWAKIPHTDGHFHPSPLMGGFGLKNPPPQILIKNTPVPANPPAEFSATKFASFITQYSTGQVSVEIEWELQKENSKRWNPEVQYTSNYAKSANVDFTVDNNGLYTEPRPIGTRYLTRPL

SEQ ID NO: 690 - protein, 736 aa, Artificial Sequence
  Description of Artificial Sequence: Synthetic polypeptide
MAADGYLPDWLEDNLSEGIREWWALKPGAPQPKANQQHQDNARGLVLPGYKYLGPGNGLDKGEPVNAADAAALEHDKAYDQQLKAGDNPYLKYNHADAEFQERLKEDTSFGGNLGRAVFQAKKRLLEPLGLVEEAAKTAPGKKRPVEQSPQEPDSSAGIGKSGAQPAKKRLNFGQTGDTESVPDPQPIGEPPAAPSGVGSLTMASGGGAPVADNNEGADGVGSSSGNWHCDSQWLGDRVITTSTRTWALPTYNNHLYKQISNSTSGGSSNDNAYFGYSTPWGYFDFNRFHCHFSPRDWQRLINNNWGFRPKRLNFKLFNIQVKEVTDNNGVKTIANNLTSTVQVFTDSDYQLPYVLGSAHEGCLPPFPADVFMIPQYGYLTLNDGSQAVGRSSFYCLEYFPSQMLRTGNNFQFGYEFENVPFHSSYAHSQSLDRLMNPLIDQYLYYLSKTINGSGQNQQTLKFSVAGPSNMAVQGRNYIPGPSYRQQRVSTTVTQNNNSEFAWPGASSWALNGRNSLMNPGPAMASHKEGEDRFFPLSGSLIFGKQGTGRDNVDADKVMITNEEEIKTTNPVATESYGQVATNHQSAQAQAQTGWVQNQGILPGMVWQDRDVYLQGPIWAKIPHTDGNFHPSPLMGGFGMKHPPPQILIKNTPVPADPPTAFNKDKLNSFITQYSTGQVSVEIEWELQKENSKRWDPEIQYTSNYYKSNNVEFAVNTEGVYSEPRPIGTRYLTRNL

SEQ ID NO: 691 - protein, 736 aa, Artificial Sequence
  Description of Artificial Sequence: Synthetic polypeptide
MAADGYLPDWLEDNLSEGIREWWALKPGAPQPKANQQHQDNARGLVLPGYKYLGPGNGLDKGEPVNAADAAALEHDKAYDQQLKAGDNPYLKYNHADAEFQERLKEDTSFGGNLGRAVFQAKKRLLEPLGLVEEAAKTAPGKKRPVEQSPQEPDSSAGIGKSGAQPAKKRLNFGQTGDTESVPDPQPIGEPPAAPSGVGSLTMASGGGAPVADNNEGADGVGSSSGNWHCDSQWLGDRVITTSTRTWALPTYNNHLYKQISNSTSGGSSNDNAYFGYSTPWGYFDFNRFHCRFSPRDWQRLINNNWGFRPKRLNFKLFNIQVKEVTDNNGVKTIANNLTSTVQVFTDSDYQLPYVLGSAHEGCLPPFPADVFMIPQYGYLTLNDGSQAVGRSSFYCLEYFPSQMLRTGNNFQFSYEFENVPFHSSYAHSQSLDRLMNPLIDQYLYYLSKTINGSGQNQQTLKFSVAGPSNMAVQGRNYIPGPSYRQQRVSTTVTQNNNSEFAWPGASSWALNGRNSLMNPGPAMASHKEGEDRFFPLSGSLIFGKQGTGRDNVDADKVMITNEEEIKTTNPVATESYGQVATNHQSAQAQAQTGWVQNQGILPGMVWQDRDVYLQGPIWAKIPHTDGNFHPSPLMGGFGMKHPPPQILIKNAPVPADPPTAFNKDKLNSFITQYSTGQVSVEIEWELQKENSKRWNPEIQYTSNYYKSNNVEFAVNTEGVYSEPRPIGTRYLTRNL

SEQ ID NO: 692 - protein, 736 aa, Artificial Sequence
  Description of Artificial Sequence: Synthetic polypeptide
MAADGYLPDWLEDNLSEGIREWWALKPGAPQPKANQQHQDNARGLVLPGYKYLGPGNGLDKGEPVSAADAAALEHDKAYDQQLKAGDNPYLKYNHADAEFQERLKEDTSFGGNLGRAVFQAKKRLLEPLGLVEEAAKTAPGKKRPVEQSPQEPDSSAGIGKSGAQPAKKRLNFGQTGDTESVPDPQPIGEPPAAPSGVGSLTMASGGGAPVADNNEGADGVGSSSGNWHCDSQWLGDRVITTSTRTWALPTYNNHLYKQISNSTSGGSSNDNAYFGYSTPWGYFDFNRFHCHFSPRDWQRLINNNWGFRPKRLNFKLFNIQVKEVTDNNGVKTIANNLTSTVQVFTDSDYQLPYVLGSAHEGCLPPFPADVFMIPQYGYLTLNDGSQAVGRSSFYCLEYFPSQMLRTGNNFQFSYEFENVPFHSSYAHSQSLDRLMNPLIDQYLYYLSKTINGSGQNQQTLKFSVAGPSNMAVQGRNYIPGPSYRQQRVSTTVTQNNNSEFAWPGASSWALNGRNSLMNPGPAMASHKEGEDRFFPLSGSLIFGKQGTGRDNVDADKVMITNEEEIKTTNPVATESYGQVATNHQSAQAQAQTGWVQNQGILPGMVWQDRDVYLQGPIWAKIPHTDGNFHPSPLMGGFGMKHPPPQILIKNTPVPADPPTAFNKDKLNSFITQYSTGQVSVEIEWELQKENSKRWNPEIQYTSNYYKSNNVEFAVNTEGVYSEPRPIGTRYLTRNL

SEQ ID NO: 693 - protein, 736 aa, Artificial Sequence
  Description of Artificial Sequence: Synthetic polypeptide
MAADGYLPDWLEDNLSEGIREWWALKPGAPQPKANQQHQDNARGLVLPGYKYLGPGNGLDKGEPVNAADAAALEHDKAYDQQLKAGDNPYLKYNHADAEFQERLKEDTSFGGNLGRAVFQAKKRLLEPLGLVEEAAKTAPGKKRPVEQSPQEPDSSAGIGKSGAQPAKKRLNFGQTGDTESVPDPQPIGEPPAAPSGVGSLTMASGGGAPVADNNEGADGVGSSSGNWHCDSQWLGDRVITTSTRTWALPTYNNHLYKQISNSTSGGSSNDNAYFGYSTPWGYFDFNRFHCHFSPRDWQRLINNNWGFRPKRLNFKLFNIQVKEVTDNNGVKTIANNLTSTVQVFTDSDYQLPYVLGSAHEGCLPPFPADVFMIPQYGYLTLNDGSQAVGRSSFYCLEYFPSQMLRTGNNFQFSYEFENVPFHSSYAHSQSLDRLMNPLIDQYLYYLSKTINGSGQNQQTLKFSVAGPSNTAVQGRNYIPGPSYRQQRVSTTVTQNNNSEFAWPGASSWALNGRNSLMNPGPAMASHKEGEDRFFPLSGSLIFGKQGTGRDNVDADKVMITNEEEIKTTNPVATESYGQVATNHQSAQAQAQTGWVQNQGILPGMVWQDRDVYLQGPIWAKIPHTDGNFHPSPLMGGFGMKHPPPQILIKNTPVPADPPTAFNKDKLNSFITQYSTGQVSVEIEWELQKENSKRWNPEIQYTSNYYKSNNVEFAVNTEGVYSEPRPIGTRYLTRNL

SEQ ID NO: 694 - protein, 736 aa, Artificial Sequence
  Description of Artificial Sequence: Synthetic polypeptide
MAADGYLPDWLEDNLSEGIREWWALKPGAPQPKANQQHQDNARGLVLPGYKYLGPGNGLDKGEPVNAADAAALEHDKAYDQQLKAGDNPYLKYNHADAEFQERLKEDTSFGGNLGRAVFQAKKRLLEPLGLVEEAAKTAPGKKRPVEQSPQEPDSSAGIGKSGAQPAKKRLNFGQTGDTESVPDPQPIGEPPAAPSGVGSLTMASGGGAPVADNNEGADGVGSSSGNWHCDSQWLGDRVITTSTRTWALPTYNNHLYKQISNSTSGGSSNDNAYFGYSTPWGYFDFNRFHCHFSPRDWQRLINNNWGFRPKRLNFKLFNIQVKEVTDNNGVKTIANNLTSTVQVFTDSDYQLPYVLGSAHEGCLPPFPADVFMIPQYGYLTLNDGSQAVGRSSFYCLEYFPSQMLRTGSNFQFSYEFENVPFHSSYAHSQSLDRLMNPLIDQYLYYLSKTINGSGQNQQTLKFSVAGPSNMAVQGRNYIPGPSYRQQRVSTTVTQNNNSEFAWPGASSWALNGRNSLMNPGPAMASHKEGEDRFFPLSGSLIFGKQGTGRDNVDADKVMITNEEEIKTTNPAATESYGQVATNHQSAQAQAQTGWVQNQGILPGMVWQDRDVYLQGPIWAKIPHTDGNFHPSPLMGGFGMKHPPPQILIKNTPVPADPPTAFNKDKLNSFITQYSTGQVSVEIEWELQKENSKRWNPEIQHTSNYYKSNNVEFAVNTEGVYSEPRPIGTRYLTRNL

SEQ ID NO: 695 - protein, 736 aa, Artificial Sequence
  Description of Artificial Sequence: Synthetic polypeptide
MAADGYLPDWLEDNLSEGIREWWALKPGAPQPKANQQHQDNARGLVLPGYKYLGPGNGLDKGEPVNAADAAALEHDKAYDQQLKAGDNPYLKYNHADAEFQERLKEDTSFGGNLGRAVFQAKKRLLEPLGLVEEAAKTAPGKKRPVEQSPQEPDSSAGIGKSGAQPAKKRLNFGQTGDTESVPDPQPIGEPPAAPSGVGSLTMASGGGAPVADNNEGADGVGSSSGNWHCDSQWLGDRVITTSTRTWALPTYNNHLYKQISNSTSGGSSNDNAYFGYSTPWGYFDFNRFHCHFSPRDWQRLINNNWGFRPKRLNFRLFNIQVKEVTDNNGVKTIANNLTSTVQVFTDSDYQLPYVLGSAHEGCLPPFPADVFMIPQYGYLTLNDGSQAVGRSSFYCLEYFPSQMLRTGNNFQFSYEFENVPFHSSYAHSQSLDRLMNPLIDQYLYYLSKTINGSGQNQQTLKFSVAGPSNMAVQGRNYIPGPSYRQQRVSTTVTQNNNSEFAWPGASSWALNGRNSLMNPGPAMASHKEGEDRFFPLSGSLIFGKQGTGRDNVDADKVMITNEEEIKTTNPVATESYGQVATNHQSAQAQAQTGWVQSQGILPGMVWQDRDVYLQGPIWAKIPHTDGNFHPSPLMGGFGMKHPPPQILIKNTPVPADPPTAFNKDKLNSFITQYSTGQVSVEIEWELQKENSKRWNPEIQYTSNYYKSNNVEFAVNTEGVYSEPRPIGTRYLTRNL

SEQ ID NO: 696 - protein, 735 aa, Artificial Sequence
  Description of Artificial Sequence: Synthetic polypeptide
MAADGYLPDWLEDNLSEGIREWWALKPGAPQPKANQQHQDNARGLVLPGYKYLGPGNGLDKGEPVNAADAAALEHDKAYDQQLKAGDNPYLKYNHADAEFQERLKEDTSFGGNLGRAVFQAKKRLLEPLGLVEEAAKTAPGKKRPVEQSPQEPDSSAGIGKSGAQPAKKRLNFGQTGDTESVPDPQPIGEPPAAPSGVGSLTMASGGGAPVADNNEGADGVGSSSGNWHCDSQWLGDRVITTSTRTWALPTYNNHLYKQISNSTSGGSSNDNAYFGYSTPWRYFDFNRFHCHFSPRDWQRLINNWGFRPKRLNFKLFNIQVKEVTDNNGVKTIANNLTSTVQAFTDSDYQLPYVLGSAHEGCLPPFPADVFMIPQYGYLTLNDGSQAVGRSSFYCLEYFPSQMLRTGNNFQFSYEFENVPFHSSYAHSQSLDRLMNPLIDQYLYYLSKTINGSGQNQQTLKFSVAGPSNMAVQGRNYIPGPSYRQQRVSTTVTQNNNSEFAWPGASSWALNGRNSLMNPGPAMASHKEGEDRFFPLSGSLIFGKQGTGRDNVDADKVMITNEEEIKTTNPVATESYGQVATNHQSAQAQAQTGWVQNQGILPGMVWQDRDVYLQGPIWAKIPHTDGNFHPSPLMGGFGMKHPPPQILIKNTPVPADPPTAFNKDELNSFITQYSTGQVSVEIEWELQKENSKRWNPEIQYTSNYYKSNNVEFAVNTEGVYSEPRPIGTRYLTRNL

SEQ ID NO: 697 - protein, 735 aa, Artificial Sequence
  Description of Artificial Sequence: Synthetic polypeptide
MAADGYLPDWLEDNLSEGIREWWALKPGAPQPKANQQHQDNARGLVLPGYKYLGPGNGLDKGEPVNAADAAALEHDKAYDQQLKAGDNPYLKYNHADAEFQERLKEDTSFGGNLGRAVFQDKKRLLEPLGLVEEAAKTAPGKKRPVEQSPQEPDSSAGIGKSGAQPAKKRLNFGQTGDTESVPDPQPIGEPPAAPSGVGSLTMASGGGAPVADNNEGADGVGSSSGNWHCDSQWLGDRVITTSTRTWALPTYNNHLYKQISNSTSGGSSNDNAYFGYSTPWGYFDFNRFHCHFSPRDWQRLINNWGFRPKRLNFKLFNIQVKEVTDNNGVKTIANNLTSTVQVFTDSDYQLPYVLGSAHEGCLPPFPADVFMIPQYGYLTLNDGSQAVGRSSFYCLEYFPSQMLRTGNNFQFSYEFENVPFHSSYAHSQSLDRLMNPLIDQYLYYLSKTINGSGQNQQTLKFSVAGPSNMAVQGRNYIPGPSYRQQRVSTTVTQNNNSEFAWPGASSWALNGRNSLMNPGPAMASHKEGEDRFFPLSGSLIFGKQGTGRDNVDADKVMITNEEEIKTTNPVATESYGQVATNHQSAQAQAQTGWVQNQGILPGMVWQDRDVYLQGPIWAKIPHTDGNFHPSPLMGGFGMKHPPPQILIKNTPVPADPPTAFNKDKLNSFITQYSTGQVSVEIEWELQKENSKRWNPEIQYTSNYYKSNNVEFAVNTEGVYSEPRPIGTRYLTRNL

SEQ ID NO: 698 - protein, 736 aa, Artificial Sequence
  Description of Artificial Sequence: Synthetic polypeptide
MAADGYLPDWLEDNLSEGIREWWALKPGAPQPKANQQHQDNARGLVLPGYKYLGPGNGLDKGEPVNAADAAALEHDKAYDQQLKAGDNPYLKYNHADAEFQERLKEDTSFGGNLGRAVFQAKKRLLEPLGLVEEAAKTAPGKKRPVEQSPQEPDSSAGIGKSGAQPAKKRLNFGQTGDTESVPDPQPIGEPPAAPSGVGSLTMASGGGAPVADNNEGADGVGSSSGNWHCDSQWLGDRAITTSTRTWALPTYNNHLYKQISNSTSGGSSNDNAYFGYSTPWGYFDFNRFHCHFSPRDWQRLINNNWGFRPKRLNFKLFNIQVKEVTDNNGVKTIANNLTSTVQVFTDSDYQLPYVLGSAHEGCLPPFPADVFMIPQYGYLTLNDGSQAVGRSSFYCLEYFPSQMLRTGNNFQFSYEFENVPFHSSYAHSQSLDRLMNPLIDQYLYYLSKTINGSGQNQQTLKFSVAGPSNMAVQGRNYIPGPSYRQQRVSTTVTQNNNSEFAWPGASSWALNGRNSLMNPGPAMASHKEGEDRFFPLSGSLIFGKQGTGRDNVDADKVMTTNEEEIKTTNPVATESYGQVATNHQSAQAQAQTGWVQNQGILPGMVWQDRDVYLQGPIWAKIPHTDGNFHPSPLMGGFGMKHPPPQILIKNTPVPADPPTAFNKDKLNSFITQYSTGQVSVEIEWELQKENSKRWNPEIQYTSNYYKSNNVEFAVNTEGVYSEPRPIGTRYLTRNL

SEQ ID NO: 699 - protein, 736 aa, Artificial Sequence
  Description of Artificial Sequence: Synthetic polypeptide
MAADGYLPDWLEDNLSEGIREWWALKPGAPQPKANQQHQDNARGLVLPGYKYLGPGNGLDKGEPVNAADAAALEHDKAYDQQLKAGDNPYLKYNHADAEFQERLKEDTSFGGNLGRAVFQTKKRLLEPLGLVEEAAKTAPGKKRPVEQSPQEPGSSAGIGKSGAQPAKKRLNFGQTGDTESVPDPQPIGEPPAAPSGVGSLTMASGGGAPVADNNEGADGVGSSSGNWHCDSQWLGDRVITTSTRTWALPTYNNHLYKQISNSTSGGSSNDNAYFGYSTPWGYFDFNRFHCHFSPRDWQRLINNNWGFRPKRLNFKLFNIQVKEVTDNNGVKTIANNLTSTVQVFTDSDYQLPYVLGSAHEGCLPPFPADVFMIPQYGYLTLNDGSQAVGRSSFYCLEYFPSQMLRTGNNFQFSYEFENVPFHSSYAHSQSLDRLMNPLIDQYLHYLSKTINGSGQNQQTLKFSVAGPSNMAVQGRNYIPGPSYRQQRVSTTVTQNNNSEFAWPGASSWALNGRNSLMNPGPAMASHKEGEDRFFPLSGSLIFGKQGTGRDNVDADKVMITNEEEIKTTNPVATESYGQVATNHQSAQAQAQTGWVQNQGILPGMVWQDRDVYLQGPIWAKIPHTDGNFHPSPLMGGFGMKHPPPQILIKNTPVPADPPTAFNKDKLNSFITQYSTGQVSVEIEWELQKENSKRWNPEIQYTSNYYKSNNVEFAVNTEGVYSEPRPIGTRYLTRNL

SEQ ID NO: 700 - protein, 736 aa, Artificial Sequence
  Description of Artificial Sequence: Synthetic polypeptide
MAADGYFPDWLEDNLSEGIREWWALKPGAPQPKANQQHQDNARGLVLPGYKYLGPGNGLDKGEPVNAADAAALEHDKAYDQQLKAGDNPYLKYNHADAEFQERLKEDTSFGGNLGRAVFQAKKRLLEPLGLVEEAAKTAPGKKRPVEQSPQEPDSSAGIGKSGAQPAKKRLNFGQTGDTESVPDPQPIGESPAAPSGVGSLTMASGGGAPVADNNEGADGVGSSSGNWHCDSQWLGDRVITTSTRTWALPTYNNHLYKQISNSTSGGSSNDNAYFGYSTPWGYFDFNRFHCHFSPRDWQRLINNNWGFRPKRLNFKLFNIQVKEVTDNNGVKTIANNLTSTVQVFTDSDYQLPYVLGSAHEGCLPPFPADVFMIPQYGYLTLNDGSQAVGRSSFYCLEYLPSQMLRTGNNFQFSYEFENVPFHSSYAHSQSLDRLMNPLIDQYLHYLSKTINGSGQNQQTLKFSVAGPSNMAVQGRNYIPGPSYRQQRVSTTVTQNNNSEFAWPGASSWALNGRNSLMNPGPAVASHKEGEDRFFPLSGSLIFGKQGTGRDNVDADKVMITNEEEIKTTNPVATESYGQVATNHQSAQAQAQTGWVQNQGILPGMVWQDRDVYLQGPIWAKIPHTDGNFHPSPLMGGFGMKHPPPQILIKNTPVPADPPTAFNKDKLNSFITQYSTGQVSVEIEWELQKENSKRWNPEIQYTSNYYKSNNVEFAVNTEGVYSEPRPIGTRYLTRNL

SEQ ID NO: 701 - protein, 736 aa, Artificial Sequence
  Description of Artificial Sequence: Synthetic polypeptide
MAADGYLPDWLEDNLSEGIREWWALKPGAPQPKANQQHQDNARGLVLPGYKYLGPGNGLDKGEPVNAADAAALEHDKAYDQQLKAGDNPYLKYNHADAEFQERLKEDTSFGGNLGRAVFQAKKRLLEPLGPVEEAAKTAPGKKRPVEQSPQEPDSSAGIGKSGAQPAKKRLNFGQTGDTESVPDPQPIGEPPAAPSGVGSLTMASGGGAPVADNNEGADGVGSSSGNWHCDSQWLGDRVITTSTRTWALPTYNNHLYKQISNSTSGGSSNDNAYFGYSTPWGYFDFNRFHCHFSPRDWQRLINNNWGFRPKRLNFKLFNIQVKEVTDNNGVKTIANNLTSTVQVFTDSDYQLPYVLGSAHEGCLPPFPADVFMIPQYGYLTLNDGSQAVGRSSFYCLEYFPSQMLRTGNNFQFSYEFENVPFHSSYAHSQSLDRLMNPLIDQYLYYLSKTINGSGQNQQTLKFSVAGPSNMAVQGRNYIPGPSYRQQRVSTTVTQNNNSEFAWPGASSWALNGRNSLMNPGPAMASHKEGEDRFFPLSGSLIFGKQGTGRDNVDADKVMITNEEEIKTTNPVATESYGQAATNHQSAQAQAQTGWVQNQGILPGMVWQDRDVYLQGPIWAKIPHTDGNFHPSPLMGGFGMKHPPPQILIKNTPVPADPPTAFNKDKLNSFITQYSTGQVSVEIEWELQKENSKRWNPEIQYTSNYYKSNNVEFAVNTEGVYSEPRPIGTRYLTRNL

SEQ ID NO: 702 - protein, 736 aa, Artificial Sequence
  Description of Artificial Sequence: Synthetic polypeptide
MAADGYLPDWLEDNLSEGIREWWALKPGAPQPKANQQHQDNARGLVLPGYKYLGPGNGLDKGEPVNAADAAALEHDKAYDQQLKAGDNPYLKYNHADAEFQERLKEDTSFGGNLGRAVFQAKKRLLEPLGPVEEAAKTAPGKKRPVEQSPQEPDSSAGIGKSGAQPAKKRLNFGQTGDTESVPDPQPIGEPPAAPSGVGSLTMASGGGAPVADNNEGADGVGSSSGNWHCDSQWLGDRVITTSTRTWALPTYNNHLYKQISNSTSGGSSNDNAYFGYSTPWGYFDFNRFHCHFSPRDWRRLINNNWGFRPKRLNFKLFNIQVKEVTDNNGVKTIANNLTSTVQVFTDSDYQLPYVLGSAHEGCLPPFPADVFMIPQYGYLTLNDGSQAVGRSSFYCLEYFPSQMLRTGNNFQFSYEFENVPFHSSYAHSQSLDRLMNPLIDQYLYYLSKTINGSGQNQQTLKFSVAGPSNMAVQGRNYIPGPSYRQQRVSTTVTQNNNSEFAWPGASSWALNGRNSLMNPGPAMASHKEGEDRFFPLSGSLIFGKQGTGRDNVDADKVMITNEEEIKTTNPVATESYGQVATNHQSAQAQAQTGWVQNQGILPGMVWQDRDVYLQGPIWAKIPHTDGNFHPSPLMGGFGMKHPPPQILIKNTPVPADPPTAFNKDKLNSFITQYSTGQVSVEIEWELQKENSKRWNPEIQYTSNYYKSNNVEFAVNTEGVYSEPRPIGTRYLTRNL

SEQ ID NO: 703 - protein, 736 aa, Artificial Sequence
  Description of Artificial Sequence: Synthetic polypeptide
MAADGYLPDWLEDNLSEGIREWWALKPGAPQPKANQQHQDNARGLVLPGYKYLGPGNGLDKGEPVNAADAAALEHDKAYDQQLKAGDNLYLKYNHADAEFQERLKEDTSFGGNLGRAVFQAKKRLLEPLGLVEEAAKTAPGKKRPVEQSPQEPDSSAGIGKSGAQPAKKRLNFGQTGDTESVPDPQPIGEPPAAPSGVGSLTMASGGGAPVADNNEGADGVGSSSGNWHCDSQWLGDRVITTSTRTWALPTYNNHLYKQISNSTSGGSSNDNAYFGYSTPWGYFDFNRFHCHFSPRDWQRLINNNWGFRPKRLNFKLFNIQVKEVTDNNGVKTIANNLTSTVQVFTDSDYQLPYVLGSAHEGCLPPFPADVFMIPQYGYLTLNDGSQAVGRSSFYCLEYFPSQMLRTGNNFQFSYEFENVPFHSSYAHSQSLDRLMNPLIDQYLHYLSKTINGSGQNQQTLKFSVAGPSNMAVQGRNYIPGPSYRQQRVSTTVTQNNNSEFAWPGASSWALNGRNSLMNPGPAMASHKEGEDRFFPLSGSLIFGKQGTGRDNVDADKVMITNEEEIKTTNPVATESYGQVATNHQSAQAQAQTGWVQNQGILPGMVWQDRDVYLQGPIWAKIPHTDGNFHPSPLMGGFGMKHPPPQILIKNTPVPADPPTAFNKDKLNSFITQYSTGQVSVEIEWELQKENSKRWNPEIQYTSNYYKSNNVEFAVNTEGVYSEPRPIGTRYLTRNL

SEQ ID NO: 704 - protein, 736 aa, Artificial Sequence
  Description of Artificial Sequence: Synthetic polypeptide
MAADGYLPDWLEDNLSEGIREWWALKPGAPQPKANQQHQDNARGLVLPGYKYLGPGNGLDKGEPVNAADAAALEHDKAYDQQLKAGDNPYLKYNHADAEFQERLKEDTSFGGNLGRAVFQAKKRLLEPLGLVEEAAKTAPGKKRPVEQSPQEPDSSAGIGKSGAQPAKKRLNFGQTGDTESVPDPQPIGEPPAAPSGVGSLTMASGGGAPVADNNEGADGVGSSSGNWHCDSQWLGDRVITTSTRTWALPTYNNHLYKQISNSTSGGSSNDNAYFGYSTPWGYFDFNRFHCHFSPRDWQRLINNNWGFRPKRLNFKLFNIQVKEVTDNNGVKTIANNLTSTVQVFTDSDYQLPYVLGSAHEGCLPPFPADVFMIPQYGYLTLNDGSQAVGRSSFYCLEYFPSQMLRTGNNFQFSYEFENVPFHSSYAHSQSLDRLMNPLIDQYLHYLSKTINGSGQNQQTLKFSVAGPSNMAVQGRNYIPGPSYRQQRVSTTVTQNNNSEFAWPGASSWALNGRNSLMNPGPAMASHKEGEDRFFPLSGSLIFGKQGTGRDNVDADKVMITNEEEIKTTNPVATESYGQVATNHQSAQAQAQTGWVQNQGILPGMVWQDRDVYLQGPIWAKIPHTDGNFHPSPLMGGFGMKHPPPQILIKNTPVPADPPTAFNKDKLNSFITQYSTGQVSVEIEWELQKENSKRWNPEIQYTSNYYKSNNVEFAVNTEGVYSEPRPIGTRYLTRNL

SEQ ID NO: 705 - protein, 736 aa, Artificial Sequence
  Description of Artificial Sequence: Synthetic polypeptide
  MOD_RES (442)..(442): Xaa = any amino acid
MAADGYLPDWLEDNLSEGIREWWALKPGAPQPKANQQHQDNARGLVLPGYKYLGPGNGLDKGEPVNAADAAALEHDKAYDQQLKAGDNPYLKYNHADAEFQERLKEDTSFGGNLGRAVFQAKKRLLEPLGLVEEAAKTAPGKKRPVEQSPQEPDSSAGIGKSGAQPAKKRLNFGQTGDTESVPDPQPIGEPPAAPSGVGSLTMASGGGAPVADNNEGADGVGSSSGNWHCDSQWLGDRVITTSTRTWALPTYNNHLYKQISTSTSGGSSNDNAYFGYSTPWGYFDFNRFHCHFSPRDWQRLINNNWGFRPKRLNFKLFNIQVKEVTDNNGVKTIANNLTSTVQVFTDSDYQLPYVLGSAHEGCLPPFPADVFMIPQYGYLTLNDGSQAVGRSSFYCLEYFPSQMLRTGNNFQFSYEFENVPFHSSYAHSQSLDRLMNPLIDXYLHYLSKTINGSGQNQQTLKFSVAGPSNMAVQGRNYIPGPSYRQQRVSTTVTQNNNSEFAWPGASSWALNGRNSLMNPGPAMASHKEGEDRFFPLSGSLIFGKQGTGRDNVDADKVMITNEEEIKTTNPVATESYGQVATNHQSAQAQAQTGWVQNQGILPDMVWQDRDVYLQGPIWAKIPHTDGNFHPSPLMGGFGMKHPPPQILIKNTPVPADPPTAFNKDKLNSFITQYSTGQVSVEIEWELQKENSKRWNPEIQYTSNYYKSNNVEFAVNTEGVYSEPRPIGTRYLTRNL

SEQ ID NO: 706 - protein, 736 aa, Artificial Sequence; identical to SEQ ID NO: 686
  Description of Artificial Sequence: Synthetic polypeptide

SEQ ID NO: 707 - protein, 736 aa, Artificial Sequence; identical to SEQ ID NO: 690
  Description of Artificial Sequence: Synthetic polypeptide

SEQ ID NO: 708 - protein, 736 aa, Artificial Sequence
  Description of Artificial Sequence: Synthetic polypeptide
MAADGYLPDWLEDNLSEGIREWWALKPGAPQPRANQQHQDNARGLVLPGYKYLGPGNGLDKGEPVNAADAAALEHDKAYDQQLKAGDNPYLKYNHADAEFQERLKEDTSFGGNLGRAVFQAKKRLLEPLGLVEEAAKTAPGKKRPVEQSPQEPDSSAGIGKSGAQPAKKRLNFGQTGDTESVPDPQPIGEPPAAPSGVGSLTMASGGGAPVADNNEGADGVGSSSGNWHCDSQWLGDRVITTSTRTWALPTYNNHLYKQISNSTSGGSSNDNAYFGYSTPWGYFDFNRFHCHFSPRDWQRLINNNWGFRPKRLNFKLFNIQVKEVTDNNGVKTIANNLTSTVQVFTDSDCQLPYVLGSAHEGCLPPFPADVFMIPQYGYLTLNDGSQAVGRSSFYCLEYFPSQMLRTGNNFQFSYEFENVPFHSSYAHSQSLDRLTNPLIDQYLYYLSKTINGSGQNQQTLKFSVAGPSNMAVQGRNYIPGPSYRQQRVSTTVTQNNNSEFAWPGASSWALNGRNSLMNPGPAMASHKEGEDRFFPLSGSLIFGKQGTGRDNVDADKVMITNEEEIKTTNPVATESHGQVATNHQSAQAQAQTGWVQNQGILPGMVWQDRDVYLQGPIWAKIPHTDGNFHPSPLMGGFGMKHPPPQILIKNTPVPADPPTAFNKDKLNSFITQYSTGQVSVEIEWELQKENSKRWNPEIQYTSNYYKSNNVEFAVNTEGVYSEPRPIGTRYLTRNL

SEQ ID NO: 709 - protein, 736 aa, Artificial Sequence
  Description of Artificial Sequence: Synthetic polypeptide
MAADGYLPDWLEDNLSEGIREWWALKPGAPQPKANQQHQDNARGLVLPGYKYLGPGNGLDKGEPVNAADAAALEHDKAYDQQLKAGDNPYLKYNHADAEFQERLKEDTSFGGNLGRAVFQAKKRLLEPLGLVEEAAKTAPGKKRPVEQSPQEPDSSAGIGKSGAQPAKKRLNFGQTGDTESVPDPQPIGEPPAAPSGVGSLTMASGGGAPVADNNEGADGVGSSSGNWHCDSQWLGDRVITTSTRTWALPTYNNHLYKQISNSTSGGSSNDNAYFGYSTPWGYFDFNRFHCHFSPRDWQRLINNNWGFRPKRLNFKLFNIQVKEVTDNNGVKTIANNLTSTVQVFTDSDYQLPYVLGSAHEGCLPPFPADVFMIPQYGYLTLNDGSQAVGRSSFYCLEYFPSQMLRTGNNFQFSYEFENVPFHSSYAHSQSLDRLMNPPIDQYLYYLSKTINGSGQNQQTLKFSVAGPSNMAVQGRNYIPGPSYRQQRVSTTVTQNNNSEFAWPGASSWALNGRNSLMNPGPAMASHKEGEDRFFPLSGSLIFGKQGTGRDNVDADKVMITNEEEIKTTNPVATESYGQVATNHQSAQAQAQTGWVQNQGILPGMVWQDRDVYLQGPIWAKIPHTDGNFHPSPLMGGFGMKHPPPQILIKNTPVPADPPTAFNKDKLNSFITQYSTGQVSVEIEWELQKENSKRWNPEIQYTSNYYKSNNVEFAVNTEGVYGEPRPIGTRYLTRNL

SEQ ID NO: 710 - protein, 736 aa, Artificial Sequence
  Description of Artificial Sequence: Synthetic polypeptide
MAADGYLPDWLEDNLSEGIREWWALKPGAPQPKANQQHQDNARGLVLPGYKYLGPGNGLDKGEPVNAADAAALEHDKAYDQQLKAGDNPYLKYNHADAEFQERLKEDTSFGGNLGRAVFQAKKRLLEPLGLVEEAAKTAPGKKRPVEQSPQEPDSSAGIGKSGAQPAKKRLNFGQTGDTESVPDPQPIGEPPAAPSGVGSLTMASGGGAPVADNNEGADGVGSSSGNWHCDSQWLGDRVITTSTRTWALPTYNNHLYKQISNSTSGGSSNDNAYFGYSTPWGYFDFNRFHCHFSPRDRQRLINNNWGFRPKRLNFKLFNIQVKEVTDNNGVKTIANNLTSTVQVFTDSDYQLPYVLGSAHEGCLPPFPADVFMIPQYGYLTLNDGSQAVGRSSFYCLEYFPSQMLRTGNNFQFSYEFENVPFHSSYAHSQSLDRLMNPLIDQYLYYLSKTINGSGQNQQTLKFSVAGPSNMAVQGRNYIPGPSYRQQRVSTTVTQNNNSEFAWPGASSWALNGRNSLMNPGPAMASHKEGEDRFFPLSGSLIFGKQGTGRDNVDADKVMITNEEEIKTTNPVATESYGQVATNHQSAQAQAQTGWVQNQGILPGMVWQDRDVYLQGPIWAKIPHTDGNFHPSPLMGGFGMKHPPPQILIKNTPVPADPPTAFNKDKLNSFITQYSTGQVSVEIEWELQKENSKRWNPEIQYTSNYYKSNNVEFAVNTEGVYSEPRPIGTRYLTRNL

SEQ ID NO: 711 - protein, 736 aa, Artificial Sequence
  Description of Artificial Sequence: Synthetic polypeptide
MAADGYLPDWLEDNLSEGIREWWALKPGAPQPKANQQHQDNARGLVLPGYKYLGPGNGLDKGEPVNAADAAALEHDKAYDQQLKAGDNPYLKYNHADAEFQERLKEDTSFGGNLGRAVFQAKKRLLEPLGLVEEAAKTAPGKKRPVEQSPQEPDSSAGIGKSGAQPAKKRLNFGQTGDTESVPDPQPIGEPPAAPSGVGSLTMASGGGAPVADNNEGADGVGSSSGNWHCNSQWLGDRVITTSTRTWALPTYNNHLYKQISNSTSGGSSNDNAYFGYSTPWGYFDFNRFHCHFSPRDWQRLINNNWGFRPKRLNFKLFNIQVKEVTDNNGVKTIANNLTSTVQVFTDSDYQLPYVLGSAHEGCLPPFPADVFMIPQYGYLTLNDGSQAVGRSSFYCLEYFPSQMLRTGNNFQFSYEFENVPFHSSYAHSQSLDRLMNPLIDQYLYYLSKTINGSGQNQQTLKFSVAGPGNMAVQGRNYIPGPSYRQQRVSTTVTQNNNSEFAWPGASSWALNGRNSLMNPGPAMASHKEGEDRFFPLSGSLIFGKQGTGRDNVDADKVMITNEEEIKTTNPVATESYGQVATNHQSAQAQAQTGWVQNQGILPGMVWQDRDVYLQGPIWAKIPHTDGNFHPSPLMGGFGMKHPPPQILIKNTPVPADPPTAFNKDKLNSFITQYSTGQVSVEIEWELQKENSKRWNPEIQYTSNYYKSNNVEFAVNTEGVYSEPRPIGTRYLTRNL

SEQ ID NO: 712 - protein, 736 aa, Artificial Sequence
  Description of Artificial Sequence: Synthetic polypeptide
MAADGYLPDWLEDNLSEGIREWWALKPGAPQPKANQQHQDNARGLVLPGYRYLGPGNGLDKGEPVNAADAAALEHDKAYDQQLKAGDNPYLKYNHADAEFQERLKEDTSFGGNLGRAVFQAKKRLLEPLGLVEEAAKTAPGKKRPVEQSPQEPDSSAGIGKSGAQPAKKRLNFGQTGDTESVPDPQPIGEPPAAPSGVGSLTMASGGGAPVADNNEGADGVGSSSGNWHCDSQWLGDRVITTSTRTWALPTYNNHLYKQISNSTSGGSSNDNAYFGYSTPWGYFDFNRFHCHFSPRDWQRLINNNWGFRPKRLNFKLFNIQVKEVTDNNGVKTVANNLTSTVQVFTDSDYQLPYVLGSAHEGCLPPFPADVFMIPQYGYLTLNDGSQAVGRSSFYCLEYFPSQMLRTGNNFQFSYEFENVPFHSSYAHSQSLDRLMNPLIDQYLYYLSKTINGSGQNQQTLKFSVAGPSNMAVQGRNYIPGPSYRQQRVSTTVTQNNNSEFAWPGASSWALNGRNSLMNPGPAMASHKEGEDRFFPLSGSLIFGKQGTGRDNVDADKVMITNEEEIKTTNPVATESYGQVATNHQSAQAQAQTGWVQNQGILPGMVWQDRDVYLQGPIWAKIPHTDGNFHPSPLMGGFGMKHPPPQILIKNTPVPADPPTAFNKDKLNSFITQYSTGQVSVEIEWELQKENSKRWNPEIQYTSNYYKSNNVEFAVNTEGVYSGPRPIGTRYLTRNL

SEQ ID NO: 713 - protein, 736 aa, Artificial Sequence; identical to SEQ ID NO: 123
  Description of Artificial Sequence: Synthetic polypeptide

SEQ ID NO: 714 - protein, 736 aa, Artificial Sequence
  Description of Artificial Sequence: Synthetic polypeptide
MAADGYLPDWLEDNLSEGIREWWALKPGAPQPKANQQRQDNARGLVLPGYKYLGPGNGLDKGEPVNAADAAALEHDKAYDQQLKAGGNPCLKYNHADAEFQERLKEDTSFGGNLGRAVFQAKKRLLEPLGLVEEAAKTAPGKKRPVEQSPQEPDSSAGIGRSGAQPAKKRLNFGQTGDTESVPDPQPIGEPPAAPSGVGSLTMASGGGAPVADNNEGADGVGSSSGNWHCDSQWLGDRVITTSTRTWALPTYNNHLYKQISNSTSGGSSNDNAYFGYSTPWGYFDFNRFHCHFSPRDWQRLINNNWGFRPKRLNFKLFNIQVKEVTDNNGVKAIANNLTSTVQVFTDSDYQLPYVLGSAHEGCLPPFPADVFMIPQYGYLTLNDGSQAVGRSSFYCLEYFPSQMLRTGNNFQFSYEFENVPFHSSYAHSQSLDRLMNPLIDQYLYYLSKTIDGSGQNQQTLKFSVAGPSNMAVQGRNYIPGPSYRQQRVSTTVTQNNNSEFAWPGASSWALNGRNSLMDPGPAMASHKEGEDRFFPLSGSLIFGKQGTGRDNVDADKVMITNEEEIKTTNPVATESYGQVATNHQSAQAQAQTGWVQNQGILPGMVWQDRDVYLQGPIWAKIPHTGGNFHPSPLMGGFGMKHPPPQILIKNTPVPADPPTAFNKDKLNSFITQYSTGQVSVEIEWELQKENSKRWNPEIQYTSNYYKSNNVEFAVNTEGVYSEPRPIGTRYLTRNL

SEQ ID NO: 715 - protein, 736 aa, Artificial Sequence
  Description of Artificial Sequence: Synthetic polypeptide
MAADGYLPDWLEDNLSEGIREWWALKPGAPQPKANQQHQDNARGLVLPGYKYLGPGNGLDKGEPVNAADAAALEHDKAYDQQLKAGDNPYLKYNHADAEFQERLKEDTSFGGNLGRAVFQAKKRLLEPLGLVEEAAKTAPGKKRPVEQSPQEPDSSAGIGKSGAQPAKKRLNFGQTGDTESVPDPQPIGEPPAAPSGVGSLTMASGGGAPVADNNEGADGVGSSSGNWHCDSQWLGDRVITTSTRTWALPTYNNHLYKQISNSTSGGSSNDNAYFGYSTPWGYFDFNRFHCHFSPRDWQRLINNNWGFRPKRLNFKLFNIQVKEVTDNNGVKTIANNLTSTVQVFTDSDYQLPYVLGSAHEGCLPPFPADVFMIPQYGYLTLNDGSQAVGRSSFYCLEYFPSQMLRTGNNFQFSYEFENVPFHSSYAHSQSLDRLMNPLIDQYLYYLSKTINGSGQNQQTLKFSVAGPSNMAVQGRNYIPGPSYRQQRVSTTVTQNNNSEFAWPGASSWALNGRNSLMNPGPAMASHKEGEDRFFPLSGSLIFGKQGTGRDNVDADKVMITNEEEIKTTNPVATESYGQVATNHQSAQAQAQTGWVQNQGILPGMVWQDRDVYLQGPIWAKIPHTDGNFHPSPLMGGFGMKHPPPQILIKNTPVPADPPTAFNKDKLNSFITQYSTGQVSVEIEWELQKENSKRWNPEIQYTSNYYKPNNVEFAVNTEGVYSEPRPIGTRYLTRNL

SEQ ID NO: 716 - protein, 736 aa, Artificial Sequence
  Description of Artificial Sequence: Synthetic polypeptide
MAADGYLPDWLEDNLSEGIREWWALKPGAPQPKANQQHQDNARGLVLPGYKYLGPGNGLDKGEPVNAADAAALEHNKAYDQQLKAGDNPYLKCNHADAEFQERLKEDTSFGGNLGRAVFQAKKRPLEPLGLVEEAAKTAPGKKRPVEQSPQEPDSSAGIGKSGAQPAKKRLNFGQTGDTESVPDPQPIGEPPAAPSGVRSLTMASGGGAPVADNNEGADGVGSSSGNWHCDSQWLGDRVITTSTRTWALPTYNNHLYKQISNSTSGGSSNDNAYLGYSTPWGYFDFNRFHCHFSPRDWQRLINNNWGFRPKRLNFKLFNIQVKEVTDNNGVKTIANNLTSTVQVFTDSDYQLPYVLGSAHEGCLPPFPADVFMIPQYGYLTLNDGSQAVGRSSFYCLEYFPSQMLRTGNNFQFSYEFENVPFHSSYAHSQSLDRLMNPLIDQYLYYLSKTINGSGQNQQTLKFSVAGPSNMAVQGRNYIPGPSYRQQRVSTTVTQNNNSEFAWPGASSWALNGRNSLMNPGPTMASHKEGEDRFFPLSGSLIFGKQGTGRDNVDADKVMITNEEEIKTTNPVATESYGQVATNHQSAQAQAQTGWVQNQGILPGMVWQDRDVYLQGPIWAKIPHTDGNFHPSPLMGGFGMKHPPPQILIKNTPVPADPPTAFNKDKLNSFITQYSTGQVSVEIEWELQKENSKRWNPEIQYTSNYYKSNNVEFAVNTEGVYSEPRPIGTRYLTRNL

SEQ ID NO: 717 - protein, 736 aa, Artificial Sequence
  Description of Artificial Sequence: Synthetic polypeptide
MAADGYLPDWLEDNLSEGIREWWALKPGAPQPKANQQHQDNARGLVLPGYKYLGPGNGLDKGEPVNAADAAALVHDKAYDQQLKAGDNPYLKCNHADAEFQERLKEDTSFGGNLGRAVFQAKKRLLEPLGLVEEAAKTAPGKKRPVEQSPQEPDSSAGIGKSGAQPAKKRLNFGQTGDTESVPDPQPIGEPPAAPSGVGSLTMASGGGAPVADNNEGADGVGSSSGNWHCDSQWLGDRVITTSTRTWALPTYNNHLYKQISNSTSGGSSNDNAYLGYSTPWGYFDFNRFHCHFSPRDWQRLINNNWGFRPKRLNFKLFNIQVKEVTDNNGVKTIANNLTSTVQVFTDSDYQLPYVLGSAHEGCLPPFPADVFTIPQYGYLTLNDGSQAVGRSSFYCLEYFPSQMLRTGNNFQFSYEFENVPFHSSYAHSQSLDRLMNPLIDQYLYYLSKTINGSGQNQQTLKFSVAGPSNMAVQGRNYIPGPSYRQQRVSTTVTQNNNSEFAWPGASSWALNGRNSLMNPGPAMASHKEGEDRFFPLSGSLIFGKQGTGRDNVDADKVMITNEEEIKTTNPVATESYGQVATNHQSAQAQAQTGWVQNQGILPGMVWQDRDVYLQGPIWAKIPHTDGNFHPSPLMGGFGMKHPPPQILIKNTPVPADPPTAFNKDKLNSFITQYSTGQVSVEIEWELQKENSKRWNPEIQYTSNYYKSNNVEFAVNTEGVYSEPRPIGPRYLTRNF

SEQ ID NO: 718 - protein, 736 aa, Artificial Sequence
  Description of Artificial Sequence: Synthetic polypeptide
MAADGYLPDWLEDNLSEGIREWWALKPGAPQPKANQQHQDNARGLVLPGYKYLGPGNGLDKGEPVNAADAAALEHNKAYDQQLKAGDNPYLKCNHADAEFQERLKEDTSFGGNLGRAVFQAKKRLLEPLGLVEEAAKTAPGKKRPVEQSPQEPDSSAGIGKSGAQPAKKRLNFGQTGDTESVPDPQPIGEPPAAPSGVRSLTMASGGGAPVADNNEGADGVGSSSGNWHCDSQWLGDRVITTSTRTWALPTYNNHLYKQISNSTSGGSSNDNAYLGYSTPWGYFDFNRFHCHFSPRDWQRLINNNWGFRPKRLNFKLFNIQVKEVTDNNGVKTIANNLTSTVQVFTDSDYQLPYVLGSAHEGCLPPFPADVFMIPQYGYLTLNDGSQAVGRSSFYCLEYFPSQMLRTGNNFQFSYEFENVPFHSSYAHSQSLDRLMNPLIDQYLYYLSKTINGSGQNQQTLKFSVAGPSNMAVQGRNYIPGPSYRQQRVSTTVTQNNNSEFAWPGASSWALNGRNSLMNPGPAMASHKEGEDRFFPLSGSLIFGKQGTGRDNVDADKVMITNEEEIKTTNPVATESYGQVATNHQSAQAQAQTGWVQNQGILPGMVWQDRDVYLQGPIWAKIPHTDGNFHPSPLMGGFGMKHPPPQILIKNTPVPADPPTAFNKDKLNSFITQYSTGQVSVEIEWELQKENSKRWNPEIQYTSNYYKSNNVEFAVNTEGVYSEPRPIGTRYLTRNL

SEQ ID NO: 719 - protein, 736 aa, Artificial Sequence
  Description of Artificial Sequence: Synthetic polypeptide
MAADGYLPDWLEDNLSEGIREWWALKPGAPQPKANQQHQDNARGLVLPGYKYLGPGNGLDKGEPVNAADAAALEHDKAYDQQLKAGDNPYLKCNHADAEFQERLKEDTSFGGNLGRAVFQAKKRLLEPLGLVEEAAKTAPGKKRPVEQSPQEPDSSAGIGKSGAQPAKKRLNFGQTGDTESVPDPQPIGEPPAAPSGVGSLTMASGGGAPVADNNEGADGVGSSSGNWHCDSQWLGDRVITTSTRTWALPTYNNHLYKQISNSTSGGSSNDNAYLGYSTPWGYFDFNRFHCHFSPRDWQRLINNNWGFRPKRLNFELFNIQVKEVTDNNGVKTIANNLTSTVQVFTDSDYQLPYVLGSAHEGCLPPFPADVFMIPQYGYLTLNDGSQAVGRSSFYCLEYFPSQMLRTGNNFQSSYEFENVPFHSSYAHSQSLDRLMNPLIDQYLYYLSKTINGSGQNQQTLKFSVAGPSNMAVQGRNYIPGPSYRQQRASTTVTQNNNSEFAWPGASSWALNGRNSLMNPGPAMASHKEGEDRFFPLSGSLIFGKQGTGRDNVDADKVMITNEEEIKTTNPVATESYGQVATNHQSAQAQAQTGWVQNQGILPGMVWQDRDVYLQGPIWAKIPHTDGNFHPSPLMGGFGMKHPPPQILIKNTPVPADPPTAFNKDKLNSFITQYSTGQVSVEIEWELQKENSKRWNPEIQYTSNYYKSNNVEFAVNTEGVYSEPRPIGTRYLTRNL

SEQ ID NO: 720 - protein, 736 aa, Artificial Sequence
  Description of Artificial Sequence: Synthetic polypeptide
MAADGYLPDWLEDNLSEGIREWWALKPGAPQPKANQQHQDNARGLVLPGYKYLGPGNGLDKGEPVNAADAAALEHDKAYDQQLKAGDNPYLKCNHADAEFQERLKEDTSFGGNLGRAVFQAKKRLLEPLGLVEEAAKTAPGKKRPVEQSPQEPDSSAGIGKSGAQPAKKRLNFGQTGDTESVPDPQPIGEPPAAPPGVGSLTMASGGGAPVADNNEGADGVGSSSGNWHCDSQWLGDRVITTSTRTWALPTYNNHLYKQISNSTSGGSSNDNAYLGYSTPWGYFDFNRFHCHFSPRDWQRLINNNWGFRPKRLNFKLFNIQVKEVTDNNGVKTIANNLTSTVQVFTDSDYQLPYVLGSAHEGCLPPFPADVFMIPQYGYLTLNDGSQAVGRSSFYCLEYFPSQMLRTGNNFQFSYEFENVPFHSSYAHSQSLDRLMNPLIDQYLYYLSKTISGSGQNQQTLKFSVAGPSNMAVQGRNYIPGPSYRQQRVSTTVTQNNSSEFAWPGASSWALNGRNSLMNPGPAMASHKEGEDRFFPLSGSLIFGKQGTGRDNVDADKVMITNEEEIKTTNPVATESYGQVATNHQSAQAQAQTGWVQNQGILSGMVWQDRDVYLQGPIWAKIPHTDGNFHPSPLMGGFGMKHPPPQILIKNTPVPADPPTAFNKDKLNSFITQYSTGQVSVEIEWELQKENSKRWNPEIQYTSNYYKSNNVEFAVNTEGVYSEPRPIGTRYLTRNL

SEQ ID NO: 721 - protein, 736 aa, Artificial Sequence
  Description of Artificial Sequence: Synthetic polypeptide
MAADGYLPDWLEDNLSEGIREWWALKPGAPQPKANQQHQDNARGLVLPGYKYLGPGNGLDKGEPVNAADAAALEHDKAYDQQLKAGDNPYLKCNHADAEFQERLKEDTSFGGNLGRAVFQAKKRLLEPLGLVEEAAKTAPGKKRPVEQSPQEPDSSAGIGKSGAQPAKKRLNFGQTGDTESVPDPQPIGEPPAAPSGVGSLTMASGGGAPVADNNEGADGVGSSSGNWHCDSQWLGDRVITTSTRTWALPTYNNHLYKQISNSTSGGSSNDNAYLGYSTPWGYFDFNRFHCHFSPRDWQRLINNNWGFRPKRLNFKLFNIQVKEVTDNNGVKTIANNLTSTVQVFTDSDYQLPYVLGSAHEGCLPPFPADVFMIPQYGYLTLNDGSQAVGRSSFYCLEYFPSQMLRTGNNFQFSYEFENVPFHSSYAHSQSLDRLMNPLIDQYLYYLSKTINGSGQNQQTLKFSVAGPSNMAVQGRNYIPGPSYRQQRVSTTVTQNNNSEFAWPGASSWALNGRNSLMNPGPAMASHKEGEDRFFPLSGSLIFGKQGTGRDNVDADKVMITNEEEIKTTNPVATESYGQVATNHQSAQAQAQTGWVQNQGILPGMVWQDRDVYLQGPIWAKIPHTDGNFHPSPLMGGFGMKHPPPQILIKNTPVPADPPTAFNKDKLNSFITQYSTGQVSVEIEWELQKENSKRWNPEIQYTSNYYKSNNVEFAVNTEGVYSEPRPIGTRYLTRNL

SEQ ID NO: 722 - protein, 736 aa, Artificial Sequence; identical to SEQ ID NO: 721
  Description of Artificial Sequence: Synthetic polypeptide

SEQ ID NO: 723 - protein, 736 aa, Artificial Sequence
  Description of Artificial Sequence: Synthetic polypeptide
MAADGYLPDWLEDNLSEGIREWWALKPGAPQPKANQQHQDNARGLVLPGYKYLGPGNGLDKGEPVNAADAAALEHDKAYDQQLKAGDNPYLKCNHADAEFQERLKEDTSFGGNLGRAVFQAKKRLLEPLGLVEEAAKTAPGKKRPVEQSPQEPDSSAGIGKSGAQPAKKRLNFGQTGDTESVPDPQPIGEPPAAPSGVGSLTMASGGGAPVADNNEGADGVGSSSGNWHCDSQWLGDRVITTSTRTWALPTYNNHLYKQISNSTSGGSSNDNAYLDYSTPWGYFDFNRFHCHFSPRDWQRLINNNWGFRPKRLNFKLFNIQVKEVTDNNGVKTIANNLTSTVQVFTDSDYQLPYVLGSAHEGCLPPFPADVFMIPQYGYLTLNDGSQAVGRSSFYCLEYFPSQMLRTGNNFQFSYEFENVPFHSSYAHSQSLDRLMNPLIDQYLYYLSKTINGSGQNQQTLKFSVAGPSNMAVQGRNYIPGPSYRQQRVSTTVTQNNNSEFAWPGASSWALNGRNSLMNPGPAMASHKEGEDRFFPLSGSLIFGKQGTGRDNVDADKVMITNEEEIKTTNPVATESYGQVATNHQSAQAQAQTGWVQNQGILPGMVWQGRDVYLQGPIWAKIPHTDGNFHPSPLMGGFGMKHPPPQILIKNTPVPADPPTAFNKDKLNSFITQYSTGQVSVEIEWELQKENSKRWNPEIQYTSNYYKSNNVEFAVNTEGVYSEPRPIGTRYLTRNL

SEQ ID NO: 724 - protein, 736 aa, Artificial Sequence; identical to SEQ ID NO: 721
  Description of Artificial Sequence: Synthetic polypeptide

SEQ ID NO: 725 - protein, 736 aa, Artificial Sequence
  Description of Artificial Sequence: Synthetic polypeptide
MAADGYPPDWLEDNLSEGIREWWALKPGAPQPKANQQHQDNARGLVLPGYKYLGPGNGLDKGEPVNAADAAALEHDKAYDQQLKAGDNPHLKYNHADAEFQERLKEDTSFGGNLGRAVFQAKKRLLEPLGLVEEAAKTAPGKKRPVEQSPQEPDSSAGIGKSGAQPAKKRLNFGQTGDTESVPDPQPIGEPPAAPSGVGSLTMASGGGAPVADNNEGADGVGSSSGNWHCDSQWLGDRVITTSTRTWALPTYNNHLYKQISNSTSGGSSNDNAYFGYSTPWGYFDFNRFHCHFSPRDWQRLINNNWGFRPKRLNFKLFNIQVKEVTDNNGVKTIANNLTSTVQVFTDSDYQLPYVLGSAHEGCLPPFPADVFMIPQYGYLTLNDGSQAVGRSSFYCLEYFPSQMLRTGNNFQFSYEFENVPFHSSYAHSQSLDRLMNPLIDQYLYYLSKTINGSGQNQQTLKFSVAGPSNMAVQGRNYIPGPSYRQQRVSTTVTQNNNSEFAWPGASSWALNGRNSLMNPGPAMASHKEGEDRFFPLSGSLIFGKQGTGRDNVDADKVMITNEEEIKTTNPVATESYGQVATNHQSAQAQAQTGWVQNQGILPGMVWQDRDVYLQGPIWAKIPHTDGNFHPSPLMGGFGVKHPPPQILIKNTPVPADPPTAFNKDRLNSFITQYSTGQVSVEIEWELQKENSKRWNPEIQYTSNYYKSNNVEFAVNTEGVYSEPRPIGTRYLTRNL

SEQ ID NO: 726 - protein, 736 aa, Artificial Sequence
  Description of Artificial Sequence: Synthetic polypeptide
MAADGYLPDWLEDNLSEGIREWWALKPGAPQPKANQQHQDNARGLVLPGYKYLGPGNGLDKGEPVNAADAAALEHDKAYDQQLKAGDNPYLKYNHADAEFQERLKEDTSFGGNLGRAVFQAKKRLLEPLGLVEEAAKTAPGKKRPVEQSPQEPDSSAGIGKSGAQPAKKRLNFGQTGDTESVPDPQPIGEPPAAPSGVGSLTMASGGGAPVADNNEGADGVGSSSGNWHCDSQWLGDRVITTSTRTWALPTYNNHLYKQISNSTSGGSSNDNAYFGYSTPWGYFDFNRFHCHFSPRDWQRLINNNWGFRPKRLNFKLFNIQVKEVTDNNGVKTIANNLTSTVQVFTDSDYQLPYVLGSAHEGCLPPFPADVFMIPQYGYLTLNDGSQAVGRSSFYCLEYFPSQMLRTGNNFQFSYEFENVPFHSSYAHSQSLDRLMNPLIDQYLYYLSKTINGSGQNQQTLKFSVAGPSNMAVQGRNYIPGPSYRQQRVSTTVTQNNNSEFAWPGASSWALNGRNSLMNPGPAMASHKEGEDRFFPLSGSLIFGKQGTGRDNVDADKVMITNEEEIKTTNPVATESYGQVATNHQSAQAQAQTGWVQNQGILPGMVWQDRDVYLQGPIWAKIPHTDGNFHPSPLMGGFGVKHPPPQILIKNTPVPADPPTAFNKDKLNSFITQYSTGQVSVEIEWELQKENSKRWNPEIQYTSNYYKSNNVEFAVNTEGVYSEPRPIGTRYLTRNL

SEQ ID NO: 727 - protein, 736 aa, Artificial Sequence
  Description of Artificial Sequence: Synthetic polypeptide
MAADGYLPDWLEDNLSEGIREWWALKPGAPQPKANQQHQDNARGLVLPGYKYLGPGNGLDKGEPVNAADAAALEHDKAYDQQLKAGDNPYLKYNHADAEFQERLKEDTSFGGNLGRAVFQAKKRLLEPLGLVEEAAKTAPGKKRPVEQSPQEPDSSAGIGKSGAQPAKKRLNFGQTGDTESVPDPQPIGEPPAAPSGVGSLTMASGGGAPVADNNEGADGVGSSSGNWHCDSQWLGDRVITTSTRTWALPTYNNHLYKQISNSTSGGSSNDNAYFGYSTPWGYFDFNRFHCHFSPRDWQRLTNNNWGFRPKRLNFKLFNIQVKEVTDNNGVKTIANNLTSTVQVFTDSDYQLPYVLGSAHEGCLPPFPADVFMIPQYGYLTLNDGSQAVGRSSFYCLEYIPSQMLRTGNNFQFSYEFENVPFHSSYAHSQSLDRLMNPLIDQYLYYLSKTINGSGQNQQTLKFSVAGPSNMAVQGRNYIPGPSYRQQRVSTTVTQNNNSEFAWPGASSWALNGRNSLMNPGPAMASHKEGEDRFFPLSGSLIFGKQGTGRDNVDADKVMITNEEEIKTTNPVATESYGQVATNHQSAQAQAQTGWVQNQGILPGMVWQDRDVYLQGPIWAKIPHTDGNFHPSPLMGGFGVKHPPPQILIKNTPVPADPPTAFNKDKLNSFITQYSTGQVSVEIEWELQKENSKRWNPEIQYTSNYYKSNNVEFAVNTEGVYSEPRPIGTRYLTRNL

SEQ ID NO: 728 - protein, 736 aa, Artificial Sequence
  Description of Artificial Sequence: Synthetic polypeptide
MAADGYLPDWLEDNLSEGIREWWALKPGAPQPKANQQHQDNARGLVLPGYKYLGPGNGLDKGEPVNAADAAALEHDKAYDQQLKAGDNPYLKYNHADAEFQERLKEDTSFGGNLGRAVFQAKKRLLEPLGLVEEAAKTAPGKKRPVEQSPQEPDSSAGIGKSGAQPAKKRLNFGQTGDTESVPDPQPIGEPPAAPSGVGSLTMASGGGAPVADNNEGADGVGSSSGNWHCDSQWLGDRVITTSTRTWALPTYNNHLYKQISNSTSGGSSNDNAYFGYSTPWGYFDFNRFHCHFSPRDWQRLINNNWGFRPKRLNFKLFNIQVKEVTDNNGVKTIANNLTSTVQVFTDSDYQLPYVLGSAHEGCLPPFPADVFMIPQYGYLTLNDGSQAVGRSSFYCLEYFPSQMLRTGNNFQFSYEFENVPFHSSYAHSQSLDRLMNPLIDQYLYYLSKTINGSGQNQQTLKFSVAGPSNMAVQGRNYIPGPSYRQQRVSTTVTQNNNSEFAWPGASSWALNGRNSLMNPGPAMASHKEGEDRFFPLSGSLISGKQGTGRDNVDANKVMITNEEEIKTTNPVATESYGQVATNHQSAQAQAQTGWVQNQGILPGMVWQDRDVYLQGPIWAKIPHTDGNFHPSPLMGGFEMKHPPPQILIKNTPVPADPPTAFNKDKLNSFITQYSTGQVSVEIEWELQKENSKRWNPEIQYTSNYYKSNNVEFAVNTEGVYSEPRPIGTRYLTRNL

SEQ ID NO: 729 - protein, 736 aa, Artificial Sequence
  Description of Artificial Sequence: Synthetic polypeptide
MAADGYLPDWLEDNLSEGIREWWALKPGAPQPKANQQHQDNARGLVLPGYKYLGPGNGLDKGEPVNAADAAALEHDKAYDQQLKAGDNPYLKYNHADAEFQERLKEDTSFGGNLGRAVFQAKKRLLEPLGLVEEAAKTAPGKKRPVEQSPQEPDSSAGIGKSGAQPAKKRLNFGQTGDTESVPDPQPIGEPPAAPSGVGSLTIASGGGAPVADNNEGADGVGSSSGNWHCDSQWLGDRVITTSTRTWALPTYNNHLYKRISNSTSGGSSNDNAYFGYSTPWGYFDFNRFHCHFSPRDWQRLINNNWGFRPKRLNFKLFNIRVKEVTDNNGVKTITNNLTSTVQVFTDSDYQLPYVLGSAHEGCLPPFPADVFMIPQYGYLTLNDGSQAVGRSSFYCLEYFPSQMLRTGNNFQFSYEFENVPFHSSYAHSQSLDRLMNPLIDQYLYYLSKTINGSGQNQQTLKFSVAGPSNMAVQGRNYIPGPSYRQQRVSTTVTRNNNSEFAWPGASSWALNGRNSLMNPGPAMASHKEGEDRFFPLSGSLIFGKQGTGRDNVDADKVMITNEEEIKTTNPVATESYGQVATNHQSAQAQAQTGWVQNQGILPGMVWQDRDVYLQGPIWAKIPHTDGNFHPSPLMGGFGVKHPPPQILIKNTPVPADPPTAFNKDKLNSFITQYSTGQVSVEIEWELQKENSKRWNPEIQYTSNYYKSNNVEFAVNTEGVYSEPRPIGTRYLTRNL

SEQ ID NO: 730 - protein, 736 aa, Artificial Sequence
  Description of Artificial Sequence: Synthetic polypeptide
MAADGYLPDWLEDNLSEGIREWWALKPGAPQPKANQQHQDNARGLVLPGYKYLGPGNGLDKGEPVNAADAAALEHDKAYDQQLKAGDNPYLKYNHADAEFQERLKEDTSFGGNLGRAVFQAKKRLLEPLGLVEEAAKTAPGKKRPVEQSPQEPDSSAGIGKSGAQPAKKRLNFGQTGDTEPVPDPQPIGEPPAAPSGVGSLTMASGGGAPVADNNEGADGVGSSSGNWHCDSQWLGDRVITTSTRTWALPTYNNHLYKQISNSTSGGSSNDNAYFGYSTPWGYFDFNRFHCHFSPRDWQRLINNNWGFRPKRLNFKLFNIQVKEVTDNNGVKTIANNLTSTVQVFTDSDYQLPYVLGSAHEGCLPPFPAGVFMIPQYGYLTLNDGSQAVGRSSFYCLEYFPSQMLRTGNNFQFSYEFENVPFHSSYAHSQSLDRLMNPLIDQYLYYLSKTINGSGQNQQTLKFSVAGPSNMAVQGRNYIPGPSYRQQRVSTTATQNNNSEFAWPGASSWALNGRNSLMNPGPAMASHKEGEDRFFPLSGSLIFGKQGTGRDNVDADKVMITNEEEIKTTNPVATESYGQVATNHQSAQAQAQTGWVQNQGILPGMVWQDRDVYLQGPIWAKIPHTDGNFHPSPLMGGFGMKHPPPQILIKNTPVPADPPTAFNKDKLNSFITQYSTGQVSVEIEWELQKENSKRWNPEIQYTSNYYKSNNVEFAVNTEGVYSEPRPIGTRYLTRNL

SEQ ID NO: 731 - protein, 736 aa, Artificial Sequence
  Description of Artificial Sequence: Synthetic polypeptide
MAADGYLPDWLEDNLSEGIREWWALKPGAPQPKANQQHQDNARGLVLPGYKYLGPGNGLDKGEPVNAADAAALEHDKAYDQQLKAGDNPYLKYNHADAGFQERLKEDTSFGGNLGRAVFQAKKRLLEPLGLVEEAAKTAPGKKRPVEQSPQEPDSSAGIGKSGAQPAKKRLNFGQTGDTESVPVPQPIGEPPAAPSGVGSLTMASGGGAPVADNNEGADGVGSSSGNWHCDSQWLGDRVITTSTRTWALPTYNNHLYKQISNSTSGGSSNDNAYFGYSTPWGYFDFNRFHCHFSPRDWQRLINNNWGFRPKRLNFKLFNIQVKEVTDNNGVKTIANNLTSTVQVFTDSDYQLPYVLGSAHEGCLPPFPADVFMIPQYGYLTLNDGSQAVGRSSFYCLEYFPSQMLRTGNNFQFSYEFENVPFHSSYAHSQSLDRLMNPLIDQYLYYLSKTINGSGQNQQTLKFSVAGPSNMAVQGRNYIPGPSYRQQRVSTTVTQNNNSEFAWPGASSWALNGRNSLMNPGPAMASHKEGEDRFFPLSGSLIFGKQGAGRDNVDADKVMITNEEEIKTTNPVATESYGQVATNHQSAQAQAQTGWVQNQGILPGMVWQDRDVYLQGPIWAKIPHTDGNFHPSPLMGGFGMKHPPPQILIKNTPVPADPPTAFNKDKLNSFITQYSTGQVSVEIEWELQKENSKRWNPEIQYTSNYYKSNNVEFAVNTEGVYSEPRPIGTRYLTRNL

SEQ ID NO: 732 - protein, 736 aa, Artificial Sequence
  Description of Artificial Sequence: Synthetic polypeptide
  MOD_RES (126)..(126): Xaa = any amino acid
MAADGYLPDWLEDNLSEGIRERWALKPGAPQPKANQQHQDNARGLVLPGYKYLGPGNGLDKGEPVNAADAAALEHDKAYDQQLKAGDNPYLKYNHADAEFQERLKEDTSFGGNLGRAVFQAKKRLXEPLGLVEEAAKTAPGKKRPVEQSPQEPDSSAGIGKSGAQPAKKRLNFGQTGDTESVPDPQPIGEPPAAPSGVGSLTMASGGGAPVADNNEGADGVGSSSGNWHCDSQWLGDRVITTSTRTWALPTYNNHLYKQISNSTSGGSSNDNAYFGYSTPWGYFDFNRFHCHFSPRDWQRLINNNWGFRPKRLNFKLFNIQVKEVTDNNGVKTIANNLTSTVQVFTDSDYQLPYVLGSAHEGCLPPFPADVFMIPQYGYLTLNDGSQAVGRSSFYCLEYFPSQMLRTGNNFQFSYEFENVPFHSSYAHSQSPDRLMNPLIDQYLYYLSKTINGSGQNQQTLKFSVAGPSNMAVQGRNYIPGPSYRQQRVSTTVTQNNNSEFAWPGASSWALNGRNSLMNPGPAMASHKEGEDRFFPLSGSLIFGKQGTGRDNVDADKVMITNEEEIKTTNPVATESYGQVATNHQSAQAQAQTGWVQNQGILPGMVWQDRDVYLQGPIWAKIPHTDGNFHPSPLMGGFGVKHPPPQILIKNTPVPADPPTAFNKDKLNSFITQYSTGQVSVEIEWELQKENSKRWNPEIQYTSNYYKSNNVEFAVNTEGVYSEPRPIGTRYLTRNL

SEQ ID NO: 733 - protein, 736 aa, Artificial Sequence
  Description of Artificial Sequence: Synthetic polypeptide
MAADGYLPDWLEDNLSEGIREWWALKPGAPQPKANQQHQDNARGLVLPGYKYLGPGNGLDKGEPVNAADAAALEHDKAYDQQLKAGDNPYLKYNHADAEFQERLKEDTSFGGNLGRAVFQAKKRLLEPLGLVEEAAKTAPGKKRPVEQSPQEPDSSAGIGKSGAQPAKKRLNFGQTGDTESVPDPQPIGEPPAAPSGVGSLTMASGGGAPVADNNEGADGVGSSSGNWHCDSQWLGDRVITTSTRTWALPTYNNHLYKQISNSTSGGSSNDNAYLGYSTPWGYFDFNRFHCHFSPRDWQRLINNNWGFRPKRLNFKLFNIQVKEVTDNNGVKTIANNLTSTVQVFTDSDYQLPYVLGSAHEGCLPPFPADVFMIPQYGYLTLNDGSQAVGRSSFYCLEYFPSQMLRTGNNFQFSYEFENVPFHSSYAHSQSLDRLMNPLIDQYLYYLSKTINGSGQNQQTLKFSVAGPSNMAVQGRNYIPGPSYRQQRVSTTVTQNNNSEFAWPGASSWALNGRNSLMNPGPAMASHKEGEDRFFPLSGSLIFGKQGTGRDNVDADKVMITNEEEIKTTNPVATESYGQVATNHQSAQAQAQTGWVQNQGILPGMVWQDRDVYLQGPIWAKIPHTDGNFHPSPLMGGFGMKHPPPQILIKNTPVPADPPTAFNKDKLNSFITQYSTGQVSVEIEWELQKENSKRWNPEIQYTSNYYKSNNVEFAVNTEGVYSEPRPIGTRYLTRNL

SEQ ID NO: 734 - protein, 736 aa, Artificial Sequence
  Description of Artificial Sequence: Synthetic polypeptide
MAADGYLPDWLEDNLSEGIREWWALKPGAPQPKANQQHQDNARGLVLPGYKYLGPGNGLDKGEPVNAADAAALEHDKAYDQQLKAGDNPYLKYNHADAEFQERLKEDTSFGGNLGRAVFQAKKRLLEPLGLVEEAAKTAPGKKRPVEQSPQEPDSSAGIGKSGAQPAKKRLNFGQTGDTESVPDPQPIGEPPAAPSGVGSLTMASGGGAPVADNNEGADGVGSSSGNWHCDSQWLGDRVITTSTRTWALPTYNNHLYKQISNSTSGGSSNDNAYFGYSTPWGYFDFNRFHCHFSPRDWQRLINNNWGFRPKRLNFKLFNIQVKEVTDNNGVKTIANNLTSTVQVFTDSDYQLPYVLGSAHEGCLPPFPADVFMIPQYGYLTLNDGSQAVGRSSFYCLEYFPSQMLRTGNNFQFSYEFENVPFHSSYAHSQSLDRLMNPLIDQYLYYLSKTINGSGQNQQTLKFSVAGPSNMAVQGRNYIPGPSYRQQRVSTTVTQNNNSEFAWPGASSWALNGRNSLMNPGPAMASHKEGEDRFFPLSGSLIFGKQGTGRDNVDADKVMITNEEEIKTTNPVATESYGQVATNHQSAQAQAQTGWVQNQGILPGMVWQDRDVYLQGPIWAKIPHTDGNFHPSPLMGGFGMKHPPPQILIKNTPVPADPPTAFNKDKLDSFITQYSTGQVSVEIEWELQKENSKRWNPVIQYTSNYYKSNNVEFAVNTEGVYSEPRPIGTRYLTRNL

SEQ ID NO: 735 - protein, 736 aa, Artificial Sequence
  Description of Artificial Sequence: Synthetic polypeptide
MAADGYLPDWLEDNLSEGIREWWDLKPGAPKPKANQQKQDDGRGLVLPGYKYLGPFNGLDKGEPVNAADAAALEHDKAYDQQLKAGDNPYLRYNHADAEFQERLQEDTSFGGNLGRAVFQAKKRVLEPLGLVEEGAKTAPGKKRPVEQSPQEPDSSSGIGKTGQQPAKKRLNFGQTGDSESVPDPQPLGEPPATPAAVGPTTMASGGGAPMADNNEGVDGVGNASGNWHCDSTWLGDRVITTSTRTWALPTYNNHLYKQISSASTGASNDNHYFGYSTPWGYFDFNRFHCHFSPRDWQRLINNNWGFRPKRLNFKLFNIQVKEVTTNDGVTTIANNLTSTVQVFSDSEYQLPYVLGSAHQGCLPPFPADVFMIPQYGYLTLNNGSQAVGRSSFYCLEYFPSQMLRTGNNFTFSYTFEEVPFHSSYAHSQSLDRLMNPLIDQYLYYLNRTQNQSGSAQNKDLLFSRGSPAGMSVQPKNWLPGPCYRQQRVSKTKTDNNNSNFTWTGASKYNLNGRESIINPGTAMASHKDDEDKFFPMSGVMIFGKESAGASNTALDNVMITDEEEIKATNPVATERFGTVAVNFQSSSTDPATGDVHAMGALPGMVWQDRDVYLQGPIWAKIPHTDGHFHPSPLMGGFGLKNPPPQILIKNTPVPANPPAEFSATKLASFITQYSTGQVSVEIEWELQKENSKRWNPEVQYTSNYAKSANVDFTVDNNGLYTEPRPIGTRYLTRPL

SEQ ID NO: 736 - protein, 736 aa, Artificial Sequence
  Description of Artificial Sequence: Synthetic polypeptide
MAADGYLPDWLEDNLSEGIREWWDLKPGAPKPKANQQKQDDGRGLVLPGYKYLGPFNGLDKGEPVNAADAAALEHDKAYDQQLKAGDNPYLRYNHADAEFQERLQEDTSFGGNLGRAVFQAKKRVLEPLGLVEEGAKTAPGKRRPVEQSPQEPDSSSGIGKTGQQPAKKRLNFGQTGDSESVPDPQPLGEPPATPAAVGPTTMASGGGAPMADNNEGADGVGNASGNWHCDSTWLGDRVITTSTRTWALPTYNNHLYKQISSASTGASNDNHYFGYSTPWGYFDFNRFHCHFSPRDWQRLINNNWGFRPKRLNFKLFNIQVKEVTTNDGVTTIANNLTSTVQVFSDSEYQLPYVLGSAHQGCLPPFPADVFMIPQYGYLTLNNGSQAVGRSSFYCLEYFPSQMLRTGNNFTFSYTFEEVPFHSSYAHSQSLDRLMNPLIDQYLYYLNRTQNQSGSAQNKDLLFSRGSPAGMSVQPKNWLPGPCYRQQRVSKTKTDNNNSNFTWTGASKYNLNGRESIINPGTAMASHKDDEDKFFPMSGVMIFGKESAGASNTALDNVMITDEEEIKATNPVATERFGTVAVNFQSSSTDPATGDVHAMGALPGMVWQDRDVYLQGPIWAKIPHTDGHFHPSPLMGGFGLKNPPPQILIKNTPVPANPPAEFSATKFASFITQYSTGQVSVEIEWELQKENSKRWNPEVQYTSNYAKSANVDFTVDNNGLYTEPRPIGTRYLTRPL

SEQ ID NO: 737 - protein, 736 aa, Artificial Sequence
  Description of Artificial Sequence: Synthetic polypeptide
MAADGYLPDWLEDNLSEGIREWWDLKPGAPKPKANQQKQDDGRGLVLPGYKYLGPFNGLDKGEPVNAADAAALEHDKAYDQQLKAGDNPYPRYNHADAEFQERLQEDTSFGGNLGRAVFQAKKRVLEPLGLVGEGAKTAPGKKRPVEQSPQEPDSSSGIGKTGQQPAKKRLNFGQTGDSESVPDPQPLGEPPATPAAVGPTTMASGGGAPMADNNEGADGVGNASGNWHCDSTWLGDRVITTSTRTWALPTYNNHLYKQISSASTGASNDNHYFGYSTPWGYFDFNRFHCHFSPRDWQRLINNNWGFRPKRLNFKLFNIQVKEVTTNDGVTTIANNLTSTVQVFSDSEYQLPYVLGSAHQGCLPPFPADVFMIPQYGYLTLNNGSQAVGRSSFYCLEYFPSQMLRTGNNFTFSYTFEEVPFHSSYAHSQSLDRLMNPPIDQYLYYLNRTQNQSGSAQNKDLLFSRGSPAGMSVQPKNWLPGPCYRQQRVSKTKTDNNNSNFTWTGASKYNLNGRESIINPGTAMASHKDDEDKFFPMSGVMIFGKESAGASNTALDNVMITDEEEIKATNPVATERFGTVAVNFQSSSTDPATGDVHAMGALPGMVWQDRDVYLQGPIWAKIPHTDGHFHPSPLMGGFGLKNPPPQILIKNTPVPANPPAEFSATKFASFITQYSTGQVSVEIEWELQKENSKRWNPEVQYTSNYAKSANVDFTVDNNGLYTEPRPIGTRYLTRPL

SEQ ID NO: 738 - protein, 736 aa, Artificial Sequence
  Description of Artificial Sequence: Synthetic polypeptide
MAADGYLPDWLEDNLSEGIREWWDLKPGAPKPKANQQKQDDGRGLVLPGYKYLGPFNGLDKGEPVNAADAAALEHDKAYDQQLKAGDNPYLRYNHADAEFQERLQEDTSFGGNLGRAVFQAKKRVLEPLGLVEEGAKTAPGKKRPVEQSPQEPDSSSGIGKTGQQPAKKRLNFGQTGDSESVPDPRPLGEPPATPAAVGPTTMASGGGAPMADNNEGADGVGNASGNWHCDSTWLGDRVITTSTRTWALPTYNNHLYKQISSASTGASNDNHYFGYSTPWGYFDFNRFHCHFSPRDWQRLINNNWGFRPKRLNFKLFNIQVKEVTTNDGVTTIANNLTSTVQVFSDSEYQLPYVLGSAHQGCLPPFPADVFMIPQYGYLTLNNGSQAVGRSSFYCLEYFPSQMLRTGNNFTFSYTFEEVPFHSSYAHSQSLDRLMNPLIDQYLYYLNRTQNQSGSAQNKDLLFSRGPPAGMSVQPKNWLPGPCYRQQRVSKTKTDNNNSNFTWTGASKYNLNGRESIINPGTAMASHKDDEDKFFPMSGVMIFGKESAGASNTALDNVMITDEEEIKATNPVATERFGTVAVNFQSSSTDPATGDVHAMGALPGMVWQDRDVYLQGPIWAKIPHTDGHFHPSPLMGGFGLKNPPPQILIKNTPVPANPPAEFSATKFASFITQYSTGQVSVEIEWELQKENSKRWNPEVQYTSNYAKSANVDFTVDNNGLYTEPRPIGTRYLTRPL

SEQ ID NO: 739 - protein, 736 aa, Artificial Sequence
  Description of Artificial Sequence: Synthetic polypeptide
MAADGYLPDWLEDNLSEGIREWWDLKPGAPKPKANQQKQDDGRGLVLPGYKYLGPFNGLDKGEPVNAADAAALEHDKAYDQQLKAGDNPYLRYNHADAEFQERLQEDTSFGGNLGRAVFQAKKRVLEPLGLVEEGAKTAPGKKRPVEQSPQEPDSSSGIGKTGQQPAKKRLNFGQTGGSESVPDPQPLGEPPATPAAVGPTTMASGGGAPMADNNEGADGVGNASGNWHCDSTWLGDRVITTSTRTWALPTYNNHLYKQISSASTGASNDNHYFGYSTPWGYFDFNRFHCHFSPRDWQRLINNNWGFRPKRLNFKLFNIQVKEVTTNDGVTTIANNLTSTVQVFSDSEYQLPYVLGSAHQGCLPPFPADVFMIPQYGYLTLNNGSQAVGRSSFYCLEYFPSQMLRTGNNFTFSYTFEEVPFHSSYAHSQSLDRLMNPPIDQYLYYLNRTQNQSGSAQNKDLLFSRGSPAGMSVQPKNWLPGPCYRQQRVSKTKTDNNNSNFTWTGASKYNLNGRESIINPGTAMASHKDDEDKFFPMSGVMIFGKESAGASNTALDNVMITDEEEIKATNPVATERFGTVAVNFQSSSTDPATGDVHAMGALPGMVWQDRDVYLQGPIWAKIPHTDGHFHPSPLMGGFGLKNPPPQILIKNTPVPANPPAEFSATKFASFITQYSTGQVSVEIEWELQKENSKRWNPEVQYTSNYAKSANVDFTVDNNGLYTEPRPIGTRYLTRPL

SEQ ID NO: 740 - protein, 736 aa, Artificial Sequence
  Description of Artificial Sequence: Synthetic polypeptide
MAADGYLPDWLEDNLSEGIREWWDLKPGAPKPKANQQKQDDGRGLVLPGYKYLGPFNGLDKGEPVNAADAAALEHDKAYDQQLKAGDNPYLRYNHADAEFQERLQEDTSFGGNLGRAVFQAKKRVLEPLGLVEEGAKTAPGKKRPVEQSPQEPDSSSGIGKTGQQPAKKRLNFGQTGDSESVPDPQPLGEPPATPAAVGPTTMASGGGAPMADNNEGADGVGNASGNWHCDSTWLGDRVITTSTRTWALPTYNNHLYKQISSASTGASNDNHYFGYSTPWGYFDFNRFHCHFSPRDWQRLINNNWGFRPKRLNFKLFNIQVKEVTTNDGVTTIANNLTSTVQVFSDSEYQLPYVLGSAHQGCLPPFPADVFMIPQYGYLTLNNGSQAVGRSSFYCLEYFPSQMLRTGNNFTFSYTFEEVPFHSSYAHSQSLDRLMNPLIDQYLYYLNRTQNQSGSAQNKDLLFSRGSPAGMSVQPKNWLPGPCYRQQRVSKTKTDNNNSNFTWTGASKYNLNGRESIINPGTAVASHKDDEDKFFPMSGVMIFGKESAGASNTALDNVMITDEEEIKATNPVATERFGTVAVNFQSSSTDPATGDVHAMGALPGMVWQDRDVYLQGPIWAKIPHTDGHFHPSPLMGGFGLKNPPPQILIKNTPVPANPPAEFSATKFASFITQYSTGQVSVEIEWELQKENSKRWNPEVQYTSNYAKSANVDFTVDNNGLYTEPRPIGTRYLTRPL

SEQ ID NO: 741 - protein, 736 aa, Artificial Sequence
  Description of Artificial Sequence: Synthetic polypeptide
MAADGYLPDWLEDNLSEGIREWWDLKPGAPKPKANQQKQDDGRGLVLPGYKYLGPFNGLDKGEPVNAADAAALEHDKAYDQQLKAGDNPYLRYNHADAEFQERLQEDTSFGGNLGRAVFQAKKRVLEPLGLVEEGAKTAPGKKRPVEQSPQEPDSSSGIGKTGQQPAKKRLNFGQTGDSESVPDPQPLGEPPATPAAVGPTTMASGGGAPMADNNEGADGVGNASGNWHCDSTWLGDRVITTSTRTWALPTYNNHLYKQISSASTGASNDNHYFGYSTPWGYFDFNRFHCHFSPRDWQQLINNNWGFRPKRLNFKLFNIQVKEVTTNDGVTTIANNLTSTVQVFSDSEYQLPYVLGSAHQGCLPPFPADVFMIPQYGYLTLNNGSQAVGRSSFYCLEYFPSQMLRTGNNFTFSYTFEEVPFHSSYAHSQSLDRLMNPLIDQYLYYLNRTQNQSGSAQNKDLLFSRGSPAGMSVQPKNWLPGPCYRQQRVSKTKTDNNNSNFTWTGASKYNLNGRESIINPGTAMASHKDDEDKFFPMSGVMIFGKESAGASNTALDNVMITDEEEIKATNPVATERFGTVAVNFQSTSTDPATGDVHAMGALPGMVWQDRDVYLQGPIWAKIPHTDGHFHPSPLMGGFGLKNPPPQILIKNTPVPANPPAEFSATKFASFITQYSTGQVSVEIEWELQKENSKRWNPEVQYTSNYAKSADVDFTVDNNGLYTEPRPIGTRYLTRPL

SEQ ID NO: 742 - protein, 736 aa, Artificial Sequence
  Description of Artificial Sequence: Synthetic polypeptide
MAADGYLPDWLEDNLSEGIREWWDLKPGAPKPKANQQKQDDGRGLVLPGYKYLGPFNGLDKGEPVNAADAAALEHDKAYDQQLKAGDNPYLRYNHADAEFQERLQEDTSFGGNLGRAVFQAKKRVLEPLGLVEEGAKTAPGKKRPVEQSPQEPDSSSGIGKTGQQPAKKRLNFGQTGDSESVPDPQPLGEPPATPAAVGPTTMASGGGAPMADNNEGADGVGNASGNWHCDSTWLGDRVITTSTRTWALPTYNNHLYKQISSASTGASNDNHYFGYSTPWGYFDFNRFHCHFSPRDWQRLINNNWGFRPKRLNFKLFNIQVKEVTTNDGVTTIANNLTSTVQVFSDSEYQPPYVLGSAHQGCLPPFPADVFMIPQYGHLTLNNGSQAVGRSSFYCLEYFPSQMLRTGNNFTFSYTFEEVPFHSSYAHSQSLDRLTNPLIDQYLYYLNRTQNQSGSAQNKDLLFSRGSPAGMSVQPKNWLPGPCYRQQRVSKTKTDNNNSNFTWTGASKYNLNGRESIINPGTAMASHKDDEDKFFPMSGVMIFGKESAGASNTALDNVMITDEEEIKATNPVATERFGTVAVNFQSSSTDPATGDVHAMGALPGMVWQDRDVYLQGPIWAKIPHTDGHFHPSPLMGGFGLKNPPPQILIKNTPVPANPPAEFSATKFASFITQYSTGQVSVEIEWELQKENSKRWNPEVQYTSNYAKSANVDFTVDNNGLYTEPRPIGTRYLTRPL

SEQ ID NO: 743 - protein, 736 aa, Artificial Sequence
  Description of Artificial Sequence: Synthetic polypeptide
MAADGYLPDWLEDNLSEGIREWWDLKPGAPKPKANQQEQDDGRGLVLPGYKYLGPFNGLDKGEPVNAADAAALEHDKAYDQQLKAGDNPYLRYNHADAEFQERLQEDTSFGGNLGRAVFQAKKRVLEPLGLVEEGAKTAPGKKRPVEQSPQEPDSSSGIGKTGQQPAKKRLNFGQTGDSESVPDPQPLGEPPATPAAVGPTTMASGGGAPMADNNEGADGVGNASGNWHCDSTWLGDRVITTSTRTWALPTYNNHLYKQISSASTGASNDNHYFGYSTPWGYFDFNRFHCHFSPRDWQRLINNNWGFRPKRLNFKLFNIQVKEVTTNDGVTTIANNLTSTVQVFSDSEYQLPYVLGSAHQGCLPPFPADVFMIPQYGYLTLNNGSQAVGRSSFYCLEYFPSQMLRTGNNFTFSYTFEEVPFHSSYAHSQSLDRLMNPLIDQYLYYLNRTQNQSGSAQNKDLLFSRGSPAGMSVQPKNWLPGPCYRQQRVSKTKTDNNNSNFTWTGASKYNLNGRESIINPGTAMASHKDDEDKFFPMSGVMIFGKESAGASNTALDNVMITDEEEIKATNPVATERFGTVAVNFQSSSTDPATGDVHATGTLPGMVWQDRDVYLQGPIWAKIPHTDGHFHPSPLMGGFGLKNPPPQILIKTTPVPANPPAEFSATKFASFITQYSTGQVSVEIEWELQKENSKRWNPEVQYTSNYAKSANVDFTVDDNGLYTEPRPIGTRYLTRPL

SEQ ID NO: 744 - protein, 736 aa, Artificial Sequence
  Description of Artificial Sequence: Synthetic polypeptide
MAADGYLPDWLEDNLSEGIREWWDLKPGAPKPKANQQKQDDGRGLVLPGYKYLGPFNGLDKGEPVNAADAAALEHDKAYDQQLKAGDNPYLRYNHADAEFQERLQEDTSFGGNLGRAVFQAKKRVLEPLGLVEEGAKTAPGKKRPVEQSLQEPDSSSGIGKTGQQPAKKRLNFGQTGDSESVPDPQPLGEPPATPAAVGPTTMASGGGAPMADNNEGADGVGNASGNWHCDSTWLGDRVITTSTRTWALPTYNNHLYKQISSASTGASNDNHYFGYSTPWGYFDFNRFHCHFSPRDWQRLINNNWGFRPKRLNFKLFNIQVKEVTTNDGVTTIANNLTSTVQVFSDSEYQLPYVLGSAHQGCLPPFPADVFMIPQYGYLTLNNGSQAVGRSSFYCLEYFPSQMLRTGNNFTFSYTFEEVPFHSSYAHSQSLDRLMNPLIDQYLYYLNRTQNQSGSAQNKDLLFSRGSPAGMSVQPKNWLPGPCYRQQRVSKTKTDNDNSNFTWTGASKYNLNGRESIINPGTAMASHKDDEDKFFPMSGVMIFGKESAGASNTALDNVMITDEEEIKATNPVATERFGTVAVNFQSSSTDPATGDVHAMGALPGMVWQDRDVYLQGPIWAKIPHTDGHFHPSPLMGGFGLKNPPPQILIKNTPVPANPPAEFSATKFASFITQYSTGQVSVEIEWELQKENSKRWNPEVQYTSNYAKSANVDFTVDNNGLYTEPRPIGTRYLTRPL

SEQ ID NO: 745 - protein, 736 aa, Artificial Sequence
  Description of Artificial Sequence: Synthetic polypeptide
MAADGYLPDWLEDNLSEGIREWWDLKPGAPKPKANQQKQDDGRGLVLPGYKYLGPFNGLDKGEPVNAADAAALEHDKAYDQQLKAGDNPYLRYNHADAEFQERLQEDTSFGGNLGRAVFQAKKRVLEPLGLVEEGAKTAPGKKRPVEQSPQEPDSSSGIGKTGQQPAKKRLNFGQTGDSESVPDPQPLGEPPATPAAVGPTTMASGGGAPMADNNEGADGVGNASGNWHCDSTWLGDRVITTSTRTWALPTYNNHLYKQISSASTGASNDNHYFGYSTPWGYFDFNRFHCHFSPRDWQRLINNNWGFRPKRLNFKLFNIQVKEVTTNDGVTTIANNLTSTVQVFSDSEYQLPYVLGSAHQGCLPPFPADVFMIPQYGYLTLNNGSQAVGRSSFYCLEYFPSQMLRTGNNFTFSYTFEEAPFHSSYAHSQSLDRLMNPLIDQYLYYLNRTQNQSGSAQNKDLLFSRGSPAGMSVQPKNWLPGPCYRQQRVSKTKTDNNNSNFTWTGASKYNLNGRESIINPGTAMASHKDDEDKFFPMSGVMIFGKESAGASNTALDNVMITDEEEIKATNPVATERFGTVAVNFQSSSTDPATGDVHAMGALPGMVWQDRDVYLQGPIWAKIPHTDGHFHPSPLMGGFGLKNPPPQILIKNTPVPANPPAEFSATKFASFITQYSTGQVSVEIEWELQKENSKRWNPEVQYTSNYAKSANVDFTVDNNGLYTEPRPVGTRYLTRPL

SEQ ID NO: 746 - protein, 736 aa, Artificial Sequence
  Description of Artificial Sequence: Synthetic polypeptide
MAADGYLPDWLEDNLSEGIREWWDLKPGAPKPKANQQKQDDGRGLVLPGYKYLGPFNGLDKGEPVNAADAAALEHDKAYDQQLKAGDNPYLRYNHADAEFQERLQENTSFGGNLGRAVFQAKKRVLEPLGLVEEGAKTAPGKKRPVEQSPQEPDSSSGIGKTGQQPAKKRLNFGQTGDSESVPDPQPLGEPPATPAAVGPTTMASGGGAPMADNNEGADGVGNASGNWHCDSTWLGDRVITTSTRTWALPTYNNHLYKQISSASTGASNDNHYFGYSTPWGYFDFNRFHCHFPPRDWQRLINNNWGFRPKRLNFKLFNIQVKEVTSNDGVTTIANNLTSTVQVFSDSEYQLPYVLGSAHQGCLPPFPADVFMIPQYGYLTLNNGSQAVGRSSFYCLEYFPSQMLRTGNNFTFSYTFEEVPFHSSYAHSQSLDRLMNPLIDQYLYYLNRTQNQSGSAQNKDLLFSRGSPAGMSVQPKNWLPGPCYRQQRVSKTKTDNNNSNFTWTGASKYNLNGRESIINPGTAMASHKDDEDKFFPMSGVMIFGKESAGASNTALDNVMITDEEEIKATNPVATERFGTVAVNFQSSSTDPATGDVHAMGALPGMVWQDRDVYLQGPIWAKIPHTDGHFHPSPLMGGFGLKNPPPQILIKNTPVPANPPAEFSATKFASFITQYSTGQVSVEIEWELQKENSKRWNPEVQYTSNYAKSANVDFTVDNNGLYTEPRPIGTRYLTRPL

SEQ ID NO: 747 - protein, 736 aa, Artificial Sequence
  Description of Artificial Sequence: Synthetic polypeptide
MAADGYLPDWLEDNLSEGIREWWDLKPGAPKPKANQQKQDDGRGLVLPGYKYLGPFNGLDKGEPVNAADAAALEHDKAYDQQLKAGDNPYLRYNHADAEFQERLQEDTSFGGNLGRAVFQAKKRVLEPLGLVEEGAKTAPGKKRPVEQSPQEPDSSSGIGKTGQQPAKKRLNFGQTGDSESVPDPQPLGEPPATPAAVGPTTMASGGGAPMADNNEGADGVGNASGNWHCDSTWLGDRVITTSTRTWALPTYNNHLYKQISSASTGASNDNHYFGYSTPWGYFDFNRFHCHFSPRDWQRLINNNWGFRPKRLNFKLFNIQVKEVTTNDGVTTIANNLTSTVQVFSDSEYQLPYVLGSAHQGCLPPFPADVFMIPQYGYLTLNNGSQAVGRSSFYCLEYFPSQMLRTGNNFTFSYTFEEVPFHSSYAHSQSLDRLMNPLIDQYLYYLNRTQNQSGSAQNKDLLFSRGSPAGTSVQPKNWLPGPCYRQQRVSKTKTDNNNSNFTWTGASKYNLNGRESIINPGTAMASHKDDEDKFFPMSGVMIFGKESAGASNTALDNVMITDEEEIKATNPVATERFGTVAVNFQSSSTDPATGDVHAMGALPGMVWQDRDVYLQGPIWAKIPHTDGHFHPSPLMGGFGLKNPPPQILIKNTPVPANPPAEFSATKFASFITQYSTGQVSVEIEWELQKENSKRWNPEVQYTSNYAKSANVDFTVDNNGLYTGPRPIGTRYLTRPL

SEQ ID NO: 748 - protein, 736 aa, Artificial Sequence
  Description of Artificial Sequence: Synthetic polypeptide
MAADGYLPDWLEDNLSEGIREWWDLKPGAPKPKANQQKQDDGRGLVLPGYKYLGPFNGLDKGEPVNAADAAALEHDKAYDQQLKAGDNPYLRYNHADAEFQERLQEDTSFGGNLGRAVFQAKKRVLEPLGLVEEGAKTAPGKKRPVEQSPQEPDSSSGIGKTGQQPAKKRLNFGQTGDSESVPDPQPLGEPPATPAAVGPTTMASGGGAPMADNNEGADGVGNAPGNWHCDSTWLGDRVITTSTRTWALPTYNNHLYKQISSASTGASNDNHYFGYSTPWGYFDFNRFHCHFSPRDWQRLINNNWGFRPKRLNFKLFNIQVKEVTTNDGVTTIANNLTSTVQVFSDSEYQLPYVLGSAHQGCLPPFPADVFMIPQYGYLTLNNGSQAVGRSSFYCLEYFPSQMLRTGNNFTFSYTFEEVPFHSSYAHSQSLDRLMNPLIDQYLYYLNRTQNQSGSAQNKDLLFSRGSPAGMSVQPKNWLPGPCYRQQRVSKTKTDNNNSNFTWTGASKYNLNGRESIINPGTAMASHKDDEDKFFPMSGVMIFGKESAGASNTALDNVMITGEEEIKATNPVATERFGTVAVNFQSSSTDPATGDVHAMGALPGMVWQDRDVYLQGPIWAKIPHTDGHFHPSPLMGGFGLKNPPPQILIKNTPVPANPPAEFSATKFASFITQYSTGQVSVEIEWELQKENSKRWNPEVQYTSNYAKSANVDFTVDNNGLYTEPRPIGTRYLTRPL

SEQ ID NO: 749 - protein, 736 aa, Artificial Sequence
  Description of Artificial Sequence: Synthetic polypeptide
MAADGYLPDWLEDNLSEGIREWWDLKPGAPKPKANQQKQDDGRGLVLPGYKYLGPFNRLDKGEPVNAADAAALEHDKAYDQQLKAGDNPYLRYNHADAEFQERLQEDTSFGGNLGRAVFQAKKRVLEPLGLVEEGAKTAPGRKRPVEQSPQEPDSSSGIGKTGQQPAKKRLNFGQTGDSESVPDPQPLGEPPATPAAVGPTTMASGGGAPMADNNEGADGVGNASGNWHCDSTWLGDRVITTSTRTWALPTYNNHLYKQISSASTGASNDNHYFGYSTPWGYFDFNRFHCHFSPRDWQRLINNNWGFRPKRLNFKLFNIQVKEVTTNDGVTTIANNLTSTVQVFSDSEYQLPYVLGSAHQGCLPPFPADVFMIPQYGYLTLNNGGQAVGRSSFYCLEYFPSQMLRTGNNFTFSYTFEEVPFHSSYAHSQSLDRLMNPLIDQYLYYLNRTQNQSGSAQNKDLLFSRGSPAGMSVQPKNWLPGPCYRQQRVSKTKTDNNNSNFTWTGASKYSLNGRESIINPGTAMASHKDDEDKFFPMGGVMIFGKESAGASNTALDNAMITDEEEIKATNPVATERFGTVAVNFQSSSTDPATGDVHAMGALPGMVWQDRDVYLQGPIWAKIPHTDGHFHPSPLMGGFGLKNPPPQILIKNTPVPANPPAEFSATKFASFITQYSTGQVSVEIEWELQKENSKRWNPEVQYTSNYAKSANVDFTVDNNGLYTEPRPIGTRYLTRPL

SEQ ID NO: 750 - protein, 736 aa, Artificial Sequence
  Description of Artificial Sequence: Synthetic polypeptide
MAADGYLPDWLEDNLSEGIREWWDLKPGAPKPKANQQKQDDGRGLVLPGYKYLGPFNGLDKGEPVNAADAAALEHDKAYDQQLKAGDNPYLRYNHADAEFQERLQEDTSFGGNLGRAVFQAKKRVLEPLGLVEEGAKTAPGKKRPVEQSPQEPDSSSGIGKTGQQPAKKRLNFGQTGDSESVPDPQPLGEPPATPAAVGPTTMASGGGAPMADNNEGADGVGNASGNWHCDSTWLGGRVITTSTRTWALPTYNNHLYKQISSASTGASNDNHYFGYSTPWGYFDFNRFHCHFSPRDWQRLINNNWGFRPKRLNFKLFNIQVKEVTTNDGVTTIANNLTSTVQVFSDSEYQLPYVLGSAHQGCLPPFPADVFMIPQYGYLTLNNGSQAVGRSSFYCLEYFPSQMLRTGNNSTFSYTFEEVPFHSSYAHSQSLDRLMNPLIDQYLYYLNRTQNQSGSAQNKDLLFSRGSPAGMSVQPKNWLPGPCYRQQRVSKTKTDNNNSNFTWTGASKYNLNGRESIINPGTAMASHKDDEDKFFPMSGVMIFGKESAGASNTALDNVMITDEEEIKATNPVATERFGTVAVNFQSSSTDPATGDVHAMGTLPGMVWQDRDVYLQGPIWAKIPHTDGHFHPSPLMGGFGLKNPPPQILIKNTPVPANPPAEFSATKFASFITQYSTGQVSVEIEWELQKENSKRWNPEVQYTSNYAKSANVDFTVDNNGLYTEPRPIGTRYLTRPL

SEQ ID NO: 751 - protein, 736 aa, Artificial Sequence
  Description of Artificial Sequence: Synthetic polypeptide
MAADGYLPDWLEDNLSEGIREWWDLKPGAPKPKANQQKQDDGRGLVLPGYKYLGPFNGLDKGEPVSAADAAALEHDKAYDQQLKAGDNPYLRYNHADAEFQERLQEDTSFGGNLGRAVFQAKKRVLEPLGLVEEGAKTAPGKKRPVEQSPQEPDSSSGIGKTGQQPAKERLNFGQTGDSESVPDPQPLGEPPATPAAVGPTTMASGGGAPMADNNEGADGVGNASGNWHCDSTWLGDRVITTSTRTWALPTYNNHLYKQISSASTGASNDNHYFGYSTPWGYFDFNRFHCHFSPRDWQRLINNNWGFRPKRLNFKLFNIQVKEVTTNDGVTTIANNLTSTVQVFSDSEYQLPYVLGSAHQGCLPPFPADVFMIPQYGYLTLNNGSQAVGRSSFYCLEYFPSQMLRTGNNFTFSYTFEEVPFHSSYAHSQSLDRLMNPLIDQYLYYLNRTQNQSGSAQNKDLLFSRGSPAGMSVQPKNWLPGPCYRQQRVSKTKTDNNNSNFTWTGASKYNLNGRESIINPGTAMASHKDDEDKFFPMSGVMIFGKESAGASNTALDNVMITDEEEIKATNPVATERFGTVAVNFQSSSTDPATGDVHAMGALPGMVWQDRDVYLQGPIWAKIPHTDGHFHPSPLMGGFGLKNPPPQILIKNTPVPANPPAEFSATKFASFITQYSTGQVSVEIEWELQKENSKRWNPEVQYTSNYAKSANVDFTVDNNGLYTEPRPIGTRYLTRPL

SEQ ID NO: 752 - protein, 736 aa, Artificial Sequence
  Description of Artificial Sequence: Synthetic polypeptide
MAADGYLPDWLEDNLSEGIREWWDLKPGAPKPKANQQKQDDGRGLVLPGYKYLGPFNGLDKGEPVNAADAAALEHDKAYDQQLKAGDNPYLRYNHADAEFQERLQEDTSFGGNLGRAVFQAKKRVLEPLGLVEEGAKTAPGKKRPVEQSPQEPDSSSGIGKTGQQPAKKRLNFGQTGDSESVPDPQPLGEPPATPAAVGPTTMASGGGAPMADNNEGADGVGNASGNWHCDSTWLGDRVITTSTRTWALPTYNNHLYKQISSASTGASNDNHYFGYSTPWGYFDFNRFHCHFSPRDWQRLINNNWGFRPKRLNFKLFNIQVKEVTTNDGVTTIANNLTSTVQVFSDSEYQLPYVLGSAHQGCLPPFPADVFMIPQYGYLTLNNGSQAVGRSSFYCLEYFPSQMLRTGNNFTFSYTFEEVPFHSSYAHSQSLDRLMNPLIDQYLYYLNRTQNQSGSAQNKDLLFSRGSPAGMSVQPKNWLPGPCYRQQRVSKTKTDNNNSNFTWTGASKYNLNGRESIINPGTAMASHKDDEDKFFPMSGVMIFGKESAGASNTALDNVMITDEGEIKATNPVATERFGTVAVNFQSSSTDPATGDVHAMGALPGMVWQDRDVYLQGPIWAKIPHTDGHFHPSPLMGGFGLKNPPPQILIKNTPVPANPPAEFSATKFASFITQYSTGQVSVEIEWELQKENSKRWNPEVQYTSNYAKSANVDFTVDNNGLYTEPRPIGTRYLTRPL

SEQ ID NO: 753 - protein, 736 aa, Artificial Sequence
  Description of Artificial Sequence: Synthetic polypeptide
MAADGYLPDWLEDNLSEGIREWWDLKPGAPKPKANQQKQDDGRGLVLPGYKYLGPFNGLDKGEPVNAADAAALEHDKAYDQQLKAGDNPYLRYNHADAEFQERLQEDTSFGGNLGRAVFQAKKRVLEPFGLVEEGAKTAPGKKRPVEQSPQEPDSSSGIGKTGQQPAKKRLNFGQTGDSESVPDPQPLGEPPATPAAVGPTTMASGGGAPMADNNEGADGVGNASGNWHCDSTWLGDRVITTSTRTWALPTYNNHLYKQISSASTGASNDNHYFGYSTPWGYFDFNRFHCHFSPRDWQRLINNNWGFRPKRLNFKLFNIQVKEVTTNDGVTTIANNLTSTVQVFSDSEYQLPYVLGSAHQGCLPPFPADVFMIPQYGYLTLNNGSQAVGRSSFYCPEYFPSQMLRTGNNFTFSYTFEEVPFHSSYAHSQSLDRLMNPLIDQYLYYLNRTQNQSGSAQNKDLLFSRGSPAGMSVQPKNWLPGPCYRQQRVSKTKTDNNNSNFTWTGASKYNLNGRESIINPGTAMASHKDDKDKFFPMSGVMIFGKESAGASNTALDNVMITDEEEIKATNPVATERFGTVAVNFQSSNTDPATGDVHVMGALPGMVWQDRDVYLQGPIWAKIPHTDGHFHPSPLMGGFGLKHPPPQILIKNTPVPANPPAEFSATKFASFITQYSTGQVSVEIEWELQKENSKRWNPEVQYTSNYAKSANVDFTVDNNGLYTEPRPIGTRYLTRPL

SEQ ID NO: 754 - protein, 736 aa, Artificial Sequence
  Description of Artificial Sequence: Synthetic polypeptide
MAADGYLPDWLEDNLSEGIREWWDLKPGAPKPKANQQKQDDGRGLVLPGYKYLGPFNGLDKGEPVNAADAAALEHDKAYDQQLKAGDNPYLRYNHADAEFQERLQEDTSFGGNLGRAVFQAKKRVLEPFGLVEEGAKTAPGKKRPVEQSPQEPDSSSGIGKTGQQPAKKRLNFGQTGDSESVPDPQPLGEPPATPAAVGPTTMASGGGAPMADNNEGADGVGNASGNWHCDSTWLGDRVITTSTRTWALPTYNNHLYKQISSASTGASNDNHYFGYSTPWGYFDFNRFHCHFSPRDWQRLINNNWGFRPKRLNFKLFNIQVKEVTTNDGVTTIANNLTSTVQVFSDSEYQLPYVLGSAHQGCLPPFPADVFMIPQYGYLTLNNGSQAVGRSSFYCLEYFPSQMLRTGNNFTFSYTFEEVPFHSSYAHSQSLDRLMNPLIDQYLYYLNRTQNQSGSAQNKDLLFSRGSPAGMSVQPKNWLPGPCYRQQRVSKTKTDNNNSNFTWTGASKYNLNGRESIINPGTAMASHKDDKDKFFPMSGVMIFGKESAGASNTALDNVMITDEEEIKATNPVATERFGTVAVNFQSSDTDPATGDVHVMGALPGMVWQDRDVYLQGPIWAKIPHTDGHFHPSPLMGGFGLKHPPPQILIKNTPVPANPPAEFSATKFASFITQYSTGQVSVEIEWELQKENSKRWNPEVQYTSNYAKSANVDFTVDNNGLYTEPRPIGTRYLTRPL

SEQ ID NO: 755 - protein, 736 aa, Artificial Sequence
  Description of Artificial Sequence: Synthetic polypeptide
MAADGYLPDWLEDNLSEGIREWWDLKPGAPKPKANQQKQGDGRGLVLPGYKYLGPFNGLDKGEPVNAADAAALEHDKAYDQQLKAGDNPYLRYNHADAEFQERLQEDTSFGGNLGRAVFQAKKRVLEPFGLVEEGAKTAPGKKRPVEQSPQEPDSSSGIGKTGQQPAKKRLNFGQTGDSESVPDPQPLGEPPATPAAVGPTTMASGGGAPMADNNEGADGVGNASGNWHCDSTWLGDRVITTNTRTWALPTYNNHLYKQISSASTGASNDNHYFGYSTPWGYFDFNRFHCHFSPRDWQRLINNNWGFRPKRLNFKLFNIQVKEVTTNDGVTTIANNLTSTVQVFSDSEYQLPYVLGSAHQGCLPPFPADVFMIPQYGYLTLNNGSQAVGRSSFYCLEYFPSQMLRTGNNFTFSYTFEEVPFHSSYGHSQSLDRLMNLLIDQYLYYLNRTQNQSGSAQNKDLLFSRGSPAGMFVQPKNWLPGPCYRQQRVSKTKTDNNNSNFTWTGASKYNLNGRESIINPGTAMASHKDDEDKFFPMSGVMIFGKESAGASNTALDNVMITDEEEIKATNPVATERFGTVAVNFQSSSTDPATGDVHVMGALPGMVWQDRDVYLQGPIWAKIPHTDGHFHPSPLMGGFGLKHPPPQILIKNTPVPANPPAEFSATKFASFITQYSTGQVSVEIEWELQKENSKRWNPEVQYTSNYAKSANVDFTVDNNGLYTEPRPIGTRYLTRPL

SEQ ID NO: 756 - protein, 736 aa, Artificial Sequence
  Description of Artificial Sequence: Synthetic polypeptide
MAADGYLPDWLEDNLSEGIREWWDLKPGAPKPKANQQKQDDGRGLVLPGYKYLGPFNGLDKGEPVNAADAAALEHDKAYDQQLKAGDNPYLRYNHADAEFQERLQEDTSFGGNLGRAVFQAKKRVLEPFGLVEEGAKTAPGKKRPVEQSPQEPDSSSGIGKTGQQPAKKRLNFGQTGDSESVPDPQPLGEPPATPAAVGPTTMASGGGAPMADNNEGADGVGNASGNWHCDSTWLGDRVITTNTRTWALPTYNNHLYKQISSASTGASNDNHYFGYSTPWGYFDFNRFHCHFSPRDWQRLINNNWGFRPKRLNFKLFNIQVKEVTTNDGVTTIANNLTSTVQVFSDSEYQLPYVLGSAHQGCLPPFPADVFMIPQYGYLMLNNGSQAVGRSSFYCLEYFPSQMLRTGNNFTFSYTFEEVPFHSSYAHSQSLDRLMNPLIDQYLYYLNRTQNQSGSAQNKDLLFSRGSPAGMSVQPKNWLPGPCYRQQRVSKTKTDNNNSNFTWTGASKYNLNGRESIINPGTAMASHKDDEDKFFPMSGVMIFGKESAGASNTALDNVMITDEEEIKATNPAATERFGTVAVNFQSSSTDPATGDVHVMGALPGMVWQDRDVYLQGPIWAKIPHTDGHFHPSPLMGGFGLKHPPPQILIKNTPVPANPPAEFSATKFASFITQYSTGQVSVEIEWELQKENSKRWNPEVQYTSNYAKSANVDFTVDNNGLYTEPRPIGTRYLTRPL

SEQ ID NO: 757 - protein, 736 aa, Artificial Sequence
  Description of Artificial Sequence: Synthetic polypeptide
MAADGYLPDWLEDNLSEGIREWWDLKPGAPKPKANQQKQDDGRGLVLPGYKYLGPFNGLDKGEPVNAADAAALEHDKAYDQQLKAGDNPYLRYNHADAEFQERLQEDTSFGGNLGRAVFQAKKRVLEPFGLVEEGAKTAPGKKRPVEQSPQEPDSSSGIGKTGQQPAKKRLNFGQTGDSESVPDPQPLGEPPATPAAVGPTTMASGGGAPMADNNEGADGVGNASGNWHCDSTWLGDRVITTSTRTWALPTYNNHLYKQISSASTGASNDNHYFGYSTPWGYFDFNRFHCHFSPRDWQRLINNNWGFRPKRLNFKLFNIQVKEVTTNDGVTTIANNLTSTVQVFSDSEYQLPYVLGSAHQGCLPPFPADVFMIPQYGYLTLNNGSQAVGRSSFYCLEYFPSQMLRTGNNFTFSYTFEEVPFHSSYAHSQSLDRLMNPLIDQYLYYLNRTQNQSGSAQNKDLLFSRGSPAGMSVQPKNWLPGPCYRQQRVSKTKTDNNNSNFTWTGASKYNLNGRESIINPGTAMASHKDDEDKFFPMSGVMIFGKESAGASNTALDNVMITDEEEIKATNPVATERFGTVAVNFQSSSTDPATGDVHVMGALPGMVWQDRDVYLQGPIWAKIPHTDGHFHPSPLMGGFGLKHPPPQILIKNTPVPANPPAEFSATKFASFITQYSTGQVSVEIEWELQKENSKRWNPEVQYTSNYAKSANVDFTVDNNGLYTEPRPIGTRYLTRPL

SEQ ID NO: 758 - protein, 736 aa, Artificial Sequence
  Description of Artificial Sequence: Synthetic polypeptide
  MOD_RES (102)..(102): Xaa = any amino acid
MAADGYLPDWLEDNLSEGIREWWDLKPGAPKPKANQQKQDDGRGLVLPGYKYLGPFNGLDKGEPVNAADAAALEHDKAYDQQLKAGDNPYLRYNHADAEFQXRLQEDTSFGGNLGRAVFQAKKRVLEPFGLVEEGAKTAPGKKRPVEQSPQEPDSSSGIGKTGQQPAKKRLNFGQTGDSESVPDPQPLGEPPATPAAVGPTTMASGGGAPMADNNEGADGVGNASGNWHCDSTWLGGRVITTSTRTWALPTYNNHLYKQISSASTGASNDNHYFGHSTPWGYFDFNRFHCHFSPRDWQRLINNNWGFRPKRLNFKLFNIQVKEVTTNDGVTTIANNLTSTVQVFSDSEYQLPYVLGSAHQGCLPPSPADVFMIPQYGYLTLNNGSQAVGRSSFYCLEYFPSQMLRTGNNFTFSYTFEEVPFHSSYAHSQSLDRLMNPLIDQYLYYLNRTQNQSGSAQNKDLLFSRGSPAGMSVQPKNWLPGPCYRQQRVSKTKTDNNNSNFTWTGASKYNLNGRESIINPGTAMASHKDDKDKFFPMSGVMIFGKESAGASNTALDNVMITDEEEIKATNPVATERFGTVAVNFQSSNTDPATGDVHVMGALPGMVWQDRDVYLQGPIWAKIPHTDGHFHPSPLMGGFGLKHPPPQILIKNTPVPANPPAEFSATKFASFITQYSTGQVSVEIEWELQKENSKRWNPEVQYTSNYAKSANVDFTVDNNGLYTEPRPIGTRYLTRPL

SEQ ID NO: 759 - protein, 736 aa, Artificial Sequence
  Description of Artificial Sequence: Synthetic polypeptide
MAADGYFPDWLEDNLSEGIREWWDLKPGAPKPKANQQKQDDGRGLVLPGYKYLGPFNGLDKGEPVNAADAAALEHDKAYDQQLKAGDNPYLRYNHADAEFQERLQEDTSFGGNLGRAVFQAKKRVLEPFGLVEEGAKTAPGKKRPVEQSPQEPDSSSGIGRTGQQPAKKRLNFGQTGDSESVPDPQPLGEPPATPAAVGPTTMASGGGAPMADNNEGADGVGNASGNWHCDSTWLGDRVITTSTRTWALPTYNNHLYKQISSASTGASNDNHYFGYSTPWGYFDFNRFHCHFSPRDWQRLINNNWGFRPKRLNFKLFNIQVKEVTTNDGVTTIANNLTSTVQVFSDSEYQLPYVLGSAHQGCLPPFPADVFMIPQYGYLTLNNGSQAVGRSSFYCLEYFPSQMLRTGNNFTFSYTFEEVPFHSSYAHSQSLDRLMNPLIDQYLYYLNRTQNQSGSAQNKDLLFSRGSPAGMSVQPKNWLPGPCYRQQRVSKTKTDNNNSNFTWTGASKYNLNGRESIINPGTAMASHKDDEDKFFPMSGVMIFGKESAGASNTALDNVMITDEEEIKATNPVATERFGTVAVNFQSSSPDPATGDVHVMGALPGMVWQDRDVYLQGPIWAKIPHTDGHFHPSPLMGGFGLKHPPPQILIKNTPVPANPPAEFSATKFASFITQYSTGQVSVEIEWELQKENSKRWNPEVQYTSNYAKSANVDFTVDNNGLYSEPRPIGTRYLTRPL

SEQ ID NO: 760 - protein, 736 aa, Artificial Sequence
  Description of Artificial Sequence: Synthetic polypeptide
MAADGYLPDWLEDNLSEGIREWWDLKPGAPKPKANQQKQDDGRGLVLPGYKYLGPFNGLDKGEPVNAADAAALEHDKAYDQQLKAGDNPYLRYNHADAEFQERLQEDTSFGGNLGRAVFQAKKRVLEPFGLVEEGAKTAPGKKRPVEQSPQEPDSSSGIGKTGQQPAKKRLNFGQTGDSESVPDPQPLGEPPATPAAVGPTTMASGGGAPMADNNEGADGVGNASGNWHCDSTWLGDRVITTSTRTWALPTYNNHLYKQTSSASTGASNDNHYFGYSTPWGYFDFNRFHCHFSPRDWQRLINNNWGFRPKRLNFKLFNIQVKEVTTNDGVTTIANNLTSTVQVFSDSEYQLPYVLGSAHQGCLPPFPADVFMIPQYGYLTLNNGSQAVGRSSFYCLEYFPSQMLRTGNNFTFSYTFEEVPFHSSYAHSQSLDRLMNPLIDQYLYYLNRTQNQSGSAQNKDLLFSRGSPAGMSVQPKNWLPGPCYRQQRVSKTKTDYNNSNFTWTGASKYNLNGRESIINPGTAMASHKDDEDKFFPMSGVMIFGKESAGASNTALDNVMITDEEEIKATNPVATERFGTVAVNFQSSSTDPATGDVHVMGALPGMVWQDRDVYLQGPIWAKIPHTDGHFHPSPLMGGFGLKHPPPQILIKNTPVPANPPAEFSATKFASFITQYSTGQVSVEIEWELQKENSKRWNPEVQYTSNYAKSANVDFTVDNNGLYTEPRPIGTRYLTRPL

SEQ ID NO: 761 - protein, 736 aa, Artificial Sequence
  Description of Artificial Sequence: Synthetic polypeptide
MAADGYPPDWLEDNLSEGIREWWDLKPGVPKPKANQQKQDDGRGLVLPGYKYLGPFNGLDKGEPVNAADAAALEHDKAYDQQLKAGDNPYLRYNHADAEFQERLQEDTSFGGNLGRAVFQAKKRVLEPFGLVEEGAKTAPGKKRPVEQSPQEPDSSSGIGKTGQQPAKKRLNFGQTGDSESVPDPQPLGEPPATPAAVGPTTMASGGGAPMADNNEGADGVGNASGNWHCDSTWLGDRVITTSTRTWALPTYNNHLYKQISSASTGASNDNHYFGYSTPWGYFDFNRFHCHFSPRDWQRLINNNWGFRPKRLNFKLFNIQVKEVTTNDGVTTIANNLTSTVQVFSDSEYQLPYVLGSAHQGCLPPFPADVFMIPQYGYLTLNNGSQAVGRSSFYCLEYFPSQMLRTGNNFTFSYTFEEVPFHSSYAHSQSLDRLMNPLIDQYLYYLNRTQNQSGSAQNKDLLFSRGSPAGMSVQPKNWLPGPCYRQQRVSKTKTDNNNSNFTWTGASKYNLNGRESIINPGTAMASHKDDEDKFFPMSGVMIFGKESAGASNTALDNVMITDEEEIKATNPVATERFGTVAVNFQSSSTDPATGDVHVMGALPGMVWQDRDVYLQGPIWAKIPHTDGHFHPSPLMGGFGLKHPPPQILIKNTPVPANPPAEFSATKFASFITQYSTGQVSVEIEWELQKENSKRWNPEVQYTSNYAKSANVDFTVDNNGLYTEPRPIGTRYLTRPL

SEQ ID NO: 762 - protein, 732 aa, Artificial Sequence
  Description of Artificial Sequence: Synthetic polypeptide
MAADGYLPDWLEDNLSEGIREWWDLKPGAPKPKANQQKQDDGRGLVLPGYKYLGPFNGLDKGEPVNAADAAALEHDKAYDQQLKAGDNPYLRYNHADAEFQERLQEDTSFGGNLGRAVFQAKKRVLEPFGLVEEGAKTAPGKKRPVEQSPQEPDSSSGIGKTGQQPAKKRLNFGQTGDSESVPDPQPLGEPPATPAAVGPTTMASGGGAPMADNNEGADGVGNASGNWHCDSTWLGDRVITTSTRTWALPTYNNHLYKQISSASTGASNDNHYFGYSTPWGYFDFNRFHCHFSPRDWQRLINNNWGFRPKRLNFKLFNIQVKEVTTNDGVTTIANNLTSTVQAFSDSEYQLPYVLGSAHQGCLPPFPADVFMIPQYGYLTLNNGSQAVGRSSFYCLEYFPSQMLRTGNNFTFSYTFEEVPFHSSYAHSQSLDRLMNPLIDPYLYYLNRTQNQSGSAQNKDLLFSRGSPAGMSVQPKNWLPGPCYRQQRVSKTKTDNNNSNFTWTGASKYNLNGRESIINPGTAMASHKDDEDKFFPMSGVMIFGKESAGASNTALDNVMITDEEEIKATNPVATERFGTVAVNFQSSSTDPATGDVHVMGALPGMVWQDRDVYLQGPIWAKIPHTDGHFHPSPLMGGFGLKHPPPQILIKNTPVPANPPAEFSATKFASFITQYSTGQVSVEIEWELQKENSKRWNPEVQYTSNYAKSANVDFTVDNNGLYTEPRPIGTRYL

SEQ ID NO: 763 - protein, 736 aa, Artificial Sequence
  Description of Artificial Sequence: Synthetic polypeptide
MAADGYLPDWLEDNLSEGIREWWDLKPGAPKPKANQQKQDDGRGLVLPGYKYLGPFNGLDKGEPVNAADAAALEHDKAYDQQLKAGDNPYLRYNHADAEFQERLQEDTSFGGNLGRAVFQAKKRVLEPFGLVEEGAKTAPGKKRPVEQSPQEPDSSSGIGKTGQQPAKKRLNFGQTGDSESVPDPQPLGEPPATPAAVGPTTMASGGGAPMADNNEGADGVGNASGNWHCDSTWLGDRVITTSTRTWALPTYNNHLYKQISSASTGASNDNHYFGYSTPWGYFDFNRFHCHFSPRDWQRLINNNWGFRPKRLNFKLFNIQVKEVTTNDGVTTIANNLTSTVQVFSDSEYQLPYVLGSAHQGCLPPFPADVFMIPQYGYLTLNNGSQAVGRSSFYCLEYFPSQMLRTGNNFTFSYTFEEVPFHSSYAHSQSLDRLMNPLIDQYLYYLNRTQNQSGSAQNKDLLFSRGSPAGMSVQPKNWLPGPCYRQQRVSKTKTDNNNSNFTWTGASKYNLNGRESIINPGTAMASHKDDEDKFFPMSGVMIFGKESAGASNTALDNVMITDEEEIKATNPVATERFGTVAVNFQSSSTDPATGDVHVMGALPGMVWQDRDVYLQGPIWAKIPHTDGHSHPSPLMGGFGLKHPPPQILIKNTPVPANPPAEFSATKFASFITQYSTGQVSVEIEWELQKENSKRWNPEVQYTSNYAKSANVDFTVDNNGLYTEPRPIGTRYLTRPL

SEQ ID NO: 764 - protein, 736 aa, Artificial Sequence
  Description of Artificial Sequence: Synthetic polypeptide
MAADGYLPDWLEDNLSEGIREWWDLKPGAPKPKANQQKQDDGRGLVLPGYKYLGPFNGLDKGEPVNAADAAALEHDKAYDQQLKAGDNPYLRYNHADAEFQERLQEDTSFGGNLGRAVFQAKKRVLEPFGLVEEGAKTAPGKKRPVEQSPQEPDSSSGIGKTGQQPAKKRLNFGQTGDSESVPDPQPLGEPPATPAAVGPTTMASGGGAPMADNNEGADGVGNASGNWHCDSTWLGDRVITTSTRTWALPTYNNHLYKQISSASTGASNDNHYFGYSTPWGYFDFNRFHCHFSPRDWQRLINNNWGFRPKRLNFKLFNIQVKEVTTNDGVTTIANNLTSTVQVFSDSEYQLPYVLGSAHQGCLPPFPADVFMIPQYGYLTLNNGSQAVGRSSFYCLEYFPSQMLRTGNNFTFSYTFEEVPFHSSYAHSQSLDRLMNPLIDLYLYYLNRTQNQSGSAQNKDLLFSRGSPAGMSVQPKNWLPGPCYRQQRVSKTKTDNNNSNFTWTGASKYNLNGRESIINPGTAMASHKDDEDKFFPMSGVMIFGKESAGTSNTALDNVMITDEEEIKATNPVATERFGTVAVNFQSSSTDPATGDVHVMGALPGMVWQDRDVYLQGPIWAKIPHTDGHFHPSPLMGGFGLKHPPPQILIKNTPVPANPPAEFSATKFASFITQYSTGQVSVEIEWELQKENSKRWNPEVQYTSNYAKSANVDFTVDNNGLYTEPRPIGTRYLTRPL

SEQ ID NO: 765 - protein, 736 aa, Artificial Sequence
  Description of Artificial Sequence: Synthetic polypeptide
MAADGYLPDWLEDSLSEGIREWWDLKPGAPKPKANQQKQDDGRGLVLPGYKYLGPFNGLDKGEPVNAADAAALEHDKAYDQQLKAGDNPYLRYNHADAEFQERLQEDTSFGGNLGRAVFQAKKRVLEPFGLVEEGAKTAPGKKRPVEQSPQEPDSSSGIGKTGQQPAKKRLNFGQTGDSESVPDPQPLGEPPATPAAVGPTTMASGGGAPMADNNEGADGVGNASGNWHCDSTWLGDRVITTSTRTWALPTYNNHLYKQISSASTGASNDNHYFGYSTPWGYFDFNRFHCHFSPRDWQRLINNNWGFRPKRLNFKLFNIQVKEVTTNDGVTTIANNLTSTVQVFSDSEYQLPYVLGSAHQGCLPPFPADVFMIPQYGYLTPNNGSQAVGRSSFYCLEYFPSQMLRTGNNFTFSYTFEEVPFHSSYAHSQSLDRLMNPLIDQYQYYLNRTQNQSGSAQNKDLLFSRGSPAGMSVQPKNWLPGPCYRQQRVSKTKTDNNNSNFTWTGASKYNLNGRESIINPGTAMASHKDDEDKFFPMSGVMIFGKESAGASNTALDNVMITDEEEIKATNPVATERFGTVAVNFQSSSTDPATGDVHVMGALPGMVWQDRDVYLQGPIWAKIPHTDGHFHPSPLMGGFGLKHPPPQILIKNTPVPANPPAEFSATKFASFITQYSTGQVSVEIEWELQKENSKRWNPEVQYTSNYAKSANVDFTVDNNGLYTEPRPIGTRYLTRPL

SEQ ID NO: 766 - protein, 736 aa, Artificial Sequence; identical to SEQ ID NO: 757
  Description of Artificial Sequence: Synthetic polypeptide

SEQ ID NO: 767 - protein, 735 aa, Artificial Sequence
  Description of Artificial Sequence: Synthetic polypeptide
MAADGYLPDWLEDTLSEGIRQWWKLKPGPPPPKPAERHKDDSRGLVLPGYKYLGPFNGLDKGEPVNEADAAALEHDKAYDRQLDSGDNPYLKYNHADAEFQERLKEDTSFGGNLGRAVFQAKKRVLEPLGLVEEPVKTAPGKKRPVEHSPVEPDSSSGTGKAGQQPARKRLNFGQTGDADSVPDPQPLGQPPAAPSGLGTNTMATGSGAPMADNNEGADGVGNSSGNWHCDSTWMGDRVITTSTRTWALPTYNNHLYKQISSQSGASNDNHYFGYSTPWGYFDFNRFHCHFSPRDWQRLINNNWGFRPKRLNFKLFNIQVKEVTQNDGTTTIANNLTSTVQVFTDSEYQLPYVLGSAHQGCLPPFPADVFMVPQYGYLTLNNGSQAVGRSSFYCLEYFPSQMLRTGNNFTFSYTFEDVPFHSSYAHSQSLDRLMNPLIDQYLYYLSRTNTPSGTTTQSRLQFSRAGASDIRDQSRNWLPGPCYRQQRVSKTSADNNNSEYSWTGATKYHLNGRDSLVNPGPAMASHKDDEEKFFPQSGVLIFGKQGSEKTNVDIEKVMITDEEEIRTTNPVATEQYGSVSTNLQRGNRQAATADVNTQGVLPGMVWQDRDVYLQGPIWAKIPHTDGHFHPSPLMGGFGLKHPPPQILIKNTPVPANPSTTFSAAKFASFITQYSTGQVSVEIEWELQKENSKRWNPEIQYTSNYNKSVNVDFTVDTNGVYSEPRPIGTRYLTRNL

SEQ ID NO: 768 - DNA, 2211 bp, Artificial Sequence
  Description of Artificial Sequence: Synthetic polynucleotide
atggctgctgacggttatcttccagattggctcgaggacaacctttctgaaggcattcgtgagtggtgggctctgaaacctggagtccctcaacccaaagcgaaccaacaacaccaggacaaccgtcggggtcttgtgcttccgggttacaaatacctcggacccggtaacggactcgacaaaggagagccggtcaacgaggcggacgcggcagccctcgaacacgacaaagcttacgaccagcagctcaaggccggtgacaacccgtacctcaagtacaaccacgccgacgccgagtttcaggagcgtcttcaagaagatacgtcttttgggggcaaccttggcagagcagtcttccaggccaaaaagaggatccttgagcctcttggtctggttgaggaagcagctaaaacggctcctggaaagaagaggcctgtagatcagtctcctcaggaaccggactcatcatctggtgttggcaaatcgggcaaacagcctgccagaaaaagactaaatttcggtcagactggcgactcagagtcagtcccagaccctcaacctctcggagaaccaccagcagcccccacaagtttgggatctaatacaatggcttcaggcggtggcgcaccaatggcagacaataacgagggtgccgatggagtgggtaattcctcaggaaattggcattgcgattcccaatggctgggcgacagagtcatcaccaccagcaccagaacctgggccctgcccacttacaacaaccatctctacaagcaaatctccagccaatcaggagcttcaaacgacaaccactactttggctacagcaccccttgggggtattttgactttaacagattccactgccacttctcaccacgtgactggcagcgactcattaacaacaactggggattccggcccaagaaactcagcttcaagctcttcaacatccaagttaaagaggtcacgcagaacgatggcacgacgactattgccaataaccttaccagcacggttcaagtgtttacggactcggagtatcagctcccgtacgtgctcgggtcggcgcaccaaggctgcctcccgccgtttccagcggacgtcttcatggtccctcagtatggatacctcaccctgaacaacggaagtcaagcggtgggacgctcatccttttactgcccggagtacttcccttcgcagatgctaaggactggaaataacttccaattcagctataccttcgaggatgtaccttttcacagcagctacgctcacagccagagtttggatcgcttgatgaatcctcttattgatcagtatctgtactacctgaacagaacgcaaggaacaacctctggaacaaccaaccaatcacggctgctttttagccaggctgggcctcagtctatgtctttgcaggccagaaattggctacctgggccctgctaccggcaacagagactttcaaagactgctaacgacaacaacaacagtaactttccttggacagcggccagcaaatatcatctcaatggccgcgactcgctggtgaatccaggaccagctatggccagtcacaaggacgatgaagaaaaatttttccctatgcacggcaatctaatatttggcaaagaagggacaacggcaagtaacgcagaattagataatgtaatgattacggatgaagaagagattcgtaccaccaatcctgtggcaacagagcagtatggaactgtggcaaataacttgcagagctcaaatacagctcccacgactagaactgtcaatgatcagggggccttacctggcatggtgtggcaagatcgtgacgtgtaccttcaaggacctatctgggcaaagattcctcacacggatggacactttcatccttctcctctgatgggaggctttggactgaaacatccgcctcctcaaatcatgatcaaaaatactccggtaccggcaaatcctccgacgactttcagcccggccaagtttgcttcatttatcactcagtactccactggacaggtcagcgtggaaattgagtgggagctacagaaagaaaacagcaaacgttggaatccagagattcagtacacttccaactacaacaagtctgttaatgtggactttactgtagacactaatggtgtttatagtgaacctcaccctattggaacccggtatctcacacgaaacttgtaa

SEQ ID NO: 769 - DNA, 2211 bp, Artificial Sequence
  Description of Artificial Sequence: Synthetic polynucleotide
atggctgctgatggttatcttccagattggctcgaggacaacctttctgaaggcattcgtgagtggtgggctctgaaacctggagtccctcaacccaaagcgaaccaacaacaccaggacaaccgtcggggtcttgtgcttccgggttacaaatacctcggacccggtaacggactcgacaaaggagagccggtcaacgaggcggacgcggcagccctcgaacacgacaaagcttacgaccagcagctcaaggccggtgacaacccgtacctcaagtacaaccacgccgacgccgagtttcaggagcgtcttcaagaagatacgtcttttgggggcaaccttggcagagcagtcttccaggccaaaaagaggatccttgagcctcttggtctggttgaggaagcagctaaaacggctcctggaaagaagaggcctgtagatcagtctcctcaggaaccggactcatcatctggtgttggcaaatcgggcaaacagcctgccagaaaaagactaaatttcggtcagactggcgactcagagtcagtcccagaccctcaacctctcggagaaccaccagcagcccccacaagtttgggatctaatacaatggcttcaggcggtggcgcaccaatggcagacaataacgagggtgccgatggagtgggtaattcctcaggaaattggcattgcgattcccaatggctgggcgacagagtcatcaccaccagcaccagaacctgggccctgcccacttacaacaaccatctctacaagcaaatctccagccaatcaggagcttcaaacgacaaccactactttggctacagcaccccttgggggtattttgactttaacagattccactgccacttctcaccacgtgactggcagcgactcattaacaacaactggggattccggcccaagaaactcagcttcaagctcttcaacatccaagttaaagaggtcacgcagaacgatggcacgacgactgttgccaataaccttaccagcacggttcaagtgtttacggactcggagtatcaactcccgtacgtgctcgggtcggcgcaccaaggctgtctcccgccgtttccagcggacgtcttcatggtccctcagtatggatacctcaccctgaacaacggaagtcaagcggtgggacgctcatccttttactgcctggagtacttcccttcgcagatgctaaggactggaaataacttccaattcagctataccttcgaggatgtaccttttcacagcagctacgctcacagccagagtttggatcgcttgatgaatcctcttattgatcagtatctgtactacctgaacagaacgcaaggaacaacctctggaacaaccaaccaatcacggctgctttttagccaggctgggcctcagtctatgtctttgcaggccagaaattggctacctgggccctgctaccggcaacagagactttcaaagactgctaacgacaacaacaacagtaactttccttggacagcggccagcaaatatcatctcaatggccgcgactcgctggtgaatccaggaccagctatggccagtcacaaggacgatgaagaaaaatttttccctatgcacggcaatctaatatttggcaaagaagggacaacggcaagtaacgcagaattagataatgtaatgattacggatgaagaagagattcgtaccaccaatcctgtggcaacagagcagtatggaactgtggcaaataacttgcagagctcaaatacagctcccacgactagaactgtcaatgatcagggggccttacctggcatggtgtggcaagatcgtgacgtgtaccttcaaggacctatctgggcaaagattcctcacacggatggacactttcatccttctcctctgatgggaggctttggactgaaacatccgcctcctcaaatcatgatcaaaaatactccggtaccggcaaatcctccgacgactttcagcccggccaagtttgcttcatttatcactcagtactccactggacaggtcagcgtggaaattgagtgggagctacagaaagaaaacagcaaacgttggaatccagagattcagtacacttccaactacaacaagtctgttaatgtggactttactgtagacactaatggtgtttatagtgaacctcgccctattggaacccggtatctcacacgaaacttgtaa

SEQ ID NO: 770 - DNA, 2211 bp, Artificial Sequence
  Description of Artificial Sequence: Synthetic polynucleotide
atggctgctgacggttatcttccagattggctcgaggacaacctttctgaaggcattcgtgagtggtgggctctgaaacctggagtccctcaacccaaagcgaaccaacaacaccaggacaaccgtcggggtcttgtgcttccgggttacaaatacctcggacccggtaacggactcgacaaaggagagccggtcaacgaggcggacgcggcagccctcgaacacgacaaagcttacgaccagcagctcaaggccggtgacaacccgtacctcaagtacaaccacgccgacgccgagtttcaggagcgtcttcaagaagatacgtcttttgggggcaaccttggcagagcagtcttccaggccaaaaagaggatccttgagcctcttggtctggttgaggaagcagctaaaacggctcctggaaagaagaggcctgtagatcagtctcctcaggaaccggactcatcatctggtgttggcaaatcgggcaaacagcctgccagaaaaagactaaatttcggtcagactggcgactcagagtcagtcccagaccctcaacctctcggagaaccaccagcagcccccacaagtttgggatctaatacaatggcttcaggcggtggcgcaccaatggcagacaataacgagggtgccgatggagtgggtaattcctcaggaaattggcattgcgattcccaatggctgggcgacagagtcatcaccaccagcaccagaacctgggccctgcccacttacaacaaccatctctacaagcaaatctccggccaatcaggagcttcaaacgacaaccactactttggctacagcaccccttgggggtattttgactttaacagattccactgccacttctcaccacgtgactggcagcgactcattaacaacaactggggattccggcccaagaaactcagcttcaagctcttcaacatccaagttaaagaggtcacgcagaacgatggcacgacgactattgccaataaccttaccagcacggttcaagtgtttacggactcggagtatcagctcccgtacgtgctcgggtcggcgcaccaaggctgtctcccgccgtttccagcggacgtcttcatggtccctcagtatggatacctcaccctgaacaacggaagtcaagcggtgggacgctcatccttttactgcctggagtacttcccttcgcagatgctaaggactggaaataacttccaattcagctataccttcgaggatgtaccttttcacagcagctacgctcacagccagagtttggatcgcttgatgaatcctcttattgatcagtatctgtactacctgaacagaacgcaaggaacaacctctggaacaaccaaccaatcacggctgctttttagccaggctgggcctcagtctatgtctttgcaggccagaaattggctacctgggccctgctaccggcaacagagactttcaaagactgctaacggcaacaacaacagtaactttccttggacagcggccagcaaatatcatctcaatggccgcgactcgctggtgaatccaggaccagctatggccagtcacaaggacgatgaagaaaaatttttccctatgcacggcaatctaatatttggcaaagaagggacaacggcaagtaacgcagaattagataatgtaatgattacggatgaagaagagattcgtaccaccaatcctgtggcaacagagcagtgtggaactgtggcaaataacttgcagagctcaaatacagctcccacgactagaactgtcaatgatcagggggccttacctggcatggtgtggcaagatcgtgacgtgtaccttcaaggacctatctgggcaaagattcctcacacggatggacactttcatccttctcctctgatgggaggctttggactgaaacatccgcctcctcaaatcatgatcaaaaatactccggtaccggcaaatcctccgacgactttcagcccggccaagtttgcttcatttatcactcagtactccactggacaggtcagcgtggaaattgagtgggagctacagaaagaaaacagcaaacgttggaatccagagattcagtacacttccaactacaacaagtctgttaatgtggactttactgtagacactaatggtgtttatagtgaacctcgccctattggaacccggtatctcacacgaaacttgtaa

SEQ ID NO: 771 - DNA, 2212 bp, Artificial Sequence
  Description of Artificial Sequence: Synthetic polynucleotide
  misc_feature (1283)..(1283): n is a, c, t, or g
atggctgctgacggttatcttccagattggctcgaggacaacctttctgaaggcattcgtgagtggtgggctctgaaacctggagtccctcaacccaaagcgaaccaacaacaccaggacaaccgtcggggtcttgtgcttccgggttacaaatacctcggaccgggtaacggactcgacaaaggagagccggtcaacgaggcggacgcggcagccctcgaacacgacaaagcttacgaccagcagctcaaggccggtgacaacccgtacctcaagtacaaccacgccgacgccgagtttcaggagcgtcttcaagaagatacgtcttttgggggcaaccttggcagagcagtcttccaggccaaaaagaggatccttgagcctcttggtctggttgagggagcagctaaaacggctcctggaaagaagaggcctgtagatcagtctcctcaggaaccggactcatcatctggtgttggcaaatcgggcaaacagcctgccagaaaaagactaaatttcggtcagactggcgactcagagtcagtcccagaccctcaacctctcggagaaccaccagcagcccccacaagtttgggatctaatacaatggcttcaggcggtggcgcaccaatggcagacaataacgagggtgccgatggagtgggtaattcctcaggaaattggcattgcgattcccaatggctgggcgacagagtcatcaccaccagcaccagaacctgggccctgcccacttacaacagccatctctacaagcaaatctccagccaatcaggagcttcaaacgacaaccactactttggctacagcaccccttgggggtattttgactttaacagattccactgccacttctcaccacgtgactggcagcgactcattaacaacaactggggattccggcccaagaaactcagcttcaagctcttcaacatccaagttaaagaggtcacgcagaacgatggcacgacgactattgccaataaccttaccagcacggtccaagtgtttacggactcggagtatcagctcccgtacgtgctcgggtcggcgcaccaaggctgtctcccgccgtttccagcggacgccttcatggtccctcagtatggatacctcaccctgaacaacggaagtcaagcggtgggacgctcatccttttactgcctggagtacttcccttcgcagatgctaaggactggaaataacttccaattcagctataccttcgaggatgtaccttttcacggcagctacgctcacagccngagtttggatcgcttgatgaatcctcttattgatcagtatctgtactacctgaacagaacgcaaggaacaacctctggaacaaccaaccaatcacggctgctttttagccaggctgggcctcagtctatgtctttgcaggccagaaattggctacctgggccctgctaccggcaacagagacttttcaaagactgctaacgacaacaacaacagtaactttccttggacagcggccagcaaatatcatctcaatggccgcgactcgctggtgaatccaggaccagctatggccagtcacaaggacgatgaagaaaaatttttccctatgcacggcaatctaatatttggcaaagaagggacaacggcaagtaacgcagaattagataatgtaatgattacggatgaagaagagattcgtaccaccaatcctgtggcaacagagcagtatggaactgtggcaaataacttgcagagctcaaatacagctcccacgactagaactgtcaatgatcagggggccttacctggcatggtgtggcaagatcgtgacgtgtaccttcaaggacctatctgggcaaagattcctcacacggatggacactttcatccttctcctctgatgggaggctttggactgaaacatccgcctcctcaaatcatgatcaaaaatactccggtaccggcaaatcctccgacgactttcagcccggccaagtttgcttcatttatcactcagtactccactggacaggtcagcgtggaaattgagtgggagctacagaaagaaaacagcaaacgttggaatccagagattcagtacacttccaactacaacaagtctgttaatgtggactttactgtagacactaatggtgtttatagtgaacctcgccctattggaacccggtatctcacacgaaactcgtaa

SEQ ID NO: 772 - DNA, 2212 bp, Artificial Sequence
  Description of Artificial Sequence: Synthetic polynucleotide
atggctgctgacggttatcttccagattggctcgaggacaacctttctgaaggcattcgtgagtggtgggctctgaaacctggagtccctcaacccaaagcgaaccaacaacaccaggacaaccgtcggggtcttgtgcttccgggttacaaatacctcggacccggtaacggactcgacaaaggagagccggtcaacgaggcggacgcggcagccctcgaacacgacaaagcttacgaccagcagctcaaggccggtgacaacccgtacctcaagtacaaccacgccgacgccgagtttcaggagcgtcttcaagaagatacgtcttttgggggcaaccttggcagagcagtcttccaggccaaaaagaggatccttgagcctcttggtctggttgagggagcagctaaaacggctcctggaaagaagaggcctgtagatcagtctcctcaggaaccggactcatcatctggtgttggcaaatcgggcaaacagcttgccagaaaaagactaaatttcggtcagactggcgactcagagtcagtcccagaccctcaacctctcggagaaccaccagcagcccccacaagtttgggatctaatacaatggcttcaggcggtggcgcaccaatggcagacaataacgagggtgccgatggagtgggtaattcctcaggaaattggcattgcgattcccaatggctgggcgacagagtcatcaccaccagcaccagaacctgggccctgcccacttacaacagccatctctacaagcaaatctccggccaatcaggagcttcaaacgacaaccactactttggctacagcaccccctgggggtattttgactttaacagattccactgccacttctcaccacgtgactggcagcgactcattaacaacaactggggattccggcccaagaaactcagcttcaagctcttcaacatccaagttaaagaggtcacgcagaacgatggcacgacgactattgccaataaccttaccagcacggttcaagtgtttacggactcggagtatcagctcccgtacgtgctcgggtcggcgcaccaaggctgtctcccgccgtttccagcggacgtcttcatggtccctcagtatggatacctcaccctgaacaacggaagtcaagcggtgggacgctcatccttttactgcctggagtacttcccttcgcagatgctaaggactggaaataacttccaattcagctataccttcgaggatgtaccttttcacagcagctacgctcacagccagagtttggatcgcttgatgaatcctcttattgatcagtatctgtactacctgaacagaacgcaaggaacaacctctggaacaaccaaccaatcacggctgctttttagccaggctgggcctcagtctatgtctttgcaggccagaaattggctacctgggccctgctaccggcaacagagactttcaaagactgctaacgacaacaacaacagtaactttccttggacagcggccagcaaatatcatctcaatggccgcgactcgctggtgaatcccaggaccagctatggccagtcacaaggacgatgaagaaaaatttttccctatgcacggcaatctaatatttggcaaagaagggacaacggcaagtaacgcagaattagataatgtaatgattacggatgaagaagagattcgtaccaccaatcctgtggcaacagagcagtatggaactgtggcaaataacttgcagagctcaaatacagctcccacgactagaactgtcaatgatcagggggccttacctggcatggtgtggcaagatcgtgacgtgtaccttcaaggacctatctgggcaaagattcctcacacggatggacactttcatccttctcctctgatgggaggctttggactgaaacatccgcctcctcaaatcatgatcaaaaatactccggtaccggcaaatcctccgacgactttcagcccggccaagtttgcttcatttatcactcagtactccactggacaggtcagcgtggaaattgagtgggagctacagaaagaaaacagcaaacgttggaatccagagattcagtacacttccaactacaacaagtctgttaatgtggactttactgtagacactaatggtgtttatagtgaacctcgccctattggaacccggtatctcacacgaaacttgtaa

SEQ ID NO: 773 - DNA, 2212 bp, Artificial Sequence
  Description of Artificial Sequence: Synthetic polynucleotide
atggctgctgacggttatcttccagattggctcgaggacaacctttctgaaggcattcgtgagtggtgggctctgaaacctggagtccctcaacccaaagcgaaccaacaacaccaggacgaccgtcggggtcttgtgcttccgggttacaaatacctcggacccggtaacggactcgacaaaggagagccggtcaacgaggcggacgcggcagccctcgaacacgacaaagcttacgaccagcagctcaaggccggtgacaacccgtgcctcaagtacaaccacgccgacgccgagtttcaggagcgtcttcaagaagatacgtcttttgggggcaaccttggcagagcagtcttccaggccaaaaagaggatccttgagcctcttggtctggttgaggaagcagctaaaacggctcctggaaagaagaggcctgtagatcagtctcctcaggaaccggactcatcatctggtgttggcaaatcgggcaaacagcctgccagaaaaagactaaatttcggtcagactggcgactcagagtcagtcccagaccctcaacctctcggagaaccaccagcagcccccacaagtttgggatctaatacaatggcttcaggcggtagcgcaccaatggcagacaataacgagggtgccgatggagtgggtaattcctcaggaaattggcattgcgattcccaatggctgggcgacagagtcatcaccaccagcaccagaacctgggccctgcccacttacaacaaccatctctacaagcaaatctccagccaatcaggagcttcaaacgacaaccactactttggctacagcaccccttgggggtattttgactttaacagattccactgccacttctcaccacgtgactggcagcgactcattaacaacaactggggattccggcccaagaaactcagcttcaagctcttcaacatccaagttaaagaggtcacgcagaacgatggcacgacgactattgccaataaccttaccagcacggttcaagtgtttacggactcggagtatcagctcccgtacgtgctcgggtcggcgcaccaaggctgtctcccgccgtttccagcggacgtcttcatggtccctcagtatggatacctcaccctgaacaacggaagtcaagcggtgggacgctcatccttttactgcctggagtacttcccttcgcagatgctaaggactggaaataacttccaattcagctataccttcgaggatgtaccttttcacagcagctacgctcacagccagagtttggatcgcttgatggatcctcttattgatcagtatctgtactacctgaacagaacgcaaggaacaacctctggaacaaccaaccaatcacggctgctttttagccaggctgggcctcagtctatgtctttgcaggccagaaattggctacctgggccctgctaccggcaacagagactttcaaagactgctaacgacaacaacaacagtaactttccttggacagcggccagcaaatatcatctcaatggccgcgactcgctggtgaatccaggaccagctatggccagtcacaaaggacgatgaagaaaaatttttccctatgcacggcaatctaatatttggcaaagaagggacaacggcaagtaacgcagaattagataatgtaatgattacggatgaagaagagattcgtaccaccaatcctgtggcaacagagcagtatggaactgtggcaaataacttgcagagctcaaatacagctcccacgactagaactgtcaatgatcagggggccttacctggcatggtgtggcaagatcgtgacgtgtaccttcaaggacctatctgggcaaagattcctcacacggatggacactttcatccttctcctctgatgggaggctttggactgaaacatccgcctcctcaaatcatgatcaaaaatactccggtaccggcaaatcctccgacgactttcagcccggccaagtttgcttcatttatcactcagtactccactggacaggtcagcgtggaaattgagtgggagctacagaaagaaaacagcaaacgttggaatccagagattcagtacacttccaactacaacaagtctgttaatgtggactttactgtagacactaatggtgtttatagtgaacctcgccctattggaacccggtatctcacacgaaacctgtaa

SEQ ID NO: 774 - DNA, 2211 bp, Artificial Sequence
  Description of Artificial Sequence: Synthetic polynucleotide
atggctgctgacggttatcttccagattggctcgaggacaacctttctgaaggcattcgtgagtggtgggctctgaaacctggagtccctcaacccaaagcgaaccaacaacaccaggacgaccgtcggggtcttgtgcttccgggttacaaatacctcggacccggtaacggactcgacaaaggagagccggtcaacgaggcggacgcggcagccctcgaacacgacaaagcttacgaccagcagctcaaggccggtgacaacccgtacctcaagtacaaccacgccgacgccgagtttcaggagcgtcttcaagaagatacgtcttttgggggcaaccttggcagagcagtcttccaggccaaaaagaggatccttgagcctcttggtctggttgaggaagcagctaaaacggctcctggaaagaagaggcctgtagatcagtctcctcaggaaccggactcatcatctggtgttggcaaatcgggcaaacagcctgccagaaaaagactaaatttcggtcagactggcgactcagagtcagtcccagaccctcaacctctcggagaaccaccagcagcccccacaagtttgggatctaatacaatggcttcaggcggtggcgcaccaatggcagacaataacgagggtgccgatggagtgggtaattcctcaggaaattggcattgcgattcccaatggctgggcaacagagtcatcaccaccagcaccagaacctgggccctgcccacttacaacaaccatctctacaagcaaatctccagccaatcaggagcttcaaacgacaaccactactttggctacagcaccccttgggggtattttgactttaacagattccactgccacttctcaccacgtgactggcagcgactcattaacaacaactggggattccggcccaagaaactcagcttcaagctcttcaacatccaagttaaagaggtcacgcagaacgatggcacgacgactattgccaataaccttaccagcacggttcaagtgtttacggactcggagtatcagctcccgtacgtgctcgggtcggcgcaccaaggctgtctcccgccgtttccagcggacgtcttcatggtccctcagtatggatacctcaccctgaacaacggaagtcaagcggtgggacgctcatccttttactgcctggagtacttcccttcgcagatgctaaggactggaaataacttccaattcagctataccttcgaggatgtaccttttcacagcagctacgctcacagccagagtttggatcgcttgatgaatcctcttattgatcagtatctgtactacctgaacagaacgcaaggaacaacctctggaacaaccaaccaatcacggctgctttttagccaggctgggcctcagtctatgtctttgcaggccagaaattggctacctgggccctgctaccggcaacagagactttcaaagactgctaacgacaacaacaacagtaactttccttggacagcggccagcaaatatcatctcaatggccgcgactcgctggtgaatccaggaccagctatggccagtcacaaggacgatgaagaaaaatttttccctatgcacggcaatctaatatttggcaaagaagggacaacggcaagtaacgcagaattagataatgtaatgattacggatgaagaagagattcgtaccaccaatcctgtggcaacagagcagtatggaactgtggcaaataacttgcagagctcaaatacagctcccacgactagaactgtcaatgatcagggggccttacctggcatggtgtggcaagatcgtgacgtgtaccttcaaggacctatctgggcaaagattcctcacacggatggacactttcatccttctcctctgatgggaggctttggactgaaacatccgcctcctcaaatcatgatcaaaaatactccggtaccggcaaatcctccgacgactttcagcccggccaagtttgcttcatttatcactcagtactccactggacaggtcagcgtggaaattgagtgggagctacagaaagaaaacagcaaacgttggaatccagagattcagtacacttccaactacaacaagtctgttaatgtggactttactgtagacactaatggtgtttatagtgaacctcgccctattggaacccggtatctcacacgaaacttgtaa

SEQ ID NO: 775 - DNA, 2211 bp, Artificial Sequence
  Description of Artificial Sequence: Synthetic polynucleotide
atggctgctgacggttatcttccagattggctcgaggacaacctttctgaaggcattcgtgagtggtgggctctgaaacctggagtccctcaacccaaagcgaaccaacaacaccaggacgaccgtcggggtcttgtgcttccgggttacaaatacctcggacccggtaacggactcgacaaaggagagccggtcaacgaggcggacgcggcagccctcgaacacgacaaagcttacgaccagcagctcaaggccggtgacaacccgtacctcaagtacaaccacgccgacgccgagtttcaggagcgtcttcaagaagatacgtcttttgggggcaaccttggcagagcagtcttccaggccaaaaagaggatccttgagcctcttggtctggttgaggaagcagctaaaacggctcctggaaagaagaggcctgtagatcagtctcctcaggaaccggactcatcatctggtgttggcaaatcgggcaaacagcctgccagaaaaagactaaatttcggtcagactggcgactcagagtcagtcccagaccctcaacctctcggagaaccaccagcagcccccacaagtttgggatctaatacaatggcttcaggcggtggcgcaccaatggcggacaataacgagggtgccgatggagtgggtaattcctcaggaaattggcattgcgattcccaatggctgggcgacagagtcatcaccaccagcaccagaacctgggccctgcccacttacaacaaccatctctacaagcaaatctccagccaatcaggagcttcaaacgacaaccactactttggctacagcaccccttgggggtattttgactttaacagattccactgccacttctcaccacgtgactggcagcgactcattaacaacaactggggattccggcccaagaaactcagcttcaagctcttcaacatccaagttaaagaggtcacgcagaacgatggcacgacgactattgccaataaccttaccagcacggttcaagtgtttacggactcggagtatcagctcccgtacgtgctcgggtcggcgcaccaaggctgtctcccgccgtttccagcggacgtcttcatggtccctcagtatggatacctcaccctgaacaacggaagtcaagcggtgggacgctcatccttttactgcctggagtacttcccttcgcagatgctaaggactggaaataacttccaattcagctataccttcgaggatgtaccttttcacagcagctacgctcacagccagagtttggatcgcttgatgaatcctcttattgatcagtatctgtactacctgaacagaacgcaaggaacaacctctggaacaaccaaccaatcacggctgctttttagccaggctgggcctcagtctatgtctttgcaggccagaaattggctacctgggccctgctaccggcaacagagactttcaaagactgctaacgacaacaacaacagtaactttccttggacagcggccagcaaatatcatctcaatggccgcgactcgctggtgaatccaggaccagctatggccagtcacaaggacgatgaagaaaaatttttccctatgcacggcaatctaatatttggcaaagaagggacaacggcaagtaacgcagaattagataatgtaatgattacggatgaagaagagattcgtaccaccaatcctgtggcaacagtgcagtatggaactgtggcaaataacttgcagagctcaaatacagctcccacgactagaactgtcaatgatcagggggccttacctggcatggtgtggcaagatcgtgacgtgtaccttcaaggacctatctgggcaaagattcctcacacggatggacactttcatccttctcctctgatgggaggctttggactgaaacatccgcctcctcaaatcatgatcaaaaatactccggtaccggcaaatcctccgacgactttcagcccggccaagtttgcttcatttatcactcagtactccactggacaggtcagcgtggaaattgagtgggagctacagaaagaaaacagcaaacgttggaatccagagattcagtacacttccaactacaacaagtctgttaatgtggactttactgtagacactaatggtgtttatagtgaacctcgccctattggaacccggtatctcacacgaaacttgtaa

SEQ ID NO: 776 - DNA, 2211 bp, Artificial Sequence
  Description of Artificial Sequence: Synthetic polynucleotide
atggctgctgacggttatcttccagattggctcgaggacaacctttctgaaggcattcgtgagtggtgggctctgaaacctggagtccctcaacccaaagcgaaccaacaacaccaggacaaccgtcggggtcttgtgcttccgggttacaaatacctcggacccggtaacggactcgacaaaggagagccggtcaacgaggcggacgcggcagccctcgaacacgacaaagcttacgaccagcagctcaaggccggtgacaacccgtacctcaagtacaaccacgccgacgccgagtttcaggagcgtcttcaagaagatacgtcttttgggggcaaccttggcagagcagtcttccaggccaaaaaggggatccttgagcctcttggtctggttgaggaagcagctaaaacggctcctggaaagaagaggcctgtagatcagtctcctcaggaaccggactcatcatctggtgttggcaaatcgggcaaacagcctgccagaaaaagactaaatttcggtcagactggcgactcagagtcagtcccagaccctcaacctctcggagaaccaccagcagcccccacaagtttgggatctaatacaatggcttcaggcggtggcgcaccaatggcagacaataacgagggtgccgatggagtgggtaattcctcaggaaattggcattgcgattcccaatggctgggcgacagagtcatcaccaccagcaccagaacctgggccctgcccacttacaacaaccatctctacaagcaaatctccagccaatcaggagcttcaaacgacaaccactactttggctacagcaccccttgggggtattttgactttaacagattccactgccacttctcaccacgtgactggcagcgactcattaacaacaactggggattccggcccaagaaactcagcttcaagctcttcaacatccaagttaaagaggtcacgcagaacgatggcacgacgactattgccaataaccttaccagcacggttcaagtgtttacggactcggagtatcagctcccgtacgtgttcgggtcggcgcaccaaggctgtctcccgccgtttccagcggacgtcttcatggtccctcagtatggatacctcaccctgaacaacggaagtcaagcggtgggacgctcatccttttactgcctggagtacttcccttcgcagatgctaaggactggaaataacttccaattcagctataccttcgaggatgtaccttttcacagcagctacgctcacagccagagttcggatcgcttgatgaatcctcttattgatcagtatctgtactacctgaacagaacgcaaggaacaacctctggaacaaccaaccaatcacggctgctttttagccaggctgggcctcagtctatgtctttgcaggccagaaattggctacctgggccctgctaccggcaacagagactttcaaagactgctaacgacaacaacaacagtaactttccttgaacagcggccagcaaatatcatctcaatggccgcgactcgctggtgaatccaggaccagctatggccagtcacaaggacgatgaagaaaaatttttccctatgcacggcaatctaatatttggcaaagaagggacaacggcaagtaacgcagaattagataatgtaatgattacggatgaagaagagattcgtaccaccaatcctgtggcaacagagcagtatggaactgtggcaaataacttgcagagctcaaatacagctcccacgactagaactgtcaatgatcagggggccttacctggcatggtgtggcaagatcgtgacgtgtaccttcaaggacctatctgggcaaagattcctcacacggatggacactttcatccttctcctctgatgggaggctttggactgaaacatccgcctcctcaaatcatgatcaaaaatactccggtaccggcaaatcctccgacgactttcagcccggccaagtttgcttcatttatcactcagtactccactggacaggtcagcgtggaaattgagtgggagctacagaaagaaaacagcaaacgttggaatccagagattcagtacacttccaactacaacaagtctgttaatgtggactttactgtagacactaatggtgtttatagtgaacctcgccctattggaacccggtatctcacacgaaacttgtaa

SEQ ID NO: 777 - DNA, 2211 bp, Artificial Sequence
  Description of Artificial Sequence: Synthetic polynucleotide
atggctgctgacggttatcttccagattggctcgaggacaacctttctgaaggcattcgtgagtggtgggctctgaaacctggagtccctcaacccaaagcgaaccaacaacaccaggacaaccgtcggggtcttgtgcttccgggttacaaatacctcggacccggtaacggactcgacgaaggagagccggtcaacgaggcggacgcggcagccctcgaacacgacaaagcttacgaccagcagctcaaggccggtgacaacccgtacctcaagtacaaccacgccgacgccgagtttcaggagcgtcttcaagaagatacgtcttttgggggcaaccttggcagagcagtcttccaggccaaaaagaggatccttgagcctcttggtctggttgagggagcagctaaaacggctcctggaaagaagaggcctgtagatcagtctcctcaggaaccggactcatcatctggtgttggcaaatcgggcaaacagcctgccagaaaaagactaaatttcggtcagactggcgactcagagtcagtcccagaccctcaacctctcggagaaccaccagcagcccccacaagtttgggatctaatacaatggcttcaggcggtggcgcaccaatggcagacaataacgagggtgccgatggagtgggtaattcctcaggaaattggcattgcgattcccaatggctgggcgacagagtcatcaccaccagcaccagaacctgggccctgcccacttacaacagccacctctacaagcaaatctccagccaatcaggagcttcaaacgacaaccactactttggctacagcaccccttgggggtattttgactttaacagattccactgccacttctcaccacgtgactggcagcgactcattaacaacaactggggattccggcccaagaaactcagcttcaagctcttcaacatccaagttaaagaggtcacgcagaacgatggcacgacgactattgccaataaccttaccagcacggttcaagtgtttacggactcggagtatcagctcccgtacgtgctcgggtcggcgcaccaaggctgtctcccgccgtttccagcggacgtcttcatggtccctcagtatggatacctcaccctgaacaacggaagtcaagcggtgggacgctcatccttttactgcctggagtacttcccttcgcagatgctaaggactggaaataacttccaattcagctataccttcgaggatgtaccttttcacagcagctacgctcacagccagagtttggatcgcttgatgaatcctcttattgatcagtatctgtactacctgaacagaacgcaaggaacaacctctggaacaaccaaccaatcacggctgctttttagccaggctgggcctcagtctatgtctttgcaggccagaaattggctacctgggccctgctaccggcaacagagactttcaaagactgctaacgacaacaacaacagtaactttccttggacagcggccagcaaatatcatctcaatggccgcgactcgctggtgaatccaggaccagctatggccagtcacaaggacgatgaagaaaaatttttccctatgcacggcaatctaatatttggcaaagaagggacaacggcaagtaacgcagaattagataatgtaatgattacggatgaagaagagattcgtaccaccaatcctgtggcaacagagcagtatggaactgtggcaaataacttgcagagctcaaatacagctcccacgactagaactgtcaatgatcagggggccttacctggcatggtgtggcaagatcgtgacgtgtaccttcaaggacctatctgggcaaagattcctcacacggatggacactttcatccttctcctctgatgggaggctttggactgaaacatccgcctcctcaaatcatgatcaaaaatactccggtaccggcaaatcctccgacgactttcagcccggccaagtttgcttcatttatcactcagtactccactggacaggtcagcgtggaaattgagtgggagctacagaaagaaaacagcaaacgttggaatccagagattcagtacacttccaactacaacaagtctgttaatgtggactttactgtagacactaatggtgtttatagtgaacctcgccctattggaacccggtatctcacacgaaacttgtaa

SEQ ID NO: 778 - DNA, 2211 bp, Artificial Sequence
  Description of Artificial Sequence: Synthetic polynucleotide
atggctgctgacggttatcttccagattggctcgaggacaacctttctgaaggcattcgtgagtggtgggctctgaaacctggagtccctcaacccaaagcgaaccaacaacaccaggacaaccgtcggggtcttgtgcttccgggttacaaatacctcggacccggtaacggactcgacaaaggagagccggtcaacgaggcggacgcggcagccctcgaacacgacaaagcttacgaccagcagctcaaggccggtgacaacccgtacctcaagtacaaccacgccgacgccgagtttcaggagcgtcttcaagaagatacgtcttttgggggcaaccttggcagagcagtcttccaggccaaaaagaggatccttgagcctcttggtctggttgagggagcagctaaaacggctcctggaaagaagaggcctgtagatcagtctcctcaggaaccggactcatcatctggtgttggcaaatcgggcaaacagcctgccagaaaaagactaaatttcggtcagactggcgactcagagtcagtcccagaccctcaacctctcggagaaccaccagcagcccccacaagtttgggatctaatacaatggcttcaggcggtggcgcaccaatggcagacaataacgagggtgccgatggagtgggtaattcctcaggaaattggcattgcgattcccaatggctgggcgacagagtcatcaccaccagcaccagaacctgggccctgcccacttacaacagccatctctacaagcaaatctccagccaatcaggagcttcaaacgacaaccactactttggctacagcaccccttggggtattttgactttaacagattccactgccacttctcaccacgtgactggcagcgactcattaacaacaactggggattccggcccaagaaactcagcttcaagctcttcaacatccaagttaaagaggtcacgcagaacgatggcacgacgactattgccaataaccttaccagcacggttcaagtgtttacggactcggagtatcagctcccgtacgtgctcgggtcggcgcaccaaggctgtctcccgccgtttccagcggacgccttcatggtccctcagtatggatacctcaccctgaacaacggaagtcaagcggtgggacgctcatccttttactgcctggagtacttcccttcgcagatgctaaggactggaaataacttccaattcagctataccctcgaggatgtaccttttcacagcagctacgctcacagccagagtttggatcgcttgatgaatcctcttattgatcagtatctgtactacctgaacagaacgcaaggaacaacctctggaacaaccaaccaatcacggctgctttttagccaggctgggcctcagtctatgtctttgcaggccagaaattggctacctgggccctgctaccggcaacagagactttcaaagactgctaacgacaacaacaacagtaactttccttggacagcggccagcaaatatcatctcaatggccgcgactcgctggtgaatccaggaccagctatggccagtcacaaaggacgatgaagaaaaatttttccctatgcacggcaatctaatatttggcaaagaagggacaacggcaagtaacgcagaattagatagtgtaatgattacggatgaagaagagattcgtaccaccaatcctgtggcaacagagcagtatggaactgtggcaaataacttgcagagctcaaatacagctcccacgactagaactgtcaatgatcagggggccttacctggcatggtgtggcaagatcgtgacgtgtaccttcaaggacctatctgggcaaagattcctcacacggatggacactttcatccttctcctctgatgggaggctttggactgaaacatccgcctcctcaaatcatgatcaaaaatactccggtaccggcaaatcctccgacgactttcagcccggccaagtttgcttcatttatcactcagtactccactggacaggtcagcgtggaaattgagtgggagctacagaaagaaaacagcaaacgttggaatccagagattcagtacacttccaactacaacaagtctgttaatgtggactttactgtagacactaatggtgtttatagtgaacctcgccctattggaacccggtatctcacacgaaacttgtaa

SEQ ID NO: 779 - DNA, 2205 bp, Artificial Sequence
  Description of Artificial Sequence: Synthetic polynucleotide
atgactgacggttaccttccagattggctagaggacaacctctctgagggcgttcgagagtggtgggcgctgcaacctggagcccctaaacccaaggcaaatcaacaacatcaggacaacgctcggggtcttgtgcttccgggttacaaatacctcggacccggcaacggactcgacaagggggaacccgtcaacgcagcggacgcggcagccctcgagcacgacaaggcctacgaccagcagctcaaggccggtgacaacccctacctcaagtacaaccacgccgacgcggagttccagcagcggcttcagggcgacacatcgtttgggggcaacctcggcagagcagtcttccaggccaaaaagagggttcttgaacctcttggtctggttgagcaagcgggtgagacggctcctggaaagaagagaccgttgattgaatccccccagcagcccgactcctccacgggtatcggcaaaaaaggcaagcagccggctaaaaagaagctcgttttcgaagacgaaactggagcaggcgacggaccccctgagggatcaacttccggagccatgtctgatgacagtgagatgcgtgcagcaactggcggagctgcagtcgagggcggacaaggtgccgatggagtgggtaatgcctcgggtgattggcattgcgattccacctggtctgagggccacgtcacgaccaccagcaccagaacctgggtcttgcccacctacaacaaccacctctacaagcgactcggagagagcctgcagtccaacacctacaacggattctccaccccctggggatactttgacttcaaccgcttccactgccacttctcaccacgtgactggcagcgactcatcaacaacaactggggcatgcgacccaaagccatgcgggtcaaaatcttcaacatccaggtcaaggaggtcacgacgtcgaacggcgagacaacggtggctaataaccttaccagcacggttcagatctttgcggactcgtcgtacgaactgccgtacgtgatggatgcgggtcaagagggcagcctgcctccttttcccaacgacgtctttatggtgccccagtacggctactgtggactggtgaccggcaacacttcgcagcaacagactgacagaaatgccttctactgcctggagtactttccttcgcagatgctgcggactggcaacaactttgaaattacgtacagttttgagaaggtgcctttccactcgatgtacgcgcacagccagagcctggaccggctgatgaaccctctcatcgaccagtacctgtggggactgcaatcgaccaccaccggaaccaccctgaatgccgggactgccaccaccaactttaccaagctgcggcctaccaacctttccaactttaaaaagaactggctgcccgggccttcaatcaagcagcagggcttctcaaagactgccaatcaaaactacaagatccctgccaccgggtcagacagtctcatcaaatacgagacgcacagcactctggacggaagatggagtgccctgacccccggacctccaatggccacggctggacctgcggacagcaagttcagcaacagccagctcatctttgcggggcctaaacagaacggcaacacggccaccgtacccgggactctgatcttcacctctgaggaggagctggcagccaccaacgctaccgatacggacatgtggggcaacctacctggcggtgaccagagcaacagcaacctgccgaccgtggacagactgacagccttgggagccgtgcctggaatggtctggcaaaacagagacatttactaccagggtcccatttgggccaagattcctcataccgatggacactttcacccctcaccgctgattggtgggtttgggctgaaacacccgcctcctcaaatttttatcaagaacaccccggtacctgcgaatcctgcgacgaccttcagctctactccggtaaactccttcattactcagtacagcactggccaggtgtcggtgcagattgactgggagatccagaaggagcggtccaaacgctggaaccccgaggtccagtttacctccaactacggacagcaaaactctctgttgtgggctcccgatgcggctgggaaatacactgagcctagggctatcggtacccgctacctcacccaccacctgtaa

SEQ ID NO: 780 - DNA, 2205 bp, Artificial Sequence
  Description of Artificial Sequence: Synthetic polynucleotide
atgactgacggttaccttccagattggctagaggacaacctctctgaaggcgttcgagagtggtgggcgctgcaacctggagcccctaaacccaaggcaaatcaacaacatcaggacaacgctcggggtcttgtgcttccgggttacaaatacctcggacccggcaacggactcgacaagggggaacccgtcaacgcagcggacgcggcagccctcgagcacgacaaggcctacgaccagcagctcaaggccggtgacaacccctacctcaagtacaaccacgccgacgcggagttccagcagcggcttcagggcgacacatcgtttgggggcaacctcggcagagcagtcttccaggccaaaaagagggttcttgaacctcttggtctggttgagcaagcgggtgagacggctcctggaaagaagagaccgttgattgaatccccccagcagcccgactcctccacgggtatcggcaaaaaaggcaagcagccggctaaaaagaagctcgttttcgaagacgaaactggagcaggcgacggaccccctgagggatcaacttccggagccatgtctgatgacagtgagatgcgtgcagcagctggcggagctgcagtcgagggcggacaaggtgccgatggagtgggtaatgcctcgggtgattggcattgcgattccacctggtctgagggccacgtcacgaccaccagcaccagaacctgggtcttgcccacctacaacaaccacctctacaagcgactcggagagagcctgcagtccaacacctacaacggattctccaccccctggggatactttgacttcaaccgcttccactgccacttcttaccacgtgactggcagcgactcatcaacaacaactggggcgtgcgacccaaagccatgcgggtcaaaatcttcaacatccaggtcaaggaggtcacgacgtcgaacggcgagacaacggtggctaataaccttaccagcacggttcagatctttgcggactcgtcgtacgaactgccgtacgtgatggatgcgggtcaagagggcagcctgcctccttttcccaacgacgtctttatggtgccccagtacggctactgtggactggtgaccggcgacacttcgcagcaacagactgacagaaatgccttctactgcctggagtactttccttcgcagatgctgcggactggcaacaactttgaaattacgtacagttttgagaaggtgcctttccactcgatgtacgcgcacagccagagcctggaccggctgatgaaccctctcatcgaccagtacctgtggggactgcaatcgaccaccaccggaaccaccctgaatgccgggactgccaccaccaactttaccaagctgcggcctaccaacttttccaactttaaaaagaactggctgcccgggccttcaatcaagcagcagggcttctcaaagactgccaatcaaaactacaagatccctgccaccgggtcagacagtctcatcaaatacgagacgcacagcactctggacggaagatggagtgccctgacccccggacctccaatggccacggctggacctgcggacagcaagttcagcaacagccagctcatctttgcggggcctaaacagaacggcaacacggccaccgtacccgggactctgatcttcacctctgaggaggagctggcagccaccaacgccaccgatacggacatgtggggcaacctacctggcggtgaccagagcaacagcaacctgccgaccgtggacagactgacagccttgggagccgtgcctggaatggtctggcaaaacagagacatttactaccagggtcccatttgggccaagattcctcataccgatggacactttcacccctcaccgctgattggtgggtttgggctgaaacacccgcctcctcaaatttttatcaagaacaccccggtacctgcgaatcctgcgacgaccttcagctctactccggtaaactccttcattactcagtacagcactggccaggtgtcggtgcagattgactgggagatccagaaggagcggtccaaacgctggaaccccgaggtccagtttacctccaactacggacagcaaaactctctgttgtgggctcccgatgcggctgggaaatacactgagcctagggctatcggtacccgctacctcacccaccacctgtaa

SEQ ID NO: 781 - DNA, 2205 bp, Artificial Sequence
  Description of Artificial Sequence: Synthetic polynucleotide
atgactgacggttaccttccagattggctagaggacaacctctctgaaggcgttcgagagtggtgggcgctgcaacctggagcccctaaacccaaggcaaatcaacaacatcaggacaacgctcggggtcttgtgcttccgggttacaaatacctcggacccggcaacggactcgacgagggggaacccgtcaacgcagcggacgcggcagccctcgagcacgacaaggcctacgaccagcagctcaaggccggtgacaacccctacctcaagtacaaccacgccgacgcggagttccagcagcggcttcagggcgacacatcgtttgggggcaacctcggcagagcagtcttccaggccaaaaagagggttcttgaacctcttggtctggttgagcaagcgggtgagacggctcctggaaagaagagaccgttgattgaatccccccagcagcccgactcctccacgggtatcggcaaaaaaggcaagcagccggctaaaaagaagctcgttttcgaagacgaaactggagcaggcgacggaccccctgagggatcaacttccggagccatgtctgatgacagtgagatgcgtgcagcagctggcggagctgcagtcgagggcggacaaggtgccgatggagtgggtaatgcctcgggtgattggcattgcgattccacctggtctgagggccacgtcacgaccaccagcaccagaacctgggtcttgcccacctacaacaaccacctctacaagcgactcggagagagcctgcagtccaacacctacaacggattctccaccccctggggatactttgacttcaaccgcttccactgccacttctcaccacgtgactggcagcgactcatcaacaacaactggggcatgcgacccaaagccatgcgggtcaaaatcttcaacatccaggtcaaggaggtcacgacgtcgaacggcgagacaacggtggctaataaccttaccagcacggttcagatctttgcggactcgtcgtacgaactgccgtacgtgatggatgcgggtcaagagggcagcctgcctccttttcccaacgacgtctttatggtgccccagtacggctactgtggactggtgaccggcaacacttcgcagcaacagactgacagaaatgccttctactgcctggagtactttccttcgcagatgctgcggactggcaacaactttgaaattacgtacagttttgagaaggtgcctttccactcgatgtacgcgcacagccagagcctggaccggctgatgaaccctctcatcgaccagtacctgtggggactgcaatcgaccaccaccggaaccaccctgaatgccgggactgccaccaccaactttaccaagctgcggcctaccaacttttccaactttaaaaagaactggctgcccgggccttcaatcaagcagcagggcttctcaaagactgccaatcaaaactacaagatccctgccaccgggtcagacagtctcatcaaatacgagacgcacagcactctggacggaagatggagtgccctgacccccggacctccaatggccacggctggacctgcggacagcaagttcagcaacagccagctcatctttgcggggcctaaacagaacggcaacacggccaccgtacccgggactctgatcttcacctctgaggaggagctggcagccaccaacgctaccgatacggacatgtggggcaacctacctggcggtgaccagagcaacagcaacctgccgaccgtggacagactgacagccttgggagccgtgcctggaatggtctggcaaaacagagacatttactaccagggtcccatttgggccaagattcctcataccgatggacactttcacccctcaccgctgattggtgggtttgggctgaaacacccgcctcctcaaatttttatcaagaacaccccggtacctgcgaatcctgcgacgaccttcagctctactccggtaaactccttcattactcagtacagcactggccaggtgtcggtgcagattgactgggagatccagaaggagcggtccaaacgctggaaccccgaggtccagtttacctccaactacggacagcaaaactctctgttgtgggctcccgatgcggctgggaaatacactgagcctagggctatcggtacccgctacctcacccaccacctgtaa

SEQ ID NO: 782 - DNA, 2205 bp, Artificial Sequence
  Description of Artificial Sequence: Synthetic polynucleotide
atgactgacggttaccttccagattggctagaggacaacctctctgaaggcgttcgagagtggtgggcgctgcaacctggagcccctaaacccaaggcaaatcaacaacatcaggacaacgctcggggtcttgtgcttccgggttacaaatacctcggacccggcaacggactcgacaagggggaacccgtcaacgcagcggacgcggcagccctcgagcacgacaaggcctacgaccagcagctcaaggccggtgacaacccctacctcaagtacaaccacgccgacgcggagttccagcagcggcttcagggcgacacatcgtttgggggcaacctcggcagagcagtcttccaggccaaaaagagggttcttgaacctcttggtctggttgagcaagcgggtgagacggctcctggaaagaagagaccgttgattgaatccccccagcagcccgactcctccacgggtatcggcaaaaaaggcaagcagccggctaaaaagaagctcgttttcgaagacggaactggagcaggcgacggaccccctgagggatcaacttccggagccatgtctgatgacagtgagatgcgtgcagcagctggcggagctgcagtcgagggcggacaaggtgccgatggagtgggtaatgcctcgggtgattggcattgcgattccacctggtctgagggccacgtcacgaccaccagcaccagaacctgggtcttgcccacctacaacaaccacctctacaagcgactcggagagagcctgcagtccaacacctacaacggattccccaccccctggggatactttgacttcaaccgcttccactgccacttctcaccacgtgactggcagcgactcatcaacaacaactggggcatgcgacccaaagccatgcgggtcaaaatcttcaacatccaggtcaaggaggtcacgacgtcgaacggcgagacaacggcggctaataaccttaccagcacggttcagatctttgcggactcgtcgtacgaactgccgtacgtgatggatgcgggtcaagagggcagcctgcctccttttcccaacgacgtctttatggtgccccagtacggctactgtggactggtgaccggcaacacttcgcagcaacagactgacagaaatgccttctactgcctggagtactttccttcgcagatgctgcggactggcaacaactttgaaattacgtacagttttgagaaggtgcctttccactcgatgtacgcgcacagccagagcctggaccggctgatgaaccctctcatcgaccagtacctgtggggactgcaatcgaccaccaccggaaccaccctgaatgccgggactgccaccaccaactttaccaagctgcggcctaccaacttttccaactttaaaaagaactggctgcccgggccttcaatcaagcagcagggcttctcaaagactgccaatcaaaactacaagatccctgccaccgggtcagacagtctcatcaaatacgagacgcacagcactctggacggaagatggagtgccctgacccccggacctccaatggccacggctggacctgcggacagcaagttcagcaacagccagctcatctttgcggggcctaaacagaacggcaacacggccaccgtacccgggactctgatcttcacctctgaggaggagctggcagccaccaacgccaccgatacggacatgtggggcaacctacctggcggtgaccagagcaacagcaacctgccgaccgtggacagactgacagccttgggagccgtgcctggaatggtctggcaaaacagagacatttactaccagggtcccatttgggccaagattcctcataccgatggacactttcacccctcaccgctgattggtgggtttgggctgaaacacccgcctcctcaaatttttatcaagaacaccccggtacctgcgaatcctgcgacgaccttcagctctactccggtaaactccttcattactcagtacagcactggccaggtgtcggtgcagattgactgggagatccagaaggagcggtccaaacgctggaaccccgaggtccagtttacctccaactacggacagcaaaactctctgttgtgggctcccgatgcggctgggaaatacactgagcctagggctatcggtacccgctacctcacccaccacctgtaa

SEQ ID NO: 783 - DNA, 2205 bp, Artificial Sequence
  Description of Artificial Sequence: Synthetic polynucleotide
atgactgacggttaccttccagattggctagaggacaacctctctgaaggcgttcgagagtggtgggcgctgcaacctggagcccctaaacccaaggcaaatcaacaacatcaggacaacgctcggggtcttgtgcttccgggttacaaatacctcggacccggcaacggactcgacaagggggaacccgtcaacgcagcggacgcggcagccctcgagcacgacaaggcctacgaccagcagctcaaggccggtgacaacccctacctcaagtacaaccacgccgacgcggagttccagcagcggcttcagggcgacacatcgtttgggggcaacctcggcagagcagtcttccaggccaaaaagagggttcttgaacctcttggtctggttgagcaagcgggtgagacggctcctggaaagaagagaccgttgattgaatccccccagcagcccgactcctccacgggtatcggcaaaaaaggcaagcagccggctaaaaagaagctcgttttcgaagacgaaactggagcaggcgacggaccccctgagggatcaacttccggagccatgtctgatgacagtgagatgcgtgcagcagctggcggagctgcagtcgagggcggacaaggtgccgatggagtgggtaatgcctcgggtgattggcattgcgattccacctggtctgagggccacgtcacgaccaccagcaccagaacctgggtcttgcccacctacaacaaccacctctacaagcgactcggagagagcctgcagtccaacacctacaacggattctccaccccctggggatactttgacttcaaccgcttccactgccacttctcaccacgtgactggcagcgactcatcaacaacaactggggcatgcgacccaaagccatgcgggtcaaaatcttcaacatccaggtcaaggaggtcacgacgtcgaacggcgagacaacggtggctaataaccttaccagcacggttcagatctttgcggactcgtcgtacgaactgccgtacgtgatggatgcgggtcaagagggcagcctgcctccttttcccaacgacgtctttatggtgccccagtacggctaccgtggactggtgaccggcaacacttcgcagcaacagactgacagaaatgccttctactgcctggagtactttccttcgcagatgctgcggactggcaacaactttgaaattacgtacagttttgagaaggtgcctttccactcgatgtacgcgcacagccagagcctggaccggctgatgaaccctctcatcgaccagtacctgtggggactgcaatcgaccaccaccggaaccaccctgaatgccgggactgccaccaccaactttaccaagctgcggcctaccaacttttccaactttaaaaagaactggctgcccgggccttcaatcaagcagcagggcttctcaaagactgccaatcaaaactacaagatccctgccaccgggtcagacagtctcatcaaatacgagacgcacagcactctggacggaagatggagtgccctgacccccggacctccaatggccacggctggacctgcggacagcaagttcagcaacagccagctcatctttgcggggcctaaacagaacggcaacacggccaccgtacccgggactctgatcttcacctctgaggaggagctggcagccaccaacgccaccgatacggacatgtggggcaacctacctggcggtgaccagagcaacagcaacctgccgaccgtggacagactgacagccttgggagccgtgcctggaatggtctggcaaaacagagacatttactaccagggtcccatttgggccaagattcctcataccgatggacactttcacccctcaccgctgattggtgggtttgggctgaaacacccgcctcctcaaatttttatcaagaacaccccggtacctgcgaatcctgcgacgaccttcagctctactccggtaaactccttcattactcagtacagcactggccaggtgtcggtgcagattgactgggagatccagaaggagcggtccaaacgctggaaccccgaggtccagtttacctccaactacggacagcaaaactctctgttgtgggctcccgatgcggctgggaaatacactgagcctagggctatcggtacccgctacctcacccaccacctgtaa

SEQ ID NO: 784 - DNA, 2205 bp, Artificial Sequence
  Description of Artificial Sequence: Synthetic polynucleotide
atgactgacggttaccttccagattggctagaggacaacctctctgaaggcgttcgagagtggtgggcgctgcaacctggagcccctaaacccaaggcaaatcaacaacatcaggacaacgctcggggtcttgtgcttcagggttacaaatacctcggacccggcaacggactcgacaagggggaacccgtcaacgcagcggacgcggcagccctcgagcacgacaaggcctacgaccagcagctcaaggccggtgacaacccctacctcaagtacaaccacgccgacgcggagttccagcagcggcttcagggcgacacatcgtttgggggcaacctcggcagagcagtcttccaggccaaaaagagggttcttgaaccccttggtctggttgagcaagcgggtgagacggctcctggaaagaagagaccgttgattgaatccccccagcagcccgactcctccacgggtatcggcaaaaaaggcaagcagccggctaaaaagaagctcgttttcgaagacgaaactggagcaggcgacggaccccctgagggatcaacttccggagccatgtctgatgacagtgagatgcgtgcagcagctggcggagctgcagtcgagggcggacaaggtgccgatggagtgggtaatgcctcgggtgattggcattgcgattccacccggtctgagggccacgtcacgaccaccagcaccagaacctgggtcttgcccacctacaacaaccacctctacaagcgactcggagagagcctgcagtccaacacctacaacggattctccaccccctggggatactttgacttcaaccgcttccactgccacttctcaccacgtgactggcagcgactcatcaacaataactggggcatgcgacccaaagccatgcgggtcaaaatcttcaacatccaggtcaaggaggtcacgacgtcgaacggcgagacaacggtggctaataaccttaccagcacggttcagatctttgcggactcgtcgtacgaactgccgtacgtgatggatgcgggtcaagagggcagcctgcctccttttcccaacgacgtctttatggtgccccagtacggctactgtggactggtgaccggcaacacttcgcagcaacagactgacagaaatgccttctactgcctggagtactttccttcgcagatgctgcggactggcaacaactttgaaattacgtacagttttgagaaggtgcctttccactcgatgtacgcgcacagccagagcctggaccggctgatgaaccctctcatcgaccagtacctgtggggactgcaatcgaccaccaccggaaccaccctgaatgccgggactgccaccaccaactttaccaagctgcggcctaccaacttttccaactttaaaaagaactggctgcccgggccttcaatcaagcagcagggcttctcaaagactgccaatcaaaactacaagatccctgccaccgggtcagacagtctcatcaaatacgagacgcacagcactctggacggaagatggagtgcccggacccccggacctccaatggccacggctggacctgcggacagcaagttcagcaacagccagctcatctttgcggggcctaaacagaacggcaacacggccaccgtacccgggactctgatcttcacctctgaggaggagctggcagccaccaacgccaccgatacggacatgtggggcaacctacctggcggtgaccagagcaacagcaacctgccgaccgtggacagactgacagccttgggagccgtgcctggaatggtctggcaaaacagagacatttactaccagggtcccatttgggccaagattcctcataccgatggacactttcacccctcaccgctgattggtgggtttgggctgaaacacccgcctcctcaaatttttatcaagaacaccccggtacctgcgaatcctgcgacgaccttcagctctactccggtaaactccttcattactcagtacagcactggccaggtgtcggtgcagattgactgggagatccagaaggagcggtccaaacgctggaaccccgaggtccagtttacctccaactacggacagcaaaactctctgttgtgggctcccgatgcggctgggaaatacactgagcctagggctatcggtacccgctacctcacccaccacctgtaa

SEQ ID NO: 785 - DNA, 2175 bp, Artificial Sequence
  Description of Artificial Sequence: Synthetic polynucleotide
atgtcttttgttgatcaccctccagattggttggaagaagttggtgaaggtcttcgcgagtttttgggccttgaagcgggcccaccgaaaccaaaacccaatcagcagcatcaagatcaagcccgtggtcttgtgctgcctggttataactatctcggacccggaaacggtctcgatcgaggagagcctgtcaacagggcagacgaggtcgcgcgagagcacgacatctcgtacaacgagcagcttgaggcgggagacaacccctacctcaagtacaaccacgcggacgccgagtttcaggagaggctcgccgacgacacatccttcgggggaaacctcggaaaggcagtctttcaggccaagaaaagggttctcgaaccttttggcctggttgaagagggtgctaagacggcccctaccggaaagcggatagacgaccactttccaaaaagaaagaaggcccggaccgaagaggactccaagccttccacctcgtcagacgccgaagctggacccagcggatcccagcagctgcaaatcccagcccaaccagcctcaagtttgggagctgatacaatgtctgcgggaggtggcggcccattgggcgacaataaccaaggtgccgatggagtgggcaatgcctcgggagattggcattgcgattccacgtggatgggggacagagtcgtcaccaagtccacccgaacctgggtgctgcccagctacaacaaccaccagtaccgagagatcaaaagcggctccgtcgacggaagcaacgccaacgcctactttggatacagcaccccctgggggtactttgactttaaccgcttccacagccactggagcccccgagactggcaaagactcatcaacaactactggggcttcagaccccggtccctcagagtcaaaatcttcaacattcaagtcaaagaggtcacggtgcaggactccaccaccaccatcgccaacaacctcacctccaccgtccaagtgtttacggacgacgactaccagctgccctacgtcgtcggcaacgggaccgagggatgcctgccggccttccctccgcaggtctttacgctgccgcagtacggttacgcgacgctgaaccgcgacaacacagaaaatcccaccgagaggagcagcttcttctgcctagagtactttcccagcaagatgctgagaacgggcaacaactttgagtttacctacaactttgaggaggtgcccttccactccagcttcgctcccagtcagaacctcttcaagctggccaacccgctggtggaccagtacttgtaccgcttcgtgagcacaaataacactggcggagtccagttcaacaagaacctggccgggagatacgccaacacctacaaaaactggttcccggggcccatgggccgaacccagggctggaacctgggctccggggtcaaccgcgccagtgtcagcgccttcgccacgaccaataggatggagctcgagggcgcgagttaccaggtgcccccgcagccgaacggcatgaccaacaacctccagggcagcaacacctatgccctggagaacactatgatcttcaacagccagccggcgaacccgggcaccaccgccacgtacctcgagggcaacatgctcatcaccagcgagagcgagacgcagccggtgaaccgcgtggcgtacaacgtcggcgggcagatggccaccaacaaccagagctccaccactgcccccgcgaccggcacgtacaacctccaggaaatcgtgcccggcagcgtgtggatggagagggacgtgtacctccaaggacccatctgggccaagatcccagagacggaggcgcactttcacccctctccggccatgggcggattcggactcaaacacccaccgcccatgatgctcatcaagaacacgcctgtgcccggaaatatcaccagcttctcggacgtgcccgtcagcagcttcatcacccagtacagcaccgggcaggtcaccgtggagatggagtgggagctcaagaaggaaaactccaagaggtggaacccagagatccagtacacaaacaactacaacgacccccagtttgtggactttgccccggacagcaccggggaatacagaaccaccagacctatcggaacccgataccttacccgacccctttaa

SEQ ID NO: 786 - DNA, 2175 bp, Artificial Sequence
  Description of Artificial Sequence: Synthetic polynucleotide
atgtcttttgttgatcaccctccagattggttggaagaagttggtgaaggtcttcgcgagtttttgggccttgaagcgggcccaccgaaaccaaaacccaatcagcagcatcaagatcaagcccgtggtcttgtgctgcctggttataactatctcggacccggaaacggtctcgatcgaggagagcctgtcaacagggcagacgaggtcgcgcgagagcacgacatctcgtacaacgagcagcttgaggcgggagacaacccctacctcaagtacaaccacgcggacgccgagtttcaggagaagctcgccgacgacacatcctccgggggaaacctcggaaaggcagtctttcaggccaagaaaagggttctcgaaccttttggcctggttgaagagggtgctaagacggcccctaccggaaagcggatagacgaccactttccaaaaagaaagaaggcccggaccgaagaggactccaagccttccacctcgtcagacgccgaagctggacccagcggatcccagcagctgcaaatcccagcccaaccagcctcaagtttgggagctgatacaatgtctgcgggaggtggcggcccattgggcgacaataaccaaggtgccgatggagtgggcaatgcctcgggagattggcattgcgattccacgtggatgggggacagagtcgtcaccaagtccacccgaacctgggtgctgcccagctacaacaaccaccagtaccgagagatcaaaagcggctccgtcgacggaagcaacgccaacgcctactttggatacagcaccccctgggggtactttgactttaaccgcttccacagccactggagcccccgagactggcaaagactcatcaacaactactggggcttcagaccccggtccctcagagtcaaaatcttcaacattcaagtcaaagaggtcacggtgcaggactccaccaccaccatcgccaacaacctcacctccaccgtccaagtgtttacggacgacgactaccagctgccctacgtcgtcggcaacgggaccgagggatgcctgccggccttccctccgcaggtctttacgctgccgcagtacggttacgcgacgctgaaccgcgacaacacagaaaatcccaccgagaggagcagcttcttctgcctagagtactttcccagcaagatgctgagaacgggcaacaactttgagtttacctacaactttgaggaggtgcccttccactccagcttcgctcccagtcagaacctcttcaagctggccaacccgctagtggaccagtacttgtaccgcttcgtgagcacaaataacactggcggagtccagttcaacaagaacctggccgggagatacgccaacacctacaaaaactggttcccggggcccatgggccgaacccagggctggaacctgggctccggggtcaaccgcgccagtgtcagcgccttcgccacgaccaataggatggagctcgagggcgcgagttaccaggtgcccccgcagccgaacggcatgaccaacaacctccagggcagcaacacctatgccctggagaacactatgatcttcaacagccagccggcgaacccgggcaccaccgccacgtacctcgagggcaacatgctcatcaccagcgagagcgagacgcagccggtgaaccgcgtggcgtacaacgtcggcgggcagatggccaccaacaaccagagctccaccactgcccccgcgaccggcacgtacaacctccaggaaatcgtgcccggcagcgtgtggatggagagggacgtgtacctccaaggacccatctgggccaagatcccagagacgggggcgcactttcacccctctccggccatgggcggattcggactcaaacacccaccgcccatgatgctcatcaagaacacgcctgtgcccggaaatatcaccagcttctcggacgtgcccgtcagcagcttcatcacccagtacagcaccgggcaggtcaccgtggagatggagtgggagctcaagaaggaaaactccaagaggtggaacccagagatccagtacacaaacaactacaacgacccccagtttgtggactttgccccggacagcaccggggaatacagaaccaccagacctatcggaacccgataccttacccgacccctttaa

SEQ ID NO: 787 - DNA, 2175 bp, Artificial Sequence
  Description of Artificial Sequence: Synthetic polynucleotide
atgtcttttgttgatcaccctccagattggttggaagaagttggtgaaggtcttcgcgagtttttgggccttgaagcgggcccaccgaaaccaaaacccaatcagcagcatcaagatcaagcccgtggtcttgtgctgcctggttataactatctcggacccggaaacggtctcgatcgaggagagcctgtcaacagggcagacgaggtcgcgcgagagcacgacatctcgtacaacgagcagcttgaggcgggagacaacccctacctcaagtacaaccacgcggacgccgagtttcaggagaagctcgccgacgacacatccttcgggggaaacctcggaaaggcagtctttcaggccaagaaaagggttctcgaaccttttggcctggttgaagagggtgctaagacggcccctaccggaaagcggatagacgaccactttccaaaaagaaagaaggcccggaccgaagaggactccaagccttccacctcgtcagacgccgaagctggacccagcggatcccagcagctgcaaatcccagcccaaccagcctcaagtttgggagctgatacaatgtctgcgggaggtggcggcccattgggcgacaataaccaaggtgccgatggagtgggcaatgcctcgggagattggcattgcgattccacgtggatgggggacagagtcgtcaccaagtccacccgaacctgggtgctgcccagctacaacaaccaccagtaccgagagatcaaaagcggctccgtcgacggaagcaacgccaacgcctactttggatacagcaccccctgggggtactttgactttaaccgcttccacagccactggagcccccgagactggcaaagactcatcaacaactactggggcttcagaccccggtccctcagagtcaaaatcttcaacattcaagtcaaagaggtcacggtgcaggactccaccaccaccatcgccaacaacctcacctccaccgtccaagtgtttacggacgacgactaccagctgccctacgtcgtcggcaacgggaccgagggatgcctgccggccttccctccgcaggtctttacgctgccgcagtacggttacgcgacactgaaccgcgacaacacagaaaatcccaccgagaggagcagcttcttctgcctagagtactttcccagcaagatgctgagaacgggcaacaactttgagtttacctacaactttgaggaggtgcccttccactccagcttcgctcccagtcagaacctcttcaagctggccaacccgctggtggaccagtacttgtaccgcttcgtgagcacaaataacactggcggagtccagttcaacaagaacctggccgggagatacgccaacacctacaaaaactggttcccggggcccatgggccgaacccagggctggaacctgggctccggggtcaaccgcgccagtgtcagcgccttcgccacgaccaataggatggagctcgagggcgcgagttaccaggtgcccccgcagccgaacggcatgaccaacaacctccagggcagcaacacctatgccctggagaacactatgatcttcaacagccagccggcgaacccgggcaccaccgccacgtacctcgagggcaacatgctcatcaccagcgagagcgagacgcagccggtgaaccgcgtggcgtacaacgtcggcgggcagatggccaccaacaaccagagctccaccactgcccccgcgaccggcacgtacaacctccaggaaatcgtgcccggcagcgtgtggatggagagggacgtgtacctccaaggacccatctgggccaagatcccagagacgggggcgcactttcacccctctccggccatgggcggattcggactcaaacacccaccgcccatgatgctcatcaagagcacgcctgtgcccggaaatatcaccagcttctcggacgtgcccgtcagcagcttcatcacccagtacagcaccgggcaggtcaccgtggagatggagtgggagctcaagaaggaaaactccaagaggtggaacccagagatccagtacacaaacaactacaacgacccccagtttgtggactttgccccggacagcaccggggaatacagaaccaccagacctatcggaacccgataccttacccgacccctttaa

SEQ ID NO: 788 - DNA, 2175 bp, Artificial Sequence
  Description of Artificial Sequence: Synthetic polynucleotide
atgtcttttgttgatcaccctccagattggttggaagaagttggtgaaggtcttcgcgagtttttgggccctgaagcgggcccaccgaaaccaaaacccaatcagcagcatcaagatcaagcccgtggtcttgtgctgcctggttataactatctcggacccggaaacggtctcgatcgaggagagcctgtcaacagggcagacgaggtcgcgcgagagcacgacatctcgtacaacgagcagcttgaggcgggagacaacccctacctcaagtacaaccacgcggacgccgagtttcaggagaagctcgccgacgacacatccttcgggggaaacctcggaaaggcagtctttcaggccaagaaaagggttctcgaaccttttggcctggttgaagagggtgctaagacggcccctaccggaaagcggatagacgaccactttccaaaaagaaagaaggtccggaccgaagaggactccaagccttccacctcgtcagacgccgaagctggacccagcggatcccagcagctgcaaatcccagcccaaccagcctcaagtttgggagctgatacaatgtctgcgggaggtggcggcccattgggcgacaataaccaaggtgccgatggagtgggcaatgcctcgggagattggcattgcgattccacgtggatgggggacagagtcgtcaccaagtccacccgaacctgggtgccgcccagctacaacaaccaccagtaccgagagatcaaaagcggctccgtcgacggaagcaacgccaacgcctactttggatacagcaccccctgggggtactttgactttaaccgcttccacagccactggagcccccgagactggcaaagactcatcaacaactactggggcttcagaccccggtccctcagagtcaaaatcttcaacattcaagtcaaagaggtcacggtgcaggactccaccaccaccatcgccaacaacctcacctccaccgtccaagtgtttacggacgacgactaccagctgccctacgtcgtcggcaacgggaccgagggatgcctgccggccttccctccgcaggtctttacgctgccgcagtacggttacgcgacgctgaaccgcgacaacacagaaaatcccaccgagaggagcagcttcttctgcctagagtactttcccagcaagatgctgagaacgggcaacaactttgagtttacctacaactttgaggaggtgcccttccactccagcttcgctcccagtcagaacctcttcaagctggccaacccgctggtggaccagtacttgtaccgcttcgtgagcacaaataacactggcggagtccagttcaacaagaacctggccgggagatacgccaacacctacaaaaactggttcccggggcccatgggccgaacccagggctggaacctgggctccggggtcaaccgcgccagtgtcagcgccttcgccacgaccaataggatggagctcgagggcgcgagttaccaggtgcccccgcagccgaacggcatgaccaacaacctccagggcagcaacacctatgccctggagaacactatgatcttcaacagccagccggcgaacccgggcaccaccgccacgtacctcgagggcaacatgctcatcaccagcgagagcgagacgcagccggtgaaccgcgtggcgtgcaacgtcggcgggcagatggccaccaacaaccagagctccaccactgcccccgcgaccggcacgtacaacctccaggaaatcgtgcccggcagcgtgtggatggagagggacgtgtacctccaaggacccatctgggccaagatcccagagacgggggcgcactttcacccctctccggccatgggcggattcggactcaaacacccaccgcccatgatgctcatcaagaacacgcctgtgcccggaaatatcaccagcttctcggacgtgcccgtcagcagcttcatcacccagtacagcaccgggcaggtcaccgtggagatggagtgggagctcaagaaggaaaactccaagaggtggaacccagagatccagtacacaaacaactacaacgacccccagtttgtggactttgccccggacagcaccggggaatacagaaccaccagacctattggaacccgataccttacccgacccctttaa

SEQ ID NO: 789 - DNA, 2175 bp, Artificial Sequence
  Description of Artificial Sequence: Synthetic polynucleotide
atgtcttttgttgatcaccctccagattggttggaagaagttggtgaaggtcttcgcgagtttttgggccttgaagcgggcccaccgaaaccaaaacccaatcagcagcatcaagatcaagcccgtggtcttgtgctgcctggttataactatctcggacccggaaacggtctcgatcgaggagagcctgtcaacagggcagacgaggtcgcgcgagagcacgacatctcgtacaacgagcagcttgaggcgggagacaacccctacctcaagtacaaccacgcggacgccgagtttcaggagaagctcgccgacgacacatccttcgggggaaacctcggaaaggcagtctttcaggccaagaaaagggttctcgaaccttttggcctggttgaagagggtgctaagacggcccctaccggaaagcggatagacgaccactttccaaaaagaaagaaggcccggaccgaagaggactccaagccttccacctcgtcagacgccgaagctggacccagcggatcccagcagctgcaaatcccagcccaaccagcctcaagtttgggagctgatacaatgtctgcgggaggtggcggcccattgggcgacaataaccaaggtgccgatggagtgggcaatgcctcgggagattggcattgcgattccacgtggatgggggacagagtcgtcaccaagtccacccgaacctgggtgctgcccagctacaacaaccaccagtaccgagagatcaaaagcggctccgtcgacggaagcaacgccaacgcctactttggatacagcaccccctgggggtactttgactttaaccgcttccacagccactggagcccccgagactggcaaagactcatcaacaactactggggcttcagaccccggtccctcagagtcaaaatcttcaacattcaagtcaaagaggtcacggtgcaggactccaccaccaccatcgccaacaacctcacctccaccgtccaagtgtttacggacgacgactaccagctgccctacgtcgtcggcaacgggaccgagggatgcctgccggccttccctccgcaggtctttacgctgccgcagtacggttacgcgacgctgaaccgcgacaacaccgaaaatcccaccgagaggagcagcttcttctgcctagagtactttcccagcaagatgctgagaacgggcaacaactttgagtttacctacaactttgaggaggtgcccttccactccagcttcgctcccagtcagaacctcttcaagctggccaacccgctggtggaccagtacttgtaccgcttcgtgagcacaaataacactggcggagtccagttcaacaagaacctggccgggagatacgccaacacctacaaaaactggttcccggggcccatgggccgaacccagggctggaacctgggctccggggtcaaccgcgccagtgtcagcgccttcgccacgaccaataggatggagctcgagggcgcgagttaccaggtgcccccgcagccgaacggcatgaccaacaacctccagggcagcaacacctatgccctggagaacactatgatcttcaacagccagccggcgaacccgggcaccaccgccacgtacctcgagggcaacatgctcatcaccagcgagagcgagacgcagccggtgaaccgcgtggcgtacaacgtcggcgggcagatggccaccaacaaccagagctccaccactgcccccgcgaccggcgcgtacaacctccaggaaatcgtgcccggcagcgtgtggatggagagggacgtgtacctccaaggacccatctgggccaagatcccagagacgggggcgcactttcacccctctccggccatgggcggattcggactcaaacacccaccgcccatgatgctcatcaagaacacgcctgtgcccggaaatatcaccagcttctcggacgtgcccgtcagcagcttcatcacccagtacagcaccgggcaggtcaccgtggagatggagtgggagctcaagaaggaaaactccaagaggtggaacccagagatccagtacacaaacaactacaacgacccccagtttgtggactttgccccggacagcaccggggaatacagaaccaccagacctatcggaacccgataccttacccgacccctttaa

SEQ ID NO: 790 - DNA, 2175 bp, Artificial Sequence
  Description of Artificial Sequence: Synthetic polynucleotide
atgtcttttgttgatcaccctccagattggttggaagaagttggtgaaggtcttcgcgagtttttgggccttgaagcgggcccaccgaaaccaaaacccaatcagcagcatcaagatcaagcccgtggtcttgtgctgcctggttataactatctcggacccggaaacggtctcgatcgaggagagcctgtcaacagggcagacggggtcgcgcgagagcacgacatctcgtacaacgagcagcttgaggcgggagacaacccctacctcaagtacaaccacgcggacgccgagtttcaggagaagctcgccgacgacacatccttcgggggaaacctcggaaaggcagtctttcaggccaagaaaagggttctcgaaccttttggcctggttgaagagggtgctaagacggcccctaccggaaagcggatagacgaccactttccaaaaagaaagaaggcccggaccgaagaggactccaagccttccacctcgtcagacgccgaagctggacccagcggatcccagcagctgcaaatcccagcccaaccagcctcaagtttgggagctgatacaatgtctgcgggaggtggcggcccattgggcgacaataaccaaggtgccgatggagtgggcaatgcctcgggagattggcattgcgattccacgtggatgggggacagagtcgtcaccaagtccacccgaacctgggtgctgcccagctacaacaaccaccagtaccgagagatcaaaagcggctccgtcgacggaagcaacgccaacgcctactttggatacagcaccccctgggggtactttgactttaaccgcttccacagccactggagcccccgagactggcaaagactcatcaacaactactggggcttcagaccccggtccctcagagtcaaaatcttcaacattcaagtcaaagaggtcacggtgcaggactccaccaccaccatcgccaacaacctcacctccaccgtccaagcgtttacggacgacgactaccagctgccctacgtcgtcggcaacgggaccgagggatgcctgccggccttccctccgcaggtctttacgctgccgcagtacggttacgcgacgctgaaccgcgacaacacagaaaatcccaccgagaggagcagcttcttctgcctagagtactttcccagcaagatgctgagaacgggcaacaactttgagtttacctacaactttgaggaggtgcccttccactccagcttcgctcccagtcagaacctcttcaagctggccaacccgctggtggaccagtacttgtaccgcttcgtgagcacaaataacactggcggagtccagttcaacaagaacctggccgggagatacgccaacacctacaaaaactggttcccggggcccatgggccgaacccagggctggaacctgggctccggggtcaaccgcgccagtgtcagcgccttcgccacgaccaataggatggagctcgagggcgcgagttaccaggtgcccccgcagccgaacggcatgaccaacaacctccagggcagcaacacctatgccctggagaacactatgatcttcaacagccagccggcgaacccgggcaccaccgccacgtacctcgagggcaacatgctcatcaccagcgagagcgagacgcagccggtgaaccgcgtggcgtacaacgtcggcgggcagatggccaccaacaaccagagctccaccactgcccccgcgaccggcacgtacaacctccaggaaatcgtgcccggcagcgtgtggatggagagggacgtgtacctccaaggacccatctgggccaagatcccagagacgggggcgcactttcacccctctccggccatgggcggattcggactcaaacacccaccgcccatgatgctcatcaagaacacgcctgtgcccggaaatatcaccagcttctcggacgtgcccgtcagcagcttcatcacccagtacagcaccgggcaggtcaccgtggagatggagtgggagctcaagaaggaaaactccaagaggtggaacccagagatccagtacacaaacaactacaacgacccccagtttgtggactttgccccggacagcaccggggaatacagaaccaccagacctatcggaacccgataccttacccgacccctttaa

SEQ ID NO: 791 - DNA, 2175 bp, Artificial Sequence
  Description of Artificial Sequence: Synthetic polynucleotide
atgtcttttgttgatcaccctccagattggttggaagaagttggtgaaggtcttcgcgagtttttgggccttgaagcgggcccaccgaaaccaaaacccaatcagcagcatcaagatcaagcccgtggtcttgtgctgcctggttataactatctcggacccggaaacggtctcgatcgaggagagcctgtcaacagggcagacgaggtcgcgcgagagcacgacatctcgtacaacgagcagcttgaggcgggagacaacccctacctcaagtacaaccacgcggacgccgagtttcaggagaagctcgccgacgacacatccttcgggggaaacctcggaaaggcagtctttcaggccaagaaaagggttctcgaaccttttggcctggttgaagagggtgctaagacggcccctaccggaaagcggatagacgaccactttccaaaaagaaagaaggcccggaccgaagaggactccaagccttccacctcgtcagacgccgaagctggacccagcggatcccagcagctgcaaatcccagcccaaccagcctcaagtttgggagctgatacaatgtctgcgggaggtggcggcccattgggcgacaataaccaaggtgccgatggagtgggcaatgcctcgggagattggcattgcgattccacgtggatgggggacagagtcgtcaccaagtccacccgaacctgggtgctgcccagctacaacaaccaccagtaccgagagatcaaaagcggctccgtcgacggaagcaacgccaacgcctactttggatacagcaccccctgggggtactttgactttaaccgcttccacagccactggagcccccgagactggcaaagactcatcaacaactactggggcttcagaccccggtccctcagagtcaaaatcttcaacattcaagtcaaagaggtcacggtgcaggactccaccaccaccatcgccaacaacctcacctccaccgtccaagtgtttacggacgacgactaccagctgccctacgtcgtcggcaacgggaccgagggatgcctgccggccttccctccgcaggtctttacgctgccgcagtacggttacgcgacgctgaaccgcgacaacacagaaaatcccaccgagaggagcagcttcttctgcctagagtactttcccagcaagatgctgagaacgggcaacaactttgagtttacctacaactttgaggaggtgcccttccactccagcttcgctcccagtcagaacctcttcaagctggccaacccgctggtggaccagtacttgtaccgcttcgtgagcacaaataacactggcggagtccagttcaacaagaacctggccgggagatacgccaacacctacaaaaactggttcccggggcccatgggccgaacccagggctggaacctgggctccggggtcaaccgcgccagtgtcagcgccttcgccacgaccaataggatggagctcgagggcgcgagttactaggtgcccccgcagccgaacggcatgaccaacaacctccagggcagcaacacctatgccctggagaacactatgatcttcaacagccagccggcgaacccgggcaccaccgccacgtacctcgagggcaacatgctcatcaccagcgagagcgagacgcagccggtgaaccgcgtggcgtacaacgtcggcgggcagatggccaccaacaaccagagctccaccactgcccccgcgaccggcacgtacaacctccaggaaatcgtgcccggcagcgtgtggatggagggggacgtgtacctccaaggacccatctgggccaagatcccagagacgggggcgcactttcacccctctccggccatgggcggattcggactcaagcacccaccgcccatgatgctcatcaagaacacgcctgtgcccggaaatatcaccagcttctcggacgtgcccgtcagcagcttcatcacccagtacagcaccgggcaggtcaccgtggagatggagtgggagctcaagaaggaaaactccaagaggtggaacccagagatccagtacacaaacaactacaacgacccccagtttgtggactttgccccggacagcaccggggaatacagaaccaccagacctatcggaacccgataccttacccgacccctttaa

SEQ ID NO: 792 - DNA, 2175 bp, Artificial Sequence
  Description of Artificial Sequence: Synthetic polynucleotide
atgtcttttgttgatcaccctccagattggttggaagaagttggtgaaggtcttcgcgagtttttgggccttgaagcgggcccaccgaaaccaaaacccaatcagcagcatcaagatcaagcccgtggtcttgtgctgcctggttataactatctcggacccggaaacggtctcgatcgaggagagcctgtcaacagggcagacgaggtcgcgcgagagcacgacatctcgtacaacgagcagcttgaggcgggagacaacccctacctcaagtacaaccacgcggacgccgagtttcaggagaagctcgccgacgacacatccttcgggggaaacctcggaaaggcagtctttcaggccaagaaaagggttctcgaaccttttggcctggttgaagagggtgctaagacggcccctaccggaaagcggatagacgaccactttccaaaaagaaagaaggtccggaccgaagaggactccaagccttccacctcgtcagacgccgaagctggacccagcggatcccagcagctgcaaatcccagcccaaccagcctcaagtttgggagctgatacaatgtctgcgggaggtggcggcccattgggcgacaataaccaaggtgccgatggagtgggcaatgcctcgggagattggcattgcgattccacgtggatgggggacagagtcgtcaccaagtccacccgaacctgggtgctgcccagctacaacaaccaccagtaccgagagatcaaaagcggctccgtcgacggaagcaacgccaacgcctactttggatacagcaccccctgggggtactttgactttaaccgcttccacagccactggagcccccgagactggcaaagactcatcaacaactactggggcttcagaccccggtccctcagagtcaaaatcttcaacattcaagtcaaagaggtcacggtgcaggactccaccaccaccatcgccaacaacctcacctccaccgtccaagtgtttacggacgacgactaccagctgccctacgtcgtcggcaacgggaccgagggatgcctgccggccttccctccgcaggtctttacgctgccgcagtacggttacgcgacgctgaaccgcgacaacacagaaaatcccaccgagaggagcagcttcttctgcctagagtactttcccagcaagatgctgagaacgggcaacaactttgagtttacctacaactttgaggaggtgcccttccactccagcttcgctcccagtcagaacctcttcaagctggccaacccgctggtggaccagtacttgtaccgcttcgtgagcacaaataacactggcggagtccagttcaacaagaacctggccgggagatacgccaacacctacaaaaactggttcccggggcccatgggccgaacccagggctggaacctgggctccggggtcaaccgcgccagtgtcagcgccttcgccacgaccaataggatggagctcgagggcgcgagttaccaggtgcccccgcagccgaacggcatgaccaacaacctccagggcagcaacacctatgccctggagaacactatgatcttcaacagccagccggcgaacccgggcaccaccgccacgtacctcgagggcaacatgctcatcaccagcgagagcgagacgcagccggtgaaccgcgtggcgtacaacgtcggcgggcagatggccaccaacaaccagagctccaccactgcccccgcgaccggcacgtacaacctccaggaaatcgtgcccggcagcgtgtggatggagagggacgtgtacctccaaggacccatctgggccaagatcccagagacgggggcgcactttcacccctctccggccatgggcggattcggactcaaacacccaccgcccatgatgctcatcaagaacacgcctgtgcccggaaatatcaccagcttctcggacgtgcccgtcagcagcttcatcacccagtacagcaccgggcaggtcaccgtggagatggagtgggagctcaagaaggaaaactccgagaggtggaacccagagatccagtacacaaacaactacaacgacccccagtttgtggactttgccccggacagcaccggggaatacagaaccaccagacctattggaacccgataccttacccgacccctttaa

SEQ ID NO: 793 - DNA, 2175 bp, Artificial Sequence
  Description of Artificial Sequence: Synthetic polynucleotide
atgtcttttgttgatcaccctccagattggttggaagaagttggtgaaggtcttcgcgagtttttgggccttgaagcgggcccaccgaaaccaaaacccaatcagcagcatcaagatcaagcccgtggtcttgtgctgcctggttataactatctcggacccggaaacggtctcgatcgaggagagcctgtcaacagggcagacgaggtcgcgcgagagcacgacatctcgtacagcgagcagcttgaggcgggagacaacccctacctcaagtacaaccacgcggacgccgagtttcaggagaagctcgccgacgacacatccttcgggggaaacctcggaaaggcagtctttcaggccaagaaaagggttctcgaaccttttggcctggttgaagagggtgctaagacggcccctaccggaaagcggatagacgaccactttccaaaaagaaagaaggcccggaccgaagaggactccaagccttccacctcgtcagacgccgaagctggacccagcggatcccagcagctgcaaatcccagcccaaccagcctcaagtttgggagctgatacaatgtctgcgggaggtggcggcccattgggcgacaataaccaaggtgccgatggagtgggcaatgcctcgggagattggcattgcgattccacgtggatgggggacagagtcgtcaccaagtccacccgaacctgggtgctgcccagctacaacaaccaccagtaccgagagatcaaaagcggctccgtcgacggaagcaacgccaacgcctactttggatacagcaccccctgggggtactttgactttaaccgcttccacagccactggagcccccgagactggcaaagactcatcaacaactactggggcttcagaccccggtccctcagagtcaaaatcttcaacattcaagtcaaagaggtcacggtgcaggactccaccaccaccatcgccaacaacctcacctccaccgtccaagtgtttacggacgacgactaccagctgccctacgtcgtcggcaacgggaccgagggatgcctgccggccttccctccgcaggtctttacgctgccgcagtacggttacgcgacgctgaaccgcgacaacacagaaaatcccaccgagaggagcagcttcttctgcctagagtactttcccagcaagatgctgagaacgggcaacaactttgagtttacctacaactttgaggaggtgcccttccactccagcttcgctcccagtcagaacctcttcaagctggccaacccgctggtggaccagtacttgtaccgcttcgtgagcacaaataacactggcggagtccagttcaacaagaacctggccgggagatacgccaacacctacaaaaactggttcccggggcccatgggccgaacccagggctggaacctgggctccggggtcaaccgcgccagtgtcagcgccttcgccacgaccaataggatggagctcgagggcgcgagttaccaggtgcccccgcagccgaacggcatgaccaacaacctccagggcagcaacacctatgccctggagaacactatgatcttcaacagccagccggcgaacccgggcaccaccgccacgtacctcgagggcaacatgctcatcaccagcgagagcgagacgcagccggtgaaccgcgtggcgtacaacgtcggcgggcagatggccaccaacaaccagagctccaccactgcccccgcgaccggcacgtacaacctccaggaaatcgtgcccggcagcgtgtggatggagagggacgtgtacctccaaggacccatctgggccaagatcccagagacgggggcgcactttcacccctctccggccatgggcggattcggactcaaacacccaccgcccatgatgctcatcaagaacacgcctgtgcccggaaatatcaccagcttctcggacgtgcccgtcagcagcttcatcacccagtacagcaccgggcaggtcaccgtggagatggagtgggagctcaagaaggaaaactccaagaggtggaacccagagatccagtacacaaacaactacaacgacccccagtttgtggactttgccccggacagcaccggggaatacagaaccgccagacctatcggaacccgataccttacccgacccctttaa

SEQ ID NO: 794 - DNA, 2175 bp, Artificial Sequence
  Description of Artificial Sequence: Synthetic polynucleotide
atgtcttttgttgatcaccctccagattggttggaagaagttggtgaaggtcttcgcgagtttttgggccctgaagcgggcccaccgaaaccaaaacccaatcagcagcatcaagatcaagcccgtggtcttgtgctgcctggttataactatctcggacccggaaacggtctcgatcgaggagagcctgtcaacagggcagacgaggtcgcgcgagagcacgacatctcgtacaacgagcagcttgaggcgggagacaacccctacctcaagtacaaccacgcggacgccgagtttcaggagaagctcgccgacgacacatccttcgggggaaacctcggaaaggcagtctttcaggccaagaaaagggttctcgaaccttttggcctggttgaagagggtgctaagacggcccctaccggaaagcggatagacgaccactttccaaaaagaaagaaggcccggaccgaagaggactccaagccttccacctcgtcagacgccgaagctggacccagcggatcccagcagctgcaaatcccagcccaaccagcctcaagtttgggagctgatacaatgtctgcgggaggtggcggcccattgggcgacaataaccaaggtgccgatggagtgggcaatgcctcgggagattggcattgcgattccacgtggatgggggacagagtcgtcaccaagtccacccgaacctgggtgctgcccagctacaacaaccaccagtaccgagagatcaaaagcggctccgtcgacggaagcaacgccaacgcctactttggatacagcaccccctgggggtactttgactttaaccgcttccacagccactggagcccccgagactggcaaagactcatcaacaactactggggcttcagaccccggtccctcagagtcaaaatcttcaacattcaagtcaaagaggtcacggtgcaggactccaccaccaccatcgccaacaacctcacctccaccgtccaagtgtttacggacgacgactaccagctgccctacgtcgtcggcaacgggaccgagggatgcctgccggccttccctccgcaggtctttacgctgccgcagtacggttacgcgacgctgaaccgcgacaacacagaaaatcccaccgagaggagcagcttcttctgcctagagtactttcccagcaagatgctgagaacgggcaacaactttgagtttacctacaactttgaggaggtgcccttccactccagcttcgctcccagtcagaacctcttcaagctggccaacccgctggtggaccagtacttgtaccgcttcgtgagcacaaataacactggcggagtccagttcaacaagaacctggccgggagatacgccaacacctacaaaaactggttcccggggcccatgggccgaacccagggctggaacctgggctccggggtcaaccgcgccagtgtcagcgccttcgccacgaccaataggatggagctcgagggcgcgagttaccaggtgcccccgcagccgaacggcatgaccaacaacctccagggcagcaacacctatgccctggagaacactatgatcttcaacagccagccggcgaacccgggcaccaccgccacgtacctcgagggcaacatgctcatcaccagcgagagcgagacgcagccggtgaaccgcgtggcgtacaacgtcggcgggcagatgaccaccaacaaccagagctccaccactgcccccgcgaccggcacgtacaacctccaggaaatcgtgcccggcagcgtgtggatggagagggacgtgtacccccaaggacccatctgggccaagatcccagagacgggggcgcactttcacccctctccggccatgggcggattcggactcaaacacccaccgcccatgatgctcatcaagaacacgcctgtgcccggaaatatcaccagcttctcggacgtgcccgtcagcagcttcatcacccagtacagcaccgggcaggtcaccgtggagatggagtgggagctcaagaaggaaaactccaagaggtggaacccagagatccagtacacaaacaactacaacgacccccagtttgtggactttgccccggacagcaccggggaatacaggaccaccagacctatcggaacccgataccttacccgacccctttaa

SEQ ID NO: 795 - DNA, 2175 bp, Artificial Sequence
  Description of Artificial Sequence: Synthetic polynucleotide
atgtcttttgttgatcaccctccagattggttggaagaagttggtgaaggtcttcgcgagtttttgggccttgaagcgggcccaccgaaaccaaaacccaatcagcagcatcaagatcaagcccgtggtcttgtgctgcctggttataactatctcggacccggaaacggtctcgatcgaggagagcctgtcaacagggcagacgaggtcgcgcgagagcacgacatctcgtacaacgagcagcttgaggcgggagacaacccctacctcaagtacaaccacgcggacgccgagtttcaggagaagctcgccgacgacacatccttcgggggaaacctcggaaaggcagtctttcaggccaagaaaagggttctcgaaccttttggcctggttgaagagggtgctaagacggcccctaccggaaagcggatagacgaccactttccaaaaagaaagaaggcccggaccgaagaggactccaagccttccacctcgtcagacgccgaagctggacccagcggatcccagcagctgcaaatcccagcccaaccagcctcaagtttgggagctgatacaatgtctgcgggaggtggcggcccattgggcgacaataaccaaggtgccgatggagtgggcaatgcctcgggagattggcattgcgattccacgtggatgggggacagagtcgtcaccaagtccacccgaacctgggtgctgcccagctacaacaaccaccagtaccgagagatcaaaagcggctccgtcgacggaagcaacgccaacgcctactttggatacagcaccccctgggggtactttgactttaaccgcttccacagccactggagcccccgagactggcaaagactcatcaacaactactggggcttcagaccccggtccctcagagtcaaaatcttcaacattcaagtcaaagaggtcacggtgcaggactccaccaccaccatcgccaacaacctcacctccaccgtccaagtgtttacggacgacgactaccagctgccctacgtcgtcggcaacgggaccgagggatgcctgccggccttccctccgcaggtctttacgctgccgcagtacggttacgcgacgctgaaccgcgacaacacagaaaatcccaccgagaggagcagcttcctctgcctagagtactttcccagcaagatgctgagaacgggcaacaactttgagtttacctacaactttgaggaggtgcccttccactccagcttcgctcccagtcagaacctcttcaagctggccaacccgctggtggaccagtacttgtaccgcttcgtgagcacaaataacactggcggagtccagttcaacaagaacctggccgggagatacgccaacacctacaaaaactggttcccggggcccatgggccgaacccagggctggaacctgggctccggggtcaaccgcgccagtgtcagcgccttcgccacgaccaataggatggagctcgagggcgcgagttaccaggtgcccccgcagccgaacggcatgaccaacaacctccagggcagcaacacctatgccctggagaacactatgatcttcaacagccagccggcgaacccgggcaccaccgccacgtacctcgagggcaacatgctcatcaccagcgagagcgagacgcagccggtgaaccgcgtggcgtacaacgtcggcgggcagatggccaccaacaaccagagctccaccactgcccccgcgaccggcacgtacaacctccaggaaatcgtgcccggcagcgtgtggatgaagagggacgtgtacctccaaggacccatctgggccaagatcccagagacgggggcgcactttcacccctctccggccatgggcggattcggactcaaacacccaccgcccatgatgctcatcaagaacacgcctgtgcccggaaatatcaccagcttctcggacgtgcccgtcagcagcttcatcacccagtacagcaccgggcaggtcaccgtggagatggagtgggagctcaagaaggaaaactccaagaggtggaacccagagatccagtacacaaacaactacaacgacccccagtttgtggactttgccccggacagcaccggggaatacagaaccaccagacctatcggaacccgataccttacccgacccctttaa

SEQ ID NO: 796 - DNA, 2175 bp, Artificial Sequence
  Description of Artificial Sequence: Synthetic polynucleotide
atgtcttttgttgatcaccctccagattggttggaagaagttggtgaaggtcttcgcgagtttttgggccttgaggcgggcccaccgaaaccaaaacccaatcagcagcatcaagatcaagcccgtggtcttgtgctgcctggttataactatctcggacccggaaacggtctcgatcgaggagagcctgtcaacagggcagacgaggtcgcgcgagagcacgacatctcgtacaacgagcagcttgaggcgggagacaacccctacctcaagtacaaccacgcggacgccgagtttcaggagaagctcgccgacgacacatccttcgggggaaacctcggaaaggcagtctttcaggccaagaaaagggttctcgaaccttttggcctggttgaagagggtgctaagacggcccctaccggaaagcggatagacgaccactttccaaaaagaaagaaggcccggaccgaagaggactccaagccttccaccccgtcagacgccgaagctggacccagcggatcccagcagctgcaaatcccagcccaaccagcctcaagtttgggagctgatacaatgtctgcgggaggtggcggcccattgggcgacaataaccaaggtgccgatggagtgggcaatgcctcgggagattggcattgcgattccacgtggatgggggacagagtcgtcaccaagtccacccgaacctgggtgctgcccagctacaacaaccaccagtaccgagagatcaaaagcggctccgtcgacggaagcaacgccaacgcctactttggatacagcaccccctgggggtactttgactttaaccgcttccacagccactggagcccccgagactggcaaagactcatcaacaactactggggcttcagaccccggtccctcagagtcaaaatcttcaacattcaagtcaaagaggtcacggtgcaggactccaccaccaccatcgccaacaacctcacctccaccgtccaagtgtttacggacgacgactaccagctgccctacgtcgtcggcaacgggaccgagggatgcctgccggccttccctccgcaggtctttacgctgccgcagtacggttacgcgacgctgaaccgcgacaacacagaaaatcccaccgagaggagcagcttcttctgcctagagtactttcccagcaagatgctgagaacgggcaacaactttgagtttacctacaactttgaggaggtgcccttccactccagcttcgctcccagtcagaacctcttcaagctggccaacccgctggtggaccagtacttgtaccgcttcgtgagcacaaataacactggcggagtccagttcaacaagaacctggccgggagatacgccaacacctacaaaaactggttcccggggcccatgggccgaacccagggctggaacctgggctccggggtcaaccgcgccagtgtcagcgccttcgccacgaccaataggatggagctcgagggcgcgagttaccaggtgcccccgcagccgaacggcatgaccaacaacctccagggcagcaacacctatgccctggagaacactatgatcttcaacagccagccggcgaacccgggcaccaccgccacgtacctcgagggcaacatgctcatcaccagcgagagcgagacgcagccggtgaaccgcgtggcgtacaacgtcggcgggcagatggccaccaacaaccagagctccaccactgcccccgcgaccggcacgtacaacctccaggaaatcgtgcccggcagcgtgtggatggagagggacgtgtacctccaaggacccatctgggccaagatcccagagacgggggcgcactttcacccctctccggccatgggcggattcggactcaaacacccaccgcccatgatgctcatcaagaacacgcctgtgcccggaaatatcaccagcttctcggacgtgcccgtcagcagcttcatcacccagtacagcaccgggcaggtcaccgtggagatggagtgggagctcaagaaggaaaactccaagaggtggaacccagagatccagtacacaaacaactacaacgacccccagtttgtggactttgccccggacagcaccggggaatacagaaccaccagacctatcggaacccgataccttacccgacccctttaa

SEQ ID NO: 797 - DNA, 2175 bp, Artificial Sequence
  Description of Artificial Sequence: Synthetic polynucleotide
atgtcttttgttgatcaccctccagattggttggaagaagttggtgaaggtcttcgcgagtttttgggccttgaagcgggcccaccgaaaccaaaacccaatcagcagcatcaagatcaagcccgtggtcttgtgctgcctggttataactatctcggacccggaaacggtctcgatcgaggagagcctgtcaacagggcagacgaggtcgcgcgagagcacgacatctcgtacaacgagcagcttgaggcgggagacaacccctacctcaagtacaaccacgcggacgccgagtttcaggagaagctcgccgacgacacatccttcgggggaaacctcggaaaggcagtctttcaggccaagaaaagggttctcgaaccttttggcctggttgaagagggtgctaagacggcccctaccggaaagcggatagacgaccactttccaaaaagaaagaaggcccggaccgaagaggactccaagccttccacctcgtcagacgccgaagctggacccagcggatcccagcagctgcaaatcccagcccaaccagcctcaagtttgggagctgatacaatgtctgcgggaggtggcggcccattgggcgacaataaccaaggtgccgatggagtgggcaatgcctcgggagattggcattgcgattccacgtggatgggggacagagtcgtcaccaagtccacccgaacctgggtgctgcccagctacaacaaccaccagtaccgagagatcaaaagcggctccgtcgacggaagcaacgccaacgcctactttggatacagcaccccctgggggtactttgactttaaccgcttccacagccactggagcccccgagactggcaaagactcatcaacaactactggggcttcagaccccggtccctcagagtcaaaatcttcaacattcaagtcaaagaggtcacggtgcaggactccaccaccaccatcgccaacaacctcacctccaccgtccaagtgtttacggacgacgactaccagctgccctacgtcgtcggcaacgggaccgagggatgcctgccggccttccctccgcaggtctttacgctgccgcagtacggttacgcgacgctgaaccgcgacaacacagaaaatcccaccgagaggagcagcttcttctgcctagagtactttcccagcaagatgctgagaacgggcaacaactttgagtttacctacaactttgaggaggtgcccttccactccagcttcgctcccagtcagaacctcttcaagctggccaacccgctggtggaccagtacttgtaccgcttcgtgagcacaaataacactggcggagtccagttcaacaagaacctggccgggagatacgccaacacccacaaaaactggttcccggggcccatgggccgaacccagggctggaacctgggctccggggtcaaccgcgccagtgtcagcgccttcgccacgaccaataggatggagctcgagggcgcgagttaccaggtgcccccgcagtcgaacggcatgaccaacaacctccggggcagcaacacctatgccctggagaacactatgatcttcaacagccagccggcgaacccgggcaccaccgccacgtacctcgagggcaacatgctcatcaccagcgagagcgagacgcagccggtgaaccgcgtggcgtacaacgtcggcgggcagatggccaccaacaaccagagctccaccactgcccccgcgaccggcacgtacaacctccaggaaatcgtgcccggcagcgtgtggatggagagggacgtgtacctccaaggacccatctgggccaagatcccagagacgggggcgcactttcacccctctccggccatgggcggattcggactcaaacacccaccgcccatgatgctcatcaagaacacgcctgtgcccggaaatatcaccagcttctcggacgtgcccgtcagcagcttcatcacccagtacagcaccgggcaggtcaccgtggagatggagtgggagctcaagaaggaaaactccaagaggtggaacccagagatccagtacacaaacaactacaacgacccccagtttgtggactttgccccggacagcaccggggaatacagaaccaccagacctatcggaacccgataccttacccgacccctttaa

SEQ ID NO: 798 - DNA, 2175 bp, Artificial Sequence
  Description of Artificial Sequence: Synthetic polynucleotide
atgtcttttgttgatcaccctccagattggttggaagaagttggtgaaggtcttcgcgagtttttgggccttgaagcgggcccaccgaaaccaaaacccaatcagcagcatcaagatcaagcccgtggtcttgtgctgcctggttataactatctcggacccggaaacggtctcgatcgaggagagcctgtcaacagggcagacgaggtcgcgcgagagcacgacatctcgtacaacgagcagcttgaggcgggagacaacccctacctcaagtacaaccacgcggacgccgagtttcaggagaagctcgccgacgacacatccttcgggggaaacctcggaaaggcagtctttcaggccaagaaaagggttctcgaaccttttggcctggttgaagagggtgctaagacggcccctaccggaaagcggatagacgaccactttccaaaaagaaagaaggcccggaccgaagaggactccaagccttccacctcgtcagacgccgaagctggacccagcggatcccagcagctgcaaatcccagcccaaccagcctcaagtttgggagctgatacaatgtctgcgggaggtggcggcccattgggcgacaataaccaaggtgccgatggagtgggcaatgcctcgggagattggcattgcgattccacgtggatgggggacagagtcgtcaccaagtccacccgaacctgggtgctgcccagctacaacaaccaccagtaccgagagatcaaaagcggctccgtcgacggaagcaacgccaacgcctactttggatacagcaccccctgggggtactttgactttaaccgcttccacagccactggagcccccgagactggcaaagactcatcaacaactactggggcttcagaccccggtccctcagagtcaaaatcttcaacattcaagtcaaagaggtcacggtgcaggactccaccaccaccatcgccaacaacctcacctccaccgtccaagtgtttacggacgacgactaccagctgccctacgtcgtcggcaacgggaccgagggatgcctgccggccttccctccgcaggtctttacgctgccgcagtacggttacgcgacgctgaaccgcgacaacacagaaaatcccaccgagaggagcagcttcttctgcctagagtactttcccagcaagatgctgagaacgggcaacaactttgagtttacctacaactttgaggaggtgcccttccactccagcttcgctcccagtcagaacctcttcaagctggccaacccgctggtggaccagtacttgtaccgcttcgtgagcacaaataacactggcggagtccagttcaacaagaacctggccgggagatacgccaacacctacaaaaactggttcccggggcccatgggccgaacccagggctggaacctgggctccggggtcaaccgcgccagtgtcagcgccttcgccacgaccaataggatggagctcgagggcgcgagttaccaggtgcccccgcagccgaacggcatgaccaacaacctccagggcagcaacacctatgccctggagaacactatgatcttcaacagccagccggcgaacccgggcaccaccgccacgtacctcgagggcaacatgctcatcaccagcgagagcgagacgcagccggtgaaccgcgtggcgtacagcgtcggcgggcagatggccaccaacaaccagagctccaccactgcccccacgaccggcacgtacaacctccaggaaatcgtgcccggcagcgtgtggatggagagggacgtgtacctccaaggacccatctgggccaagatcccagagacgggggcgcactttcacccctctccggccatgggcggattcagactcaaacacccaccgcccatgatgctcatcaagaacacgcctgtgcccggaaatatcaccagcttctcggacgtgcccgtcagcagcttcatcacccagtacagcaccgggcaggtcaccgtggagatggagtgggagctcaagaaggaaaactccaagaggtggaacccagagatccagtacacaaacaactacaacgacccccagtttgtggactttgccccggacagcaccggggaatacagaaccaccagacctatcggaacccgataccttacccgacccctttaa

SEQ ID NO: 799 - DNA, 2175 bp, Artificial Sequence
  Description of Artificial Sequence: Synthetic polynucleotide
atgtcttttgttgatcaccctccagattggttggaagaagttggtgaaggtcttcgcgagtttttgggccttgaagcgggcccaccgaaaccaaaacccaatcagcagcatcaagatcaagcccgtggtcttgtgctgcctggttataactatctcggacccggaaacggtctcgatcgaggagagcctgtcaacagggcagacgaggtcgcgcgagagcacgacatctcgtacaacgagcagcttgaggcgggagacaacccctacctcaagtacaaccacgcggacgccgagtttcaggagaagctcgccgacgacacatccttcgggggaaacctcggaaaggcagtctttcaggccaagaaaagggttctcgaaccttttggcctggttgaagagggtgctaagacggcccctaccggaaagcggatagacgaccactttccaaaaagaaagaaggcccggaccgaagaggactccaagccttccacctcgtcagacgccgaagctggacccagcggatcccagcagctgcaaatcccagcccaaccagcctcaagtttgggagctgatacaatgtctgcgggaggtggcggcccattgggcgacaataaccaaggtgccgatggagtgggcaatgcctcgggagattggcattgcgattccacgtggatgggggacagagtcgtcaccaagtccacccgaacctgggtgctgcccagctacaacaaccaccagtaccgagagatcaaaagcggctccgtcgacggaagcaacgccaacgcctactttggatacagcaccccctgggggtactttgactttaaccgcttccacagccactggagcccccgagactggcaaagactcatcaacaactactggggcttcagaccccggtccctcagagtcaaaatcttcaacattcaagtcaaagaggtcacggtgcaggactccaccaccaccatcgccaacaacctcacctccaccgtccaagtgtttacggacgacgactaccagctgccctacgtcgtcggcaacgggaccgagggatgcctgccggccttccctccgcaggtctttacgctgccgcagtacggttacgcgacgctgaaccgcgacaacacagaaaatcccaccgagaggagcagcttcttctgcctagagtactttcccagcaagatgctgagaacgggcaacaactttgagtttacctacaactttgaggaggtgcccttccactccagcttcgctcccagtcagaacctcttcaagctggccaacccgctggtggaccagtacttgtaccgcttcgtgagcacaaataacactggcggagtccagttcaacaagaacctggccgggagatacgccaacacctacaaaaactggttcccggggcccatgggccgaacccagggctggaacctgggctccggggtcaaccgcgccagtgtcagcgccttcgccgcgaccaataggatggagctcgagggcgcgagttaccaggtgcccccgcagccgaacggcatgaccaacaacctccagggcagcaacacctatgccctggagaacactatgatcttcaacagccagccggcgaacccgggcaccaccgccacgtacctcgagggcaacatgctcatcaccagcgagagcgagacgcagccggtgaaccgcgtggcgtacaacgtcggcgggcagatggccaccaacaaccagagctccaccactgcccccgcgaccggcacgtacaacctccaggaaatcgtgcccggcggcgtgtggatggagagggacgtgtacctccaaggacccatctgggccaagatcccagagacgggggcgcactttcacccctctccggccatgggcggattcggactcaaacacccaccgcccatgatgctcatcaagaacacgcctgtgcccggaaataccaccagcttctcggacgtgcccgtcagcagcttcatcacccagtacagcaccgggcaggtcaccgtggagatggagtgggagctcaagaaggaaaactccaagaggtggaacccagagatccagtacacaaacaactacaacgacccccagtttgtggactttgccccggacagcaccggggaatacagaaccaccagacctatcggaacccgataccttacccgacccctttaa

SEQ ID NO: 800 - DNA, 2175 bp, Artificial Sequence
  Description of Artificial Sequence: Synthetic polynucleotide
atgtcttttgttgatcaccctccagattggttggaagaagttggtgaaggtcttcgcgagtttttgggccttgaagcgggcccaccgaaaccaaaacccaatcagcagcatcaagatcaagcccgtggtcttgtgctgcctggttataactatctcggacccggaaacggtctcgatcgaggagagcctgtcaacagggcagacgaggtcgcgcgagagcacgacatctcgtacaacgagcagcttgaggcgggagacaacccctacctcaagtacaaccacgcggacgccgagtttcaggagaagctcgccgacgacacatccttcgggggaaacctcggaaaggtagtctttcaggccaagaaaagggttctcgaaccttttggcctggttgaagagggtgctaagacggcccctaccggaaagcggatagacgaccactttccaaaaagaaagaaggcccggaccgaagaggactccaagccttccacctcgtcagacgccgaagctggacccagcggatcccagcagctgcaaatcccagcccaaccagcctcaagtttgggagctgatacaatgtctgcgggaggtggcggcccattgggcggcaataaccaaggtgccgatggagtgggcaatgcctcgggagattggcattgcgattccacgtggatgggggacagagtcgtcaccaagtccacccgaacctgggtgctgcccagctacaacaaccaccagtaccgagagatcaaaagcggctccgtcgacggaagcaacgccaacgcctactttggatacagcaccccctgggggtactttgactttaaccgcttccacagccactggggcccccgagactggcaaagactcatcaacaactactggggcttcagaccccggtccctcagagtcaaaatcttcaacattcaagtcaaagaggtcacggtgcaggactccaccaccaccatcgccaacaacctcacctccaccgtccaagtgtttacggacgacgactaccagctgccctacgtcgtcggcaacgggaccgagggatgcctgccggccttccctccgcaggtctttacgctgccgcagtacggttacgcgacgctgaaccgcgacaacacagaaaatcccaccgagaggagcagcttcttctgcctagagtactttcccagcaagatgctgagaacgggcaacaactttgagtttacctacaactttgaggaggtgcccttccactccagcttcgctcccagtcagaacctcttcaagctggccaacccgctggtggaccagtacttgtaccgcttcgtgagcacaaataacactggcggagtccagttcaacaagaacctggccgggagatacgccaacacctacaaaaactggttcccggggcccatgggccgaacccagggctggaacctgggctccggggtcaaccgcgccagtgtcagcgccctcgccacgaccaataggatggagctcgagggcgcgagttaccaggtgcccccgcagccgaacggcatgaccaacaacctccagggcagcaacacctatgccctggagaacactatgatcttcaacagccagccggcgaacccgggcaccaccgccacgtacctcgagggcaacatgctcatcaccagcgagagcgagacgcagccggtgaaccgcgtggcgtacaacgtcggcgggcagatggccaccaacaaccagagctccaccactgcccccgcgaccggcacgtacaacctccaggaaatcgtgcccggcagcgtgtggatggagagggacgtgtacctccaaggacccatctgggccaagatcccagagacgggggcgcactttcacccctctccggccatgggcggattcggactcaaacacccaccgcccatgatgctcatcaagaacacgcctgtgcccggaaatatcaccagcttctcggacgtgcccgtcagcagcttcatcacccagtacagcaccgggcaggtcaccgtggagatggagtgggagctcaagaaggaaaactccaagaggtggaacccagagatccagtacacaaacaactacaacgacccccagtttgtggactttgccccggacagcaccggggaatacagaaccaccagacctatcggaacccgataccttacccgacccctttaa

SEQ ID NO: 801 - DNA, 2175 bp, Artificial Sequence
  Description of Artificial Sequence: Synthetic polynucleotide
atgtcttttgttgatcaccctccagattggttggaagaagttggtgaaggtcttcgcgagtttttgggccttgaagcgggcccaccgaaaccaaaacccaatcagcagcatcaagatcaagcccgtggtcttgtgctgcctggttataactatctcggacccggaaacggtctcgatcgaggagagcctgtcaacagggcagacgaggtcgcgcgagagcacgacatctcgtacaacgagcagcttgaggcgggagacaacccctacctcaagtacaaccacgcggacgccgagtttcaggagaagctcgccgacgacacatccttcgggggaaacctcggaaaggcagtctttcaggccaagaaaagggttctcgaaccttttggcctggttgaagagggtgctaagacggcccctaccggaaagcggatagacgaccactttccaaaaagaaagaaggcccggaccgaagaggactccaagccttccacctcgtcagacgccgaagctggacccagcggatcccagcagctgcaaatcccagcccaaccagcctcaagtttgggagctgatacaatgtctgcgggaggtggcggcccattgggcgacaataaccaaggtgccgatggagtgggcaatgcctcgggagattggcattgcgattccacgtggatgggggacagagtcgtcaccaagtccacccgaacctgggtgctgcccagctacaacaaccaccagtaccgagagatcaaaagcggctccgtcgacggaagcaacgccaacgcctactttggatacagcaccccctgggggtactttgactttaaccgcttccacagccactggagcccccgagactggcaaagactcatcaacaactactggggcttcagaccccggtccctcagagtcaaaatcttcaacattcaagtcaaagaggtcacggtgcaggactccaccaccaccatcgccaacaacctcacctccaccgtccaagtgtttacggacgacgactaccagctgccctacgtcgtcggcaacgggaccgagggatgcctgccggccttccctccgcaggtctttacgctgccgcagtacggttacgcgacgctgaaccgcgacaacacagaaaatcccaccgagaggagcagcttcttctgcctagagtactttcccagcaagatgctgagaacgggcaacaactttgagtttacctacaactttgaggaggtgcccttccactccagcttcgctcccagtcagaacctcttcaagctggccaacccgctggtggaccagtacttgtaccgcttcgtgagcacaaataacactggcggagtccagttcaacaagaacctggccgggagatacgccaacacctacaaaaactggttcccggggcccatgggccgaacccagggctggaacctgggctccggggtcaaccgcgccagtgtcagcgccttcgccacgaccaataggatggagctcgagggcgcgagttaccaggtgcccccgcagccgaacggcatgaccaacaacctccagggcagcaacacctatgccctggagaacactatgatcttcaacagccagccggcgaacccgggcaccaccgccacgtacctcgagggcaacatgctcatcaccagcgagagcgagacgcagccggtgaaccgcgtggcgtacaacgtcggcgggcagatggccaccaacaaccagagctccaccactgcccccgcgaccggcacgtacaacctccaggaaatcgtgcccggcagcgtgtggatggagagggacgtgtacctccaaggacccatctgagccaagatcccagagacgggggcgcactttcacccctctccggccatgggcggattcggactcaaacacccaccgcccatgatgctcatcaagaacacgcctgtgcccggaaatatcaccagcttctcggacgtgcccgtcagcagcttcatcacccagtacagcaccgggcaggtcaccgtggagatggagtgggagctcaagaaggaaaactccaagaggtggaacccagagatccagtacacaaacaactacaacgacccccagtttgtggactttgccccggacagcaccggggaatgcagaaccaccagacctatcggaacccgataccttacccgacccctttaa

SEQ ID NO: 802 - DNA, 2175 bp, Artificial Sequence
  Description of Artificial Sequence: Synthetic polynucleotide
atgtcttttgttgatcaccctccagattggttggaagaagttggtgaaggtcttcgcgagtttttgggccttgaagcgggcccaccgaaaccaaaacccaatcagcagcatcaagatcaagcccgtggtcttgtgctgcctggttataactatctcggacccggaaacggtctcgatcgaggagagcctgtcaacagggcagacgaggtcgcgcgagagcacgacatctcgtacaacgagcagcttgaggcgggagacaacccctacctcaagtacaaccacgcggacgccgagtttcaggagaagctcgccgacgacacatccttcgggggaaacctcggaaaggcagtctttcaggccaagaaaagggttctcgaaccttttggcctggttgaagagggtgctaagacggcccctaccggaaagcggatagacgaccactttccaaaaagaaagaaggcccggaccgaagaggactccaagccttccacctcgtcagacgccgaagctggacccagcggatcccagcagctgcaaatcccagcccaaccagcctcaagtttgggagctgatacaatgtctgcgggaggtggcggcccattgggcgacaataaccaaggtgccgatggagtgggcaatgcctcgggagattggcattgcgattccacgtggatgggggacagagtcgtcaccaagtccacccgaacctgggtgctgcccagctacaacaaccaccagtaccgagagatcaaaagcggctccgtcgacggaagcaacgccaacgcctactttggatacagcaccccctgggggtactttgactttaaccgcttccacagccactggagcccccgagactggcaaagactcatcaacaactactggggcttcagaccccggtccctcagagtcaaaatcctcaacattcaagtcaaagaggtcacggtgcaggactccaccaccaccatcgccaacaacctcacctccaccgtccaagtgtttacggacgacgactaccagctgccctacgtcgtcggcaacgggaccgagggatgcctgccggccttccctccgcaggtctttacgctgccgcagtacggttacgcgacgctgaaccgcgacaacacagaaaatcccaccgagaggagcagcttcttctgcctagagtactttcccagcaagatgctgagaacgggcaacaactttgagtttacctacaactttgaggaggtgcccttccactccagcttcgctcccagtcagaacctcttcaagctggccaacccgctggtgggccagtacttgtaccgcttcgtgagcacaaataacactggcggagtccagttcaacgagaacctggccgggagatacgccaacacctacaaaaactggttcccggggcccatgggccgaacccagggctggaacctgggctccggggtcaaccgcgccagtgtcagcgccttcgccacgaccaataggatggagctcgagggcgcgagttaccaggtgcccccgcagccgaacggcatgaccaacaacctccagggcagcaacacctatgccctggagaacactatgatcttcaacagccagccggcgaacccgggcaccaccgccacgtacctcgagggcaacatgctcatcaccagcgagagcgagacgcagccggtgaaccgcgtggcgtacaacgtcggcgggcagatggccaccaacaaccagagctccaccactgcccccgcgaccggcacgtacaacctccaggaaatcgtgcccggcagcgtgtggatggagagggacgtgtacctccaaggacccatctgggccaagatcccagagacgggggcgcactttcacccctctccggccatgggcggattcggactcaaacacccaccgcccatgatgctcatcaagaacacgcctgtgcccggaaatatcaccagcttctcggacgtgcccgtcagcagcttcatcacccagtacagcaccgggcaggccaccgtggagatggagtgggagctcaagaaggaaaactccaagaggtggaacccagagatccagtacacaaacaactacaacgacccccagtttgtggactttgccccggacagcaccggggaatacagaaccaccagacctatcggaacccgataccttacccgacccctttaa

SEQ ID NO: 803 - DNA, 2175 bp, Artificial Sequence
  Description of Artificial Sequence: Synthetic polynucleotide
atgtcttttgttgatcaccctccagattggttggaagaagttggtgaaggtcttcgcgagtttttgggccttgaagcgggcccaccgaaaccaaaacccaatcagcagcatcaagatcaagcccgtggtcttgtgctgcctggttataactatctcggacccggaaacggcctcgatcgaggagagcctgtcaacagggcagacgaggtcgcgcgagagcacgacatctcgtacaacgagcagcttgaggcgggagacaacccctacctcaagtacaaccacgcggacgccgagtttcaggagaagctcgccgacgacacatccttcgggggaaacctcggaaaggcagtctttcaggccaagaaaagggttctcgaaccttttggcctggttgaagagggtgctaagacggcccctaccggaaagcggatagacgaccactttccaaaaagaaagaaggcccggaccgaagaggactccaagccttccacctcgtcagacgccgaagctggacccagcggatcccagcagctgcaaatcccagcccaaccagcctcaagtttgggagctgatacaatgtctgcgggaggtggcggcccattgggcgacaataaccaaggtgccgatggagtgggcaatgcctcgggagattggcattgcgattccacgtggatgggggacagagtcgtcaccaagtccacccgaacctgggtgctgcccagctacaacaaccaccagtaccgagagatcaaaagcggctccgtcgacggaagcaacgccaacgcctactttggatacagcaccccctgggggtactttgactttaaccgcttccacagccactggagcccccgagactggcaaagactcatcaacaactactggggcttcagaccccggtccctcagagtcaaaatcttcaacattcaagtcaaagaggtcacggtgcaggactccaccaccatcatcgccaacaacctcacctccaccgtccaagtgtttacggacgacgactaccagctgccctacgtcgtcggcaacgggaccgagggatgcctgccggccttccctccgcaggtctttacgctgccgcagtacggttacgcgacgctgaaccgcgacaacacagaaaatcccaccgagaggagcagcttcttctgcctagagtactttcccagcaagatgctgagaacgggcaacaactttgagtttacctacaactttgaggaggtgcccttccactccagcttcgcccccagtcagaacctcttcaagctggccaacccgctggtggaccagtacttgtaccgcttcgtgagcacaaataacactggcggagtccagttcaacaagaacctggccgggagatacgccaacacctacaaaaactggttcccggggcccatgggccgaacccagggctggaacctgggctccggggtcaaccgcgccagtgtcagcgccttcgccacgaccaataggatggagctcgagggcgcgagttaccaggtgcccccgcagccgaacggcatgaccaacaacctccagggcagcaacacctatgccctggagaacactatgatcttcaacagccagccggcgaacccgggcaccaccgccacgtacctcgagggcaacatgctcatcaccagcgagagcgagacgcagccggtgaaccgcgtggcgtacaacgtcggcgggcagatggccaccaacaaccagagctccaccactgcccccgcgaccggcacgtacaacctccaggaaatcgtgcccggcagcgtgtggatggagagggacgtgtacctccaaggacccatctgggccaagatcccagagacgggggcgcactttcacccctctccggccatgggcggattcggactcaaacacccaccgcccatgatgctcatcaagaacacgcctgtgcccggaaatatcaccagcttctcggacgtgcccgtcagcagcttcatcacccagtacagcaccgggcaggtcaccgtggagatggagtgggagctcaagaaggaaaactccaagaggtggaacccagagatccagtacacaaacaactacaacgacccccagtttgtggactttgccccggacagcaccggggaatacagaaccaccagacctatcggaacccgataccttacccgacccctttaa

SEQ ID NO: 804 - DNA, 2175 bp, Artificial Sequence
  Description of Artificial Sequence: Synthetic polynucleotide
atgtcttttgttgatcaccctccagattggttggaagaagttggtgaaggtcttcgcgagtttttgggccttgaagcgggcccaccgaaaccaaaacccaatcagcagcatcaagatcaagcccgtggtcttgtgctgcctggttataactatctcggacccggaaacggtctcgatcgaggagagcctgtcaacagggcagacgaggtcgcgcgagagcacgacatctcgtacaacgagcagcttgaggcgggagacaacccctacctcaagtacaaccacgcggacgccgagtttcaggagaagctcgccgacgacacatccttcgggggaaacctcggaaaggcagtctttcaggccaagaaaagggttctcgaaccttttggcctggttgaagagggtgctaagacggcccctaccggaaagcggatagacgaccactttccaaaaagaaagaaggcccggaccgaagaggactccaagccttccacctcgtcagacgccgaagctggacccagcggatcccagcagctgcaaatcccagcccaaccagcctcaagtttgggagctgatacaatgtctgcgggaggtggcggcccattgggcgacaataaccaaggtgccgatggagtgggcaatgcctcgggagattggcattgcgattccacgtggatgggggacagagtcgtcaccaagtccacccgaacctgggtgctgcccagctacaacaaccaccagtaccgagagatcaaaagcggctccgtcgacggaagcaacgccaacgcctactttggatacagcaccccctgggggtactttgactttaaccgcttccacagccactggagcccccgagactggcaaagactcatcaacaactactggggcttcagaccccggtccctcagagtcaaaatcttcaacattcaagtcaaagaggtcacggtgcaggactccaccaccaccatcgccaacaacctcacctccaccgtccaagtgtttacggacgacgactaccagctgccctacgtcgtcggcaacgggaccgagggatgcctgccggccttccctccgcaggtctttacgctgccgcagtacggttacgcgacgctgaaccgcgacaacacagaaaatcccaccgagaggagcagcttcttctgcctagagtactttcccagcaagatgctgagaacgggcaacaactttgagtttacctacaactttgaggaggtgcccttccactccagcttcgctcccagtcagaacctcttcaagctggccaacccgctggtggaccagtacttgtaccgcttcgtgagcacaaataacactggcggagtccagttcaacaagaacctggccgggagatacgccaacacctacaaaaactggttcccggggcccatgggccgaacccagggctggaacctgggctccggggtcaaccgcgccagtgtcagcgccttcgccacgaccaataggatggagctcgagggcgcgagttaccaggtgcccccgcagccgaacggcatgaccaacaacctccagggcagcaacacctatgccctggagaacactatgatcttcaacagccagccggcgaacccgggcaccaccgccacgtacctcgagggcaacatgctcatcaccagcgagagcgagacgcagccggtgaaccgcgtggcgtacaacgtcggcgggcagatggccaccaacaaccagagctccaccactgcccccgcgaccggcacgtacaacctccaggaaatcgtgcccggcagcgtgtggatggagagggacgtgtacctccaaggacccatctgggccaagatcccagagacgggggcgcactttcacccctctccggccatgggcggattcggactcaaacacccaccgcccatgatgctcatcaagaacacgcctgtgcccggaaatatcaccagcctctcggacgtgcccgtcagcagcttcatcacccagtacagcaccgggcaggtcaccgtggagatggagtgggagctcaagaaggaaaactccaagaggtggaacccagagatccagtacacaaacaactacaacgacccccagtttgtggactttgccccggacagcaccggggaatacagaaccaccagacctatcggaacccgataccttacccgacccctttaa

SEQ ID NO: 805 - DNA, 2175 bp, Artificial Sequence
  Description of Artificial Sequence: Synthetic polynucleotide
atgtcttttgttgatcaccctccagattggttggaagaagttggtgaaggtcttcgcgagtttttgggccttgaagcgggcccaccgaaaccaaaacccaatcagcagcatcaagatcaagcccgtggtcttgtgctgcctggttataactatctcggacccggaaacggtctcgatcgaggagagcctgccaacagggcagacgaggtcgcgcgagagcacgacatctcgtacaacgagcagcttgaggcgggagacaacccctacctcaagtacaaccacgcgggcgccgagtttcaggagaagctcgccgacgacacatccttcgggggaaacctcggaaaggcagtctttcaggccaagaaaagggttctcgaaccttttggcctggttgaagagggtgctaagacggcccctaccggaaagcggatagacgaccactttccaaaaagaaagaaggcccggaccgaagaggactccaagccttccacctcgtcagacgccgaagctggacccagcggatcccagcagctgcaaatcccagcccaaccagcctcaagtttgggagctgatacaatgtctgcgggaggtggcggcccattgggcgacaataaccaaggtgccgatggagtgggcaatgcctcgggagattggcattgcgattccacgtggatgggggacagagtcgtcaccaagtccacccgaacctgggtgctgcccggctacaacaaccaccagtaccgagagatcaaaagcggctccgtcgacggaagcaacgccaacgcctactttggatacagcaccccctgggggtactttgactttaaccgcttccacagccactggagcccccgagactggcaaagactcatcaacaactactggggcttcagaccccggtccctcagagtcaaaatcttcaacattcaagtcaaagaggtcacggtgcaggactccaccaccaccatcgccaacaacctcacctccaccgtccaagtgtttacggacgacgactaccagctgccctacgtcgtcggcaacgggaccgagggatgcctgccggccttccctccgcaggtctttacgctgccgcagtacggttacgcgacgctgaaccgcgacaacacagaaaatcccaccgagaggagcagcttcttctgcctagagtactttcccagcaagatgctgagaacgggcaacaactttgagtttacctacaactttgaggaggtgcccttccactccagcttcgctcccagtcagaacctcttcaagctggccaacccgctggtggaccagtacttgtaccgcttcgtgagcacaaataatactggcggagtccagttcaacaagaacctggccgggagatacgccaacacctacaaaaactggttcccggggcccatgggccgaacccagggctggaacctgggctccggggtcaaccgcgccagtgtcagcgccttcgccacgaccaataggatggagctcgagggcgcgagttaccaggtgcccccgcagccgaacggcatgaccaacaacctccagggcagcaacacctatgccctggagaacactatgatcttcaacagccagccggcgaacccgggcaccaccgccacgtacctcgagggcaacatgctcatcaccagcgagagcgagacgcagccggtgaaccgcgtggcgtacaacgtcggcgggcagatggccaccaacaaccagagctccaccactgcccccgcgaccggcacgtacaacctccaggaaatcgtgcccggcagcgtgtggatggagagggacgtgtacctccaaggacccatctgggccaagatcccagagacgggggcgcactttcacccctctccggccatgggcggattcggactcaaacacccaccgcccatgatgctcatcaagaacacgcctgtgcccggaaatatcaccagcttctcggacgtgcccgtcagcagcttcatcacccagtacagcaccgggcaggtcaccgtggagatggagtgggagctcaagaaggaaaactccaagaggtggaacccagagatccagtacacaaacaactacaacgacccccagtttgtggactttgccccggacagcaccggggaatacagaaccaccagacctatcggaacccgataccttacccgacccctttaa

SEQ ID NO: 806 - DNA, 2175 bp, Artificial Sequence
  Description of Artificial Sequence: Synthetic polynucleotide
atgtcttttgttgatcaccctccagattggttggaagaagttggtgaaggtcttcgcgagtttttgggccttgaagcgggcccaccgaaaccaaaacccaatcagcagcatcaagatcaagcccgtggtcttgtgctgcctggttataactatctcggacccggaaacggtctcgatcgaggagagcctgtcaacagggcagacgaggtcgcgcgagagcacgacatctcgtacaacgagcagcttgaggcgggagacaacccctacctcaagtacaaccacgcggacgccgagtttcaggagaagctcgccgacgacacatccttcgggggaaacctcggaaaggcagtctttcaggccaagaaaagggttctcgaaccttttggcctggttgaagagggtgctaagacggcccctaccggaaagcggatagacgaccactttccaaaaagaaagaaggcccggaccgaagaggactccaagcctcccacctcgtcagacgccgaagctggacccagcggatcccagcagctgcaaatcccagcccaaccagcctcaagtttgggagctgatacaatgtctgcgggaggtggcggcccattgggcgacaataaccaaggtgccgatggagtgggcaatgcctcgggagattggcattgcgattccacgtggatgggggacagagtcgtcaccaagtccacccgaacctgggtgctgcccagctacaacaaccaccagtaccgagagatcaaaagcggctccgtcgacggaagcaacgccaacgcctactttggatacagcaccccctgggggtactttgactttaaccgcttccacagccactggagcccccgagactggcaaagactcatcaacaactactggggcttcagaccccggtccctcagagtcaaaatcttcaacattcaagtcaaagaggtcacggtgcaggactccgccaccaccatcgccaacaacctcacctccaccgtccaagtgtttacggacgacgactaccagctgccctacgtcgtcggcaacgggaccgagggatgcctgccggccttccctccgcaggtctttacgctgccgcagtacggttacgcgacgctgaaccgcgacaacacagaaaatcccaccgagaggagcagcttcttctgcctagagtactttcccagcaagatgctgagaacgggcaacaactttgagtttacctacaactttgaggaggtgcccttccactccagcttcgctcccagtcagaacctcttcaagctggccaacccgctggtggaccagtacttgtaccgcttcgtgagcacaaataacactggcggagtccagttcaacaagaacctggccgggagatacgccaacacctacaaaaactggttcccggggcccatgggccgaacccagggctggaacctgggctccggggtcaaccgcgccagtgtcagcgccttcgccacgaccaataggatggagctcgagggcgcgagttaccaggtgcccccgcagccgaacggcatgaccaacaacctccagggcagcaacacctatgccctggagaacactatgatcttcaacagccagccggcgaacccgggcaccaccgccacgtacctcgagggcaacatgctcatcaccagcgagagcgagacgcagccggtgaaccgcgtggcgtacaacgtcggcgggcagatggccaccaacaaccagagctccaccactgcccccgcgaccggcacgtacaacctccaggaaatcgtgcccggcagcgtgtggatggagagggacgtgtacctccaaggacccatctgggccaagatcccagagacgggggcgcactttcacccctctccggccatgggcggattcggactcaaacacccaccgcccatgatgctcatcaagaacacgcctgtgcccggaaatatcaccagcttctcggacgtgcccgtcagcagcttcatcacccagtacagcaccgggcaggtcaccgtggagatggagtgggagctcaagaaggaaaactccaagaggtggaacccagagatccagtacacaaacaactacaacgacccccagtttgtggactttgccccggacagcaccggggaatacagaaccaccagacctatcggaacccgataccttacccgacccctttaa

SEQ ID NO: 807 - DNA, 2175 bp, Artificial Sequence
  Description of Artificial Sequence: Synthetic polynucleotide
atgtcttttgttgatcaccctccagattggttggaagaagttggtgaaggtcttcgcgagtttttgggccttgaagcgggcccaccgaaaccaaaacccaatcagcagcatcaagatcaagcccgtggtcttgtgctgcctggttataactatctcggacccggaaacggtctcgatcgaggagagcctgtcaacagggcagacgaggtcgcgcgagagcacgacatctcgtacaacgagcagcttgaggcgggagacaacccctacctcaagtacaaccacgcggacgccgagtttcaggagaagctcgccgacgacacatccttcgggggaaacctcggaaaggcagtctttcaggccaagaaaagggttctcgaaccttttggcctggttgaagagggtgctaagacggcccctaccggaaagcggatagacgaccactttccaaaaagaaagaaggcccggaccgaagaggactccaagccttccacctcgtcagacgccgaagctggacccagcggatcccagcagccgcaaatcccagcccaaccagcctcaagtttgggagctgatacaatgtctgcgggaggtggcggcccattgggcgacaataaccaaggtgccgatggagtgggcaatgcctcgggagattggcattgcgattccacgtggatgggggacagagtcgtcaccaagtccacccgaacctgggtgctgcccagctacaacaaccaccagtaccgagagatcaaaagcggctccgtcgacggaagcaacgccaacgcctactttggatacagcaccccctgggggtactttgactttaaccgcttccacagccactggagcccccgagactggcaaagactcatcaacaactactggggcttcagaccccggtccctcagagtcaaaatcttcaacattcaagtcaaagaggtcacggtgcaggactccaccaccaccatcgccaacaacctcacctccaccgtccaagtgtttacggacgacgactaccagctgccctacgtcgtcggcaacgggaccgagggatgcctgccggccttccctccgcaggtctttacgctgccgcagtacggttacgcgacgctgaaccgcgacaacacagaaaatcccaccgagaggagcagcttcttctgcctagagtactttcccagcaagatgctgagaacgggcaacaactttgagtttacctacaactttgaggaggtgcccttccactccagcttcgctcccagtcagaacctcttcaagctggccaacccgctggtggaccagtacttgtaccgcttcgtgagcacaaataacactggcggagtccagttcaacaagaacctggccgggagatacgccaacacctacaaaaactggttcccggggcccatgggccgaacccagggctggaacctgggctccggggtcaaccgcgccagtgtcagcgccttcgccacgaccaataggatggagctcgagggcgcgagttaccaggtgcccccgcagccgaacggcatgaccaacaacctccagggcagcaacacctatgccctggagaacactatgatcttcaacagccagccggcgaacccgggcaccaccgccacgtacctcgagggcaacatgctcatcaccagcgagagcgagacgcagccggtgaaccgcgtggcgtacaacgtcggcgggcagatggccaccaacaaccagagctccaccactgcccccgcgaccggcacgtacaacctccaggaaatcgtgcccggcagcgtgtggatggagagggacgtgtacctccaaggacccatctgggccaagatcccagagacgggggcgcactttcacccctctccggccatgggcggattcggactcaaacacccaccgcccatgatgctcatcaagaacacgcctgcgcccggaaatatcaccagcttctcggacgtgcccgtcagcagcttcatcacccagtacagcaccgggcaggtcaccgtggagatggagtgggagctcaagaaggaaaactccaagaggtggaacccagagatccagtacacaaacaactacaacgacccccagtttgtggactttgccccggacagcaccggggaatacagaaccaccagacctatcggaacccgataccttacccgacccctttaa

SEQ ID NO: 808 - DNA, 2175 bp, Artificial Sequence
  Description of Artificial Sequence: Synthetic polynucleotide
atgtcttttgttgatcaccctccagattggttggaagaagttggtgaaggtcttcgcgagtttttgggccttgaagcgggcccaccgaaaccaaaacccaatcagcagcatcaagatcaagcccgtggtcttgtgctgcctggttataactatctcggacccggaaacggtctcgatcgaggagagcctgtcaacagggcagacgaggtcgcgcgagagcacgacatctcgtacaacgagcagcttgaggcgggagacaacccctacctcaagtacaaccacgcggacgccgagtttcaggagaagctcgccgacgacacatccttcgggggaaacctcggaaaggcagtctttcaggccaagaaaagggttctcgaaccttttggcctggttgaagagggtgctaagacggcccctaccggaaagcggatagacgaccactttccaaaaagaaagaaggcccggaccgaagaggactccaagcctcccacctcgtcagacgccgaagctggacccagcggatcccagcagctgcaaatcccagcccaaccagcctcaagtttgggagctgatacaatgtctgcgggaggtggcggcccattgggcgacaataaccaaggtgccgatggagtgggcaatgcctcgggagattggcattgcgattccacgtggatgggggacagagtcgtcaccaagtccacccgaacctgggtgctgcccagctacaacaaccaccagtaccgagagatcaaaagcggctccgtcgacggaagcaacgccaacgcctactttggatacagcaccccctgggggtactttgactttaaccgcttccacagccactggagcccccgagactggcaaagactcatcaacaactactggggcttcagaccccggtccctcagagtcaaaatcttcaacattcaagtcaaagaggtcacggtgcaggactccaccaccaccatcgccaacaacctcacctccaccgtccaagtgtttacggacgacgactaccagctgccctacgtcgtcggcaacgggaccgagggatgcctgccggccttccctccgcaggtctttacgctgccgcagtacggttacgcgacgctgaaccgcgacaacacagaaaatcccaccgagaggagcagcttcttctgcctagagtactttcccagcaagatgctgagaacgggcaacaactttgagtttacctacaactttgaggaggtgcccttccactccagcttcgctcccagtcagaacctcttcaagctggccaacccgctggtggaccagtacttgtaccgcttcgtgagcacaaataacactggcggagtccagttcaacaagaacctggccgggagatacgccaacacctacaaaaactggttcccggggcccatgggccgaacccagggctggaacctgggctccggggtcaaccgcgccagtgtcagcgccttcgccacgaccaataggatggagctcgagggcgcgagttaccaggtgcccccgcagccgaacggcatgaccaacaacctccagggcagcaacacctatgccctggagaacactatgatcttcaacagccagccggcgaacccgggcaccaccgccacgtacctcgagggcaacatgctcatcaccagcgagagcgagacgcagccggtgaaccgcgtggcgtacaacgtcggcgggcagatggccaccaacaaccagagctccaccactgcccccgcgaccggcacgtacaacctccaggaaatcgtgcccggcagcgtgtggatggagagggacgtgtacctccaaggacccatctgggccaagatcccagagacgggggcgcactttcacccctctccggccatgggcggattcggactcaaacacccaccgcccatgatgctcatcaagaacacgcctgtgcccggaaatatcaccagcttctcggacgtgcccgtcagcagcttcatcacccagtacagcaccgggcaggtcaccgtggagatggagtgggagctcaagaaggaaaactccaagaggtggaacccagagatccagtacacaaacaactacaacgacccccagtttgtggactttgccccggacagcaccggggaatacagaaccaccagacctatcggaacccgataccttacccgacccctttaa

SEQ ID NO: 809 - DNA, 2175 bp, Artificial Sequence
  Description of Artificial Sequence: Synthetic polynucleotide
atgtcttttgttgatcaccctccagattggttggaagaagttggtgaaggtcttcgcgagtttttgggccttgaagcgggcccaccgaaaccaaaacccaatcagcagcatcaagatcaagcccgtggtcttgtgctgcctggttataactatctcggacccggaaacggtctcgatcgaggagagcctgtcaacagggcagacgaggtcgcgcgagagcacgacatctcgtacaacgagcagcttgaggcgggagacaacccctacctcaagtacaaccacgcggacgccgagtttcaggagaagctcgccgacgacacatccttcgggggaaacctcggaaaggcagtctttcaggccaagaaaagggttctcgaaccttttggcctggttgaagagggtgctaagacggcccctaccggaaagcggatagacgaccactttccaaaaagaaagaaggcccggaccgaagaggactccaagcctcccacctcgtcagacgccgaagctggacccagcggatcccagcagctgcaaatcccagcccaaccagcctcaagtttgggagctgatacaatgtctgcgggaggtggcggcccattgggcgacaataaccaaggtgccgatggagtgggcaatgcctcgggagattggcattgcgattccacgtggatgggggacagagtcgtcaccaagtccacccgaacctgggtgccgcccagctacaacaaccaccagtaccgagagatcaaaagcggctccgtcgacggaagcaacgccaacgcctactttggatacagcaccccctgggggtactttgactttaaccgcttccacagccactggagcccccgagactggcaaagactcatcaacaactactggggcttcagaccccggtccctcagagtcaaaatcttcaacattcaagtcaaagaggtcacggtgcaggactccaccaccaccatcgccaacaacctcacctccaccgtccaagtgtttacggacgacgactaccagctgccctacgtcgtcggcaacgggaccgagggatgcctgccggccttccctccgcaggtctttacgctgccgcagtacggttacgcgacgctgaaccgcgacaacacagaaaatcccaccgagaggagcagcttcttctgcctagagtactttcccagcaagatgctgagaacgggcaacaactttgagtttacctacaactttgaggaggtgcccttccactccagcttcgctcccagtcagaacctcttcaagctggccaacccgctggtggaccagtacttgtaccgcttcgtgagcacaaataacactggcggagtccagttcaacaagaacctggccgggagatacgccaacacctacaaaaactggttcccggggcccatgggccgaacccagggctggaacctgggctccggggtcaaccgcgccagtgtcagcgccttcgccacgaccaataggatggagctcgagggcgcgagttaccaggtgcccccgcagccgaacggcatgaccaacaacctccagggcagcaacacctatgccctggagaacactatgatcttcaacagccagccggcgaacccgggcaccaccgccacgtacctcgagggcaacatgctcatcaccagcgagagcgagacgcagccggtgaaccgcgtggcgtacaacgtcggcgggcagatggccaccaacaaccagagctccaccactgcccccgcgaccggcacgtacaacctccaggaaatcgtgcccggcagcgtgtggatggagagggacgtgtacctccaaggacccatctgggccaagatcccagagacgggggcgcactttcacccctctccggccatgggcggattcggactcaaacacccaccgcccatgatgctcatcaagaacacgcctgtgcccggaaatatcaccagcttctcggacgtgcccgtcagcagcttcatcacccagtacagcaccgggcaggtcgccgtggagatggagtgggagctcaagaaggaaaactccaagaggtggaacccagagatccagtacacaaacaactacaacgacccccagtttgtggactttgccccggacagcaccggggaatacagaaccaccagacctatcggaacccgataccttacccgacccctttaa

SEQ ID NO: 810 - DNA, 2175 bp, Artificial Sequence
  Description of Artificial Sequence: Synthetic polynucleotide
atgtcttttgttgatcaccctccagattggttggaagaagttggtgaaggtcttcgcgagtttttgggccttgaagcgggcccaccgaaaccaaaacccaatcagcagcatcaagatcaagcccgtggtcttgtgctgcctggttataactatctcggacccggaaacggtctcgatcgaggagagcctgtcaacagggcagacgaggtcgcgcgagagcacgacatctcgtacaacgagcagcttgaggcgggagacaacccctacctcaagtacaaccacgcggacgccgagtttcaggagaagctcgccgacgacacatccttcgggggaaacctcggaaaggcagtctttcaggccaagaaaagggttctcgaaccttttggcctggttgaagagggtgctaagacggcccctaccggaaagcggatagacgaccactttccaaaaagaaagaaggcccggaccgaagaggactccaagccttccacctcgtcagacgccgaagctggacccagcggatcccagcagctgcaaatcccagcccaaccagcctcaagtttgggagctgatacaatgtctgcgggaggtggcggcccattgggcgacaataaccaaggtgccgatggagtgggcaatgcctcgggagattggcattgcgattccacgtggatgggggacagagtcgtcaccaagtccacccgaacctgggtgctgcccagctacaacaaccaccagtaccgagagatcaaaagcggctccgtcgacggaagcaacgccaacgcctactttggatacagcaccccctgggggtactttgactttaaccgcttccacagccactggagcccccgagactggcaaagactcatcaacaactactggggcttcagaccccggtccctcagagtcaaaatcttcaacattcaagtcaaagaggtcacggtgcaggactccaccaccaccatcgccaacaacctcacctccaccgtccaagtgtttacggacgacgactaccagctgccctacgtcgtcggcaacgggaccgagggatgcctgccggccttccctccgcaggtctttacgctgccgcagtacggttacgcgacgctgaaccgcgacaacacagaaaatcccaccgagaggagcagcttcttctgcctagagtactttcccagcaagatgctgagaacgggcaacaactttgagtttacctacaactttgaggaggtgcccttccactccagcttcgctcccagtcagaacctcttcaagctggccaacccgctggtggaccagtacttgtaccgcttcgtgagcacaaataacactggcggagtccagttcaacaagaacctggccgggagatacgccaacacctacaaaaactggttcccggggcccatgggccgaacccagggctggaacctgggctccggggtcaaccgcgccagtgtcagcgccttcgccacgaccaataggatggagctcgagggcgcgagttaccaggtgcccccgcagccgaacggcatgaccaacaacctccagggcagcaacacctatgccctggagaacactatgatcttcaacagccagccggcgaacccgggcaccaccgccacgtacctcgagggcaacatgctcatcaccagcgagagcgagacgcagccggtgaaccgcgtggcgtacaacgtcggcgggcagatggccaccaacaaccagagctccaccactgcccccgcgaccggcacgtacaacctccaggaaatcgtgcccggcagcgtgtggatggagagggacgtgtacctccaaggacccatctgggccaagatcccagagacgggggcgcactttcacccctctccggccatgggcggattcggactcaaacacccaccgcccatgatgctcatcaagaacacgcctgcgcccggaaatatcaccagcttctcggacgtgcccgtcagcagcttcatcacccagtacagcaccgggcaggtcaccgtggagatggagtgggagctcaagaaggaaaactccaagaggtggaacccagagatccagtacacaaacaactacaacgacccccagtttgtggactttgccccggacagcaccggggaatacagaaccaccagacctatcggaacccgataccttacccgacccctttaa

SEQ ID NO: 811 - DNA, 2175 bp, Artificial Sequence
  Description of Artificial Sequence: Synthetic polynucleotide
atgtcttttgttgatcaccctccagattggttggaagaagttggtgaaggtcttcgcgagtttttgggccttgaagcgggcccaccgaaaccaaaacccaatcagcagcatcaagatcaagcccgtggtcttgtgctgcctggttataactatctcggacccggaaacggtctcgatcgaggagagcctgtcaacagggcagacgaggtcgcgcgagagcacgacatctcgtacaacgagcagcttgaggcgggagacaacccctacctcaagtacaaccacgcggacgccgagtttcaggagaagctcgccgacgacacatccttcgggggaaacctcggaaaggcagtctttcaggccaagaaaagggttctcgaaccttttggcctggctgaagagggtgctaagacggcccctaccggaaagcggatagacgaccactttccaaaaagaaagaaggcccggaccgaagaggactccaagccttccacctcgtcagacgccgaagctggacccagcggatcccagcagctgcaaatcccagcccaaccagcctcaagtttgggagctgatacaatgtctgcgggaggtggcggcccattgggcgacaataaccaaggtgccgatggagtgggcaatgcctcgggagattggcattgcgattccacgtggatgggggacagagtcgtcaccaagtccacccgaacctgggtgctgcccagctacaacaaccaccagtaccgagagatcaaaagcggctccgtcgacggaagcaacgccaacgcctactttggatacagcaccccctgggggtactttgactttaaccgcttccacagccactggagcccccgagactggcaaagactcatcaacaactactggggcttcagaccccggtccctcagagccaaaatcttcaacattcaagtcaaagaggtcacggtgcaggactccaccaccaccatcgccaacaacctcacctccaccgtccaagtgtttacggacgacgactaccagctgccctacgtcgtcggcaacgggaccgagggatgcctgccggccttccctccgcaggtctttacgctgccgcagtacggttacgcgacgctgaaccgcgacaacacagaaaatcccaccgagaggagcagcttcttctgcctagagtactttcccagcaagatgctgagaacgggcaacaaccttgagtttacctacaactttgaggaggtgcccttccactccagcttcgctcccagtcagaacctcttcaagctggccaacccgctggtggaccagtacttgtaccgcttcgtgagcacaaataacactggcggagtccagttcaacaagaacctggccgggagatacgccaacacctacaaaaactggttcccggggcccatgggccgaacccagggctggaacctgggctccggggtcaaccgcgccagtgtcagcgccttcgccacgaccaataggatggagctcgagggcgcgagttaccaggtgcccccgcagccgaacggcatgaccaacaacctccagggcagcaacacctatgccctggagaacactatgatcttcaacagccagccggcgaacccgggcaccaccgccacgtacctcgagggcaacatgctcatcaccagcgagagcgagacgcagccggtgaaccgcgtggtgcacaacgtcggcgggcagatggccaccaacaaccagagctccaccactgcccccgcgaccggcacgtacaacctccaggaaatcgtgcccggcagcgtgtggatggagagggacgtgtacctccaaggacccatctgggccaagatcccagagacgggggcgcactttcacccctctccggccatgggcggattcggactcaaacacccaccgcccatgatgctcatcaagaacacgcctgtgcccggaaatatcaccagcttctcggacgtgcccgtcagcagcttcatcacccagtacagcaccgggcaggtcaccgtggagatggagtgggagctcaagaaggaaaactccaagaggtggaacccggagatccagtacacaaacaactacaacgacccccagtttgtggactttgccccggacagcaccggggaatacagaaccaccagacctatcggaacccgataccttacccgacccctttaa

SEQ ID NO: 812 - DNA, 2175 bp, Artificial Sequence
  Description of Artificial Sequence: Synthetic polynucleotide
atgtcttttgttgatcaccctccagattggttggaagaagttggtgaaggtcttcgcgagtttttgggccttgaagcgggcccaccgaaaccaaaacccaatcagcagcatcaagatcaagcccgtggtcttgtgctgcctggttataactatctcggacccggaaacggtctcgatcgaggagagcctgtcaacagggcagacgaggtcgcgcgagagcacgacatctcgtacaacgagcagcttgaggcgggagacaacccctacctcaagtacaaccacgcggacgccgagtttcaggagaagctcgccgacgacacatccttcgggggaaacctcggaaaggcagtctttcaggccaagaaaagggttctcgaaccttttggcctggttgaagagggtgctaagacggcccctaccggaaagcggatagacgaccactttccaaaaagaaagaaggcccggaccgaagaggactccaagccttccacctcgtcagacgccgaagctggacccagcggatcccagcagctgcaaatcccagcccaaccagcctcaagtttgggagctgatacaatgtctgcgggaggtggcggcccattgggcgacaataaccaaggtgccgatggagtgggcaatgcctcgggagattggcattgcgattccacgtggatgggggacagagtcgtcaccaagtccacccgaacctgggtgctgcccagctacaacaaccaccagtaccgagagatcaaaagcggctccgtcgacggaggcaacgccaacgcctactttggatacagcaccccctgggggtactttgactttaaccgcttccacagccactggagcccccgggactggcaaagactcatcaacaactactggggcttcagaccccggtccctcagagtcaaaatcttcaacattcaagtcaaagaggtcacggtgcaggactccaccaccaccatcgccaacaacctcacctccaccgtccaagtgtttacggacgacgactaccagctgccctacgtcgtcggcaacgggaccgagggatgcctgccggccttccctccgcaggtctttacgctgccgcagtacggttacgcgacgctgaaccgcgacaacacagaaaatcccaccgagaggagcagcttcttctgcctagagtactttcccagcaagatgctgagaacgggcaacaactttgagtttacctacaactttgaggaggtgcccttccactccagcttcgctcccagtcagaacctcttcaagctggccaacccgctggtggaccagtacttgtaccgcttcgtgagcacaaataacactggcggagtccagttcaacaagaacctggccgggagatacgccaacacctacaaaaactggttcccggggcccatgggccgaacccagggctggaacctgggctccggggtcaaccgcgccagtgtcagcgccttcgccacgaccaataggatggagctcgagggcgcgagttaccaggtgcccccgcagccgaacggcatgaccaacaacctccagggcagcaacacctatgccctggagaacactatgatcttcaacagccagccggcgaacccgggcaccaccgccacgtacctcgagggcaacatgctcatcaccagcgagagcgagacgcagccggtgaaccgcgtggcgtacaacgtcggcgggcagatggccaccaacaaccagagctccaccactgcccccgcgaccggcacgtacaacctccaggaaatcgtgcccggcagcgtgtggatggagagggacgtgtacctccaaggacccatctgggccaagatcccagagacgggggcgcactttcacccctctccggccatgggcggattcggactcaaacacccaccgcccatgatgctcatcaagaacacgcctgcgcccggaaatatcaccagcttctcggacgtgcccgtcagcagcttcatcacccagtacagcaccgggcaggtcaccgtggagatggagtgggagctcaagaagggaaactccaagaggtggaacccagagatccagtacacaaacaactacaacgacccccagtttgtggactttgccccggacagcaccggggaatacagaaccaccagacctatcggaacccgataccttacccgacccctttaa

SEQ ID NO: 813 - DNA, 2175 bp, Artificial Sequence
  Description of Artificial Sequence: Synthetic polynucleotide
atgtcttttgttgatcaccctccagattggttggaagaagttggtgaaggtcttcgcgagtttttgggccttgaagcgggcccaccgaaaccaaaacccaatcagcagcatcaagatcaagcccgtggtcttgtgctgcctggttataactatctcggacccggaaacggtctcgatcgaggagagcctgtcaacagggcagacgaggtcgcgcgagagcacgacatctcgtacaacgagcagcttgaggcgggagacaacccctacctcaagtacaaccacgcggacgccgagtttcaggagaagctcgccgacgacacgtccttcgggggaaacctcggaaaggcagtctttcaggccaagaaaagggttctcgaaccttttggcctggttgaagagggtgctaagacggcccctaccggaaagcggatagacgaccactttccaaaaagaaagaaggcccggaccgaagaggactccaagccttccacctcgtcagacgccgaagctggacccagcggatcccagcagctgcaaatcccagcccaaccagcctcaagtttgggagctgatacaatgtctgcgggaggtggcggcccattgggcgacaataaccaaggtgccgatggagtgggcaatgcctcgggagattggcattgcgattccacgtggatgggggacagagtcgtcaccaagtccacccgaacctgggtgctgcccagctacaacaaccaccagtaccgagagatcaaaagcggctccgtcgacggaagcaacgccaacgcctactttggatacagcaccccctgggggtactttgactttaaccgcttccacagccactggagcccccgagactggcaaagactcatcaacaactactggggcttcagaccccggtccctcagagtcaaaatcttcaacattcaagtcaaagaggtcacggtgcaggactccaccaccaccatcgccaacaacctcacctccaccgtccaagtgtttacggacgacgactaccagctgccctacgtcgtcggcaacgggaccgagggatgcctgccggccttccctccgcaggtctttacgctgccgcagtacggttacgcgacgctgaaccgcgacaacacagaaaatcccaccgagaggagcagcttcttctgcctagagtactttcccagcaagatgctgagaacgggcaacaactttgagtttacctacaactttgaggaggtgcccttccactccagcttcgctcccagtcagaacctcttcaagctggccaacccgctggtggaccagtacttgtaccgcttcgtgagcacaaataacactggcggagtccagttcaacaagaacctggccgggagatacgccaacacctacaaaaactggttcccggggcccatgggccgaacccagggctggaacctgggctccggggtcaaccgcgccagtgtcagcgccttcgccacgaccaataggatggagctcgagggcgcgagttaccaggtgcccccgcagccgaacggcatgaccaacaacctccagggcagcaacacctatgccctggagaacactatgatcttcaacagccagccggcgaacccgggcaccaccgccacgtacctcgagggcaacatgctcatcaccagcgagagcgagacgcagccggtgaaccgcgtggcgtacaacgtcggcgggcagatggccaccaacaaccagagctccaccactgcccccgcgaccggcacgtacaacctccaggaaatcgtgcccggcagcgtgtggatggagagggacgtgtacctccaaggacccatctgggccaagatcccagagacgggggtgcactttcacccctctccggccatgggcggattcggactcaaacacccaccgcccatgatgctcatcaagaacacgcctgtgcccggaaatatcaccagcttctcggacgtgcccgtcagcagcttcatcacccagtacagcaccgggcaggtcaccgtggagatggagtgggagctcaagaaggaaaactccaagaggtggaacccagagatccagtacacaaacaactacaacgacccccagtttgtggactttgccccggacagcaccggggaatacagaaccaccagacctatcggaacccgataccttacccgacccctttaa

SEQ ID NO: 814 - DNA, 2175 bp, Artificial Sequence
  Description of Artificial Sequence: Synthetic polynucleotide
  misc_feature (1652)..(1652): n is a, c, t, or g
atgtcttttgttgatcaccctccagattggttggaagaagttggtgaaggtcttcgcgagtttttgggccttgaagcgggcccaccgaaaccaaaacccaatcagcagcatcaagatcaagcccgtggtcttgtgctgcctggttataactatctcggacccggaaacggtctcgatcgaggagagcctgtcaacagggcagacgaggtcgcgcgagagcacgacatctcgtacaacgagcagcttgaggcgggagacaacccctacctcaagtacaaccacgcggacgccgagtttcaggagaagctcgccgacgacacatccttcgggggaaacctcggaaaggcagtctttcaggccaagaaaagggttctcgaaccttttggcctggttgaagagggtgctaagacggcccctaccggaaagcggatagacgaccactttccaaaaagaaagaaggcccggaccgaggaggactccaagccttccacctcgtcagacgccgaagctggacccagcggatcccagcagctgcaaatcccagcccaaccagcctcaagtttgggagctgatacaatgtctgcgggaggtggcggcccattgggcgacaataaccaaggtgccgatggagtgggcaatgcctcgggagattggcattgcgattccacgtggatgggggacagagtcgtcaccaagtccacccgaacctgggtgctgcccagctacaacaaccaccagtaccgagagatcaaaagcggctccgtcgacggaagcaacgccaacgcctactttggatacagcaccccctgggggtactttgactttaaccgcttccacagccactggagcccccgagactggcaaagactcatcaacaactactggggcttcagaccccggtccctcagagtcaaaatcttcaacattcaagtcaaagaggtcacggtgcaggactccaccaccaccatcgccaacaacctcacctccaccgtccaagtgtttacggacgacgactaccagctgccctacgtcgtcggcaacgggaccgagggatgcctgccggccttccctccgcaggtctttacgctgccgcagtacggttacgcgacgctgaaccgcgacaacacagaaaatcccaccgagaggagcagcttcttctgcctagagtactttcccagcaagatgctgagaacgggcaacaactttgagtttacctacaactttgaggaggtgcccttccactccagcttcgctcccagtcagaacctcttcaagctggccaacccgctggtggaccagtacttgtaccgcttcgtgagcacaaataacactggcggagtccagttcaacaagaacctggccgggagatacgccaacacctacaaaaactggttcccggggcccatgggccgaacccagggctggaacctgggctccggggtcaaccgcgccagtgtcagcgccttcgccacgaccaataggatggagctcgagggcgcgagttaccaggtgcccccgcagccgaacggcatgaccaacaacctccagggcagcaacacctatgccctggagaacactatgatcttcaacagccagccggcgaacccgggcaccaccgccacgtacctcgagggcagcatgctcatcaccancgagagcgagacgcagccggtgaaccgcgtggcgtacaacgtcggcgggcagatggccaccaacaaccagagctccaccactgcccccgcgaccggcacgtacaacctccaggaaatcgtgcccggcagcgtgtggatggagagggacgtgtacctccaaggacccatctgggccaagatcccagagacgggggcgcactttcacccctctccggccatgggcggattcggactcaaacacccaccgcccatgatgctcatcaagaacacgcctgtgcccggaaatatcaccagcttctcggacgtgcccgtcagcagcttcatcacccagtacagcaccgggcaggtcaccgtggagatggagtgggagctcaagaaggaaaactccaagaggtggaacccagagatccagtacacaaacaactacaacgacccccagtttgtggactttgccccggacagcaccggggaatacagaaccaccagacctatcggaacccgataccttacccgacccctttaa

SEQ ID NO: 815 - DNA, 2211 bp, Artificial Sequence
  Description of Artificial Sequence: Synthetic polynucleotide
atggctgctgacggttatcttccagattggctcgaggacaacctttctgaaggcattcgtgagtggtgggctctgaaacctggagtccctcaacccaaagcgaaccaacaacaccaggacaaccgtcggggtcttgtgcttccgggttacaaatacctcggacccggtaacggactcgacaaaggagagccggtcaacgaggcggacgcggcagccctcgaacacgacaaagcttacgaccagcagctcaaggccggtgacaacccgtacctcaagtacaaccacgccgacgccgagtttcaggagcgtcttcaagaagatacgtcttttgggggcaaccttggcagagcagtcttccaggccaaaaagaggatccttgagcctcttggtctggttgaggaagcagctaaaacggctcctggaaagaagaggcctgtagatcagtctcctcaggaaccggactcatcatctggtgttggcaaatcgggcaaacagcctgccagaaaaagactaaatttcggtcagactggcgactcagagtcagtcccagaccctcaacctctcggagaaccaccagcagcccccacaagtttgggatctaatacaatggcttcaggcggtggcgcaccaatggcagacaataacgagggtgccgatggagtgggtaattcctcaggaaattggcattgcgattcccaatggctgggcgacagagtcatcaccaccagcaccagaacctgggccctgcccacttacaacaaccatctctacaagcaaatctccagccaatcaggagcttcaaacgacaaccactactttggctacagcaccccttgggggtattttgactttaacagattccactgccacttctcaccacgtgactggcagcgactcattaacaacaactggggattccggcccaagaaactcagcttcaagctcttcaacatccaagttaaagaggtcacgcagaacgatggcacgacgactattgccaataaccttaccagcacggttcaagtgtttacggactcggagtatcagctcccgtacgtgctcgggtcggcgcaccaaggctgtctcccgccgtttccagcggacgtcttcatggtccctcagtatggatacctcaccctgaacaacggaagtcaagcggtgggacgctcatccttttactgcctggagtacttcccttcgcagatgctaaggactggaaataacttccaattcagctataccttcgaggatgtaccttttcacagcagctacgctcacagccagagtttggatcgcttgatgaatcctcttattgatcagtatctgtactacctgaacagaacgcaaggaacaacctctggaacaaccaaccaatcacggctgctttttagccaggctgggcctcagtctatgtctttgcaggccagaaattggctacctgggccctgctaccggcaacagagactttcaaagactgctaacgacaacaacaacagtaactttccttggacagcggccagcaaatatcatctcaatggccgcgactcgctggtgaatccaggaccagctatggccagtcacaaggacgatgaagaaaaatttttccctatgcacggcaatctaatatttggcaaagaagggacaacggcaagtaacgcagaattagataatgtaatgattacggatgaagaagagattcgtaccaccaatcctgtggcaacagagcagtatggaactgtggcaaataacttgcagagctcaaatacagctcccacgactagaactgtcaatgatcagggggccttacctggcatggtgtggcaagatcgtgacgtgtaccttcaaggacctatctgggcaaagattcctcacacggatggacactttcatccttctcctctgatgggaggctttggactgaaacatccgcctcctcaaatcatgatcaaaaatactccggtaccggcaaatcctccgacgactttcagcccggccaagtttgcttcatttatcactcagtactccactggacaggtcagcgtggaaattgagtgggagctacagaaagaaaacagcaaacgttggaatccagagattcagtacacttccaactacaacaagtctgttaatgtggactttactgtagacactaatggtgtttatagtgaacctcgccctattggaacccggtatctcacacgaaacttgtaa

SEQ ID NO: 816 - DNA, 2205 bp, Artificial Sequence; identical to SEQ ID NO: 84
  Description of Artificial Sequence: Synthetic polynucleotide

SEQ ID NO: 817 - DNA, 2234 bp, Artificial Sequence
  Description of Artificial Sequence: Synthetic polynucleotide
atgtcttttgttgatcaccctccagattggttggaagaagttggtgaaggtcttcgcgagtttttgggccttgaagcgggcccaccgaaaccaaaacccaatcagcagcatcaagatcaagcccgtggtcttgtgctgcctggttataactatctcggacccggaaacggtctcgatcgaggagagcctgtcaacagggcagacgaggtcgcgcgagagcacgacatctcgtacaacgagcagcttgaggcgggagacaacccctacctcaagtacaaccacgcggacgccgagtttcaggagaagctcgccgacgacacatccttcgggggaaacctcggaaaggcagtctttcaggccaagaaaagggttctcgaaccttttggcctggttgaagagggtgctaagacggcccctaccggaaagcggatagacgaccactttccaaaaagaaagaaggctcggaccgaagaggactccaagccttccacctcgtcagacgccgaagctggacccagcggatcccagcagctgcaaatcccagcccaaccagcctcaagtttgggagctgatacaatgtctgcgggaggtggcggcccattgggcgacaataaccaaggtgccgatggagtgggcaatgcctcgggagattggcattgcgattccacgtggatgggggacagagtcgtcaccaagtccacccgaacctgggtgctgcccagctacaacaaccaccagtaccgagagatcaaaagcggctccgtcgacggaagcaacgccaacgcctactttggatacagcaccccctgggggtactttgactttaaccgcttccacagccactggagcccccgagactggcaaagactcatcaacaactactggggcttcagaccccggtccctcagagtcaaaatcttcaacattcaagtcaaagaggtcacggtgcaggactccaccaccaccatcgccaacaacctcacctccaccgtccaagtgtttacggacgacgactaccagctgccctacgtcgtcggcaacgggaccgagggatgcctgccggccttccctccgcaggtctttacgctgccgcagtacggttacgcgacgctgaaccgcgacaacacagaaaatcccaccgagaggagcagcttcttctgcctagagtactttcccagcaagatgctgagaacgggcaacaactttgagtttacctacaactttgaggaggtgcccttccactccagcttcgctcccagtcagaacctgttcaagctggccaacccgctggtggaccagtacttgtaccgcttcgtgagcacaaataacactggcggagtccagttcaacaagaacctggccgggagatacgccaacacctacaaaaactggttcccggggcccatgggccgaacccagggctggaacctgggctccggggtcaaccgcgccagtgtcagcgccttcgccacgaccaataggatggagctcgagggcgcgagttaccaggtgcccccgcagccgaacggcatgaccaacaacctccagggcagcaacacctatgccctggagaacactatgatcttcaacagccagccggcgaacccgggcaccaccgccacgtacctcgagggcaacatgctcatcaccagcgagagcgagacgcagccggtgaaccgcgtggcgtacaacgtcggcgggcagatggccaccaacaaccagagctccaccactgcccccgcgaccggcacgtacaacctccaggaaatcgtgcccggcagcgtgtggatggagagggacgtgtacctccaaggacccatctgggccaagatcccagagacgggggcgcactttcacccctctccggccatgggcggattcggactcaaacacccaccgcccatgatgctcatcaagaacacgcctgtgcccggaaatatcaccagcttctcggacgtgcccgtcagcagcttcatcacccagtacagcaccgggcaggtcaccgtggagatggagtgggagctcaagaaggaaaactccaagaggtggaacccagagatccagtacacaaacaactacaacgacccccagtttgtggactttgccccggacagcaccggggaatacagaaccaccagacctatcggaacccgataccttacccgacccctttaacccattcatgtcgcataccctcaataaaccgtgtattcgtgtcagtaaaatactgcctc

SEQ ID NO: 818 - protein, 736 aa, Artificial Sequence
  Description of Artificial Sequence: Synthetic polypeptide
MAADGYLPDWLEDNLSEGIREWWALKPGVPQPKANQQHQDNRRGLVLPGYKYLGPGNGLDKGEPVNEADAAALEHDKAYDQQLKAGDNPYLKYNHADAEFQERLQEDTSFGGNLGRAVFQAKKRILEPLGLVEEAAKTAPGKKRPVDQSPQEPDSSSGVGKSGKQPARKRLNFGQTGDSESVPDPQPLGEPPAAPTSLGSNTMASGGGAPMADNNEGADGVGNSSGNWHCDSQWLGDRVITTSTRTWALPTYNNHLYKQISSQSGASNDNHYFGYSTPWGYFDFNRFHCHFSPRDWQRLINNNWGFRPKKLSFKLFNIQVKEVTQNDGTTTIANNLTSTVQVFTDSEYQLPYVLGSAHQGCLPPFPADVFMVPQYGYLTLNNGSQAVGRSSFYCPEYFPSQMLRTGNNFQFSYTFEDVPFHSSYAHSQSLDRLMNPLIDQYLYYLNRTQGTTSGTTNQSRLLFSQAGPQSMSLQARNWLPGPCYRQQRLSKTANDNNNSNFPWTAASKYHLNGRDSLVNPGPAMASHKDDEEKFFPMHGNLIFGKEGTTASNAELDNVMITDEEEIRTTNPVATEQYGTVANNLQSSNTAPTTRTVNDQGALPGMVWQDRDVYLQGPIWAKIPHTDGHFHPSPLMGGFGLKHPPPQIMIKNTPVPANPPTTFSPAKFASFITQYSTGQVSVEIEWELQKENSKRWNPEIQYTSNYNKSVNVDFTVDTNGVYSEPHPIGTRYLTRNL

SEQ ID NO: 819 - protein, 736 aa, Artificial Sequence
  Description of Artificial Sequence: Synthetic polypeptide
MAADGYLPDWLEDNLSEGIREWWALKPGVPQPKANQQHQDNRRGLVLPGYKYLGPGNGLDKGEPVNEADAAALEHDKAYDQQLKAGDNPYLKYNHADAEFQERLQEDTSFGGNLGRAVFQAKKRILEPLGLVEEAAKTAPGKKRPVDQSPQEPDSSSGVGKSGKQPARKRLNFGQTGDSESVPDPQPLGEPPAAPTSLGSNTMASGGGAPMADNNEGADGVGNSSGNWHCDSQWLGDRVITTSTRTWALPTYNNHLYKQISSQSGASNDNHYFGYSTPWGYFDFNRFHCHFSPRDWQRLINNNWGFRPKKLSFKLFNIQVKEVTQNDGTTTVANNLTSTVQVFTDSEYQLPYVLGSAHQGCLPPFPADVFMVPQYGYLTLNNGSQAVGRSSFYCLEYFPSQMLRTGNNFQFSYTFEDVPFHSSYAHSQSLDRLMNPLIDQYLYYLNRTQGTTSGTTNQSRLLFSQAGPQSMSLQARNWLPGPCYRQQRLSKTANDNNNSNFPWTAASKYHLNGRDSLVNPGPAMASHKDDEEKFFPMHGNLIFGKEGTTASNAELDNVMITDEEEIRTTNPVATEQYGTVANNLQSSNTAPTTRTVNDQGALPGMVWQDRDVYLQGPIWAKIPHTDGHFHPSPLMGGFGLKHPPPQIMIKNTPVPANPPTTFSPAKFASFITQYSTGQVSVEIEWELQKENSKRWNPEIQYTSNYNKSVNVDFTVDTNGVYSEPRPIGTRYLTRNL

SEQ ID NO: 820 - protein, 736 aa, Artificial Sequence
  Description of Artificial Sequence: Synthetic polypeptide
MAADGYLPDWLEDNLSEGIREWWALKPGVPQPKANQQHQDNRRGLVLPGYKYLGPGNGLDKGEPVNEADAAALEHDKAYDQQLKAGDNPYLKYNHADAEFQERLQEDTSFGGNLGRAVFQAKKRILEPLGLVEEAAKTAPGKKRPVDQSPQEPDSSSGVGKSGKQPARKRLNFGQTGDSESVPDPQPLGEPPAAPTSLGSNTMASGGGAPMADNNEGADGVGNSSGNWHCDSQWLGDRVITTSTRTWALPTYNNHLYKQISGQSGASNDNHYFGYSTPWGYFDFNRFHCHFSPRDWQRLINNNWGFRPKKLSFKLFNIQVKEVTQNDGTTTIANNLTSTVQVFTDSEYQLPYVLGSAHQGCLPPFPADVFMVPQYGYLTLNNGSQAVGRSSFYCLEYFPSQMLRTGNNFQFSYTFEDVPFHSSYAHSQSLDRLMNPLIDQYLYYLNRTQGTTSGTTNQSRLLFSQAGPQSMSLQARNWLPGPCYRQQRLSKTANGNNNSNFPWTAASKYHLNGRDSLVNPGPAMASHKDDEEKFFPMHGNLIFGKEGTTASNAELDNVMITDEEEIRTTNPVATEQCGTVANNLQSSNTAPTTRTVNDQGALPGMVWQDRDVYLQGPIWAKIPHTDGHFHPSPLMGGFGLKHPPPQIMIKNTPVPANPPTTFSPAKFASFITQYSTGQVSVEIEWELQKENSKRWNPEIQYTSNYNKSVNVDFTVDTNGVYSEPRPIGTRYLTRNL

SEQ ID NO: 821 - protein, 736 aa, Artificial Sequence
  Description of Artificial Sequence: Synthetic polypeptide
MAADGYLPDWLEDNLSEGIREWWALKPGVPQPKANQQHQDNRRGLVLPGYKYLGPGNGLDKGEPVNEADAAALEHDKAYDQQLKAGDNPYLKYNHADAEFQERLQEDTSFGGNLGRAVFQAKKRILEPLGLVEGAAKTAPGKKRPVDQSPQEPDSSSGVGKSGKQPARKRLNFGQTGDSESVPDPQPLGEPPAAPTSLGSNTMASGGGAPMADNNEGADGVGNSSGNWHCDSQWLGDRVITTSTRTWALPTYNSHLYKQISSQSGASNDNHYFGYSTPWGYFDFNRFHCHFSPRDWQRLINNNWGFRPKKLSFKLFNIQVKEVTQNDGTTTIANNLTSTVQVFTDSEYQLPYVLGSAHQGCLPPFPADAFMVPQYGYLTLNNGSQAVGRSSFYCLEYFPSQMLRTGNNFQFSYTFEDVPFHGSYAHSQSLDRLMNPLIDQYLYYLNRTQGTTSGTTNQSRLLFSQAGPQSMSLQARNWLPGPCYRQQRLSKTANDNNNSNFPWTAASKYHLNGRDSLVNPGPAMASHKDDEEKFFPMHGNLIFGKEGTTASNAELDNVMITDEEEIRTTNPVATEQYGTVANNLQSSNTAPTTRTVNDQGALPGMVWQDRDVYLQGPIWAKIPHTDGHFHPSPLMGGFGLKHPPPQIMIKNTPVPANPPTTFSPAKFASFITQYSTGQVSVEIEWELQKENSKRWNPEIQYTSNYNKSVNVDFTVDTNGVYSEPRPIGTRYLTRNS

SEQ ID NO: 822 - protein, 736 aa, Artificial Sequence
  Description of Artificial Sequence: Synthetic polypeptide
MAADGYLPDWLEDNLSEGIREWWALKPGVPQPKANQQHQDNRRGLVLPGYKYLGPGNGLDKGEPVNEADAAALEHDKAYDQQLKAGDNPYLKYNHADAEFQERLQEDTSFGGNLGRAVFQAKKRILEPLGLVEGAAKTAPGKKRPVDQSPQEPDSSSGVGKSGKQLARKRLNFGQTGDSESVPDPQPLGEPPAAPTSLGSNTMASGGGAPMADNNEGADGVGNSSGNWHCDSQWLGDRVITTSTRTWALPTYNSHLYKQISGQSGASNDNHYFGYSTPWGYFDFNRFHCHFSPRDWQRLINNNWGFRPKKLSFKLFNIQVKEVTQNDGTTTIANNLTSTVQVFTDSEYQLPYVLGSAHQGCLPPFPADVFMVPQYGYLTLNNGSQAVGRSSFYCLEYFPSQMLRTGNNFQFSYTFEDVPFHSSYAHSQSLDRLMNPLIDQYLYYLNRTQGTTSGTTNQSRLLFSQAGPQSMSLQARNWLPGPCYRQQRLSKTANDNNNSNFPWTAASKYHLNGRDSLVNPGPAMASHKDDEEKFFPMHGNLIFGKEGTTASNAELDNVMITDEEEIRTTNPVATEQYGTVANNLQSSNTAPTTRTVNDQGALPGMVWQDRDVYLQGPIWAKIPHTDGHFHPSPLMGGFGLKHPPPQIMIKNTPVPANPPTTFSPAKFASFITQYSTGQVSVEIEWELQKENSKRWNPEIQYTSNYNKSVNVDFTVDTNGVYSEPRPIGTRYLTRNL

SEQ ID NO: 823 - protein, 736 aa, Artificial Sequence
  Description of Artificial Sequence: Synthetic polypeptide
MAADGYLPDWLEDNLSEGIREWWALKPGVPQPKANQQHQDDRRGLVLPGYKYLGPGNGLDKGEPVNEADAAALEHDKAYDQQLKAGDNPCLKYNHADAEFQERLQEDTSFGGNLGRAVFQAKKRILEPLGLVEEAAKTAPGKKRPVDQSPQEPDSSSGVGKSGKQPARKRLNFGQTGDSESVPDPQPLGEPPAAPTSLGSNTMASGGSAPMADNNEGADGVGNSSGNWHCDSQWLGDRVITTSTRTWALPTYNNHLYKQISSQSGASNDNHYFGYSTPWGYFDFNRFHCHFSPRDWQRLINNNWGFRPKKLSFKLFNIQVKEVTQNDGTTTIANNLTSTVQVFTDSEYQLPYVLGSAHQGCLPPFPADVFMVPQYGYLTLNNGSQAVGRSSFYCLEYFPSQMLRTGNNFQFSYTFEDVPFHSSYAHSQSLDRLMDPLIDQYLYYLNRTQGTTSGTTNQSRLLFSQAGPQSMSLQARNWLPGPCYRQQRLSKTANDNNNSNFPWTAASKYHLNGRDSLVNPGPAMASHKDDEEKFFPMHGNLIFGKEGTTASNAELDNVMITDEEEIRTTNPVATEQYGTVANNLQSSNTAPTTRTVNDQGALPGMVWQDRDVYLQGPIWAKIPHTDGHFHPSPLMGGFGLKHPPPQIMIKNTPVPANPPTTFSPAKFASFITQYSTGQVSVEIEWELQKENSKRWNPEIQYTSNYNKSVNVDFTVDTNGVYSEPRPIGTRYLTRNL

SEQ ID NO: 824 - protein, 736 aa, Artificial Sequence
  Description of Artificial Sequence: Synthetic polypeptide
MAADGYLPDWLEDNLSEGIREWWALKPGVPQPKANQQHQDDRRGLVLPGYKYLGPGNGLDKGEPVNEADAAALEHDKAYDQQLKAGDNPYLKYNHADAEFQERLQEDTSFGGNLGRAVFQAKKRILEPLGLVEEAAKTAPGKKRPVDQSPQEPDSSSGVGKSGKQPARKRLNFGQTGDSESVPDPQPLGEPPAAPTSLGSNTMASGGGAPMADNNEGADGVGNSSGNWHCDSQWLGNRVITTSTRTWALPTYNNHLYKQISSQSGASNDNHYFGYSTPWGYFDFNRFHCHFSPRDWQRLINNNWGFRPKKLSFKLFNIQVKEVTQNDGTTTIANNLTSTVQVFTDSEYQLPYVLGSAHQGCLPPFPADVFMVPQYGYLTLNNGSQAVGRSSFYCLEYFPSQMLRTGNNFQFSYTFEDVPFHSSYAHSQSLDRLMNPLIDQYLYYLNRTQGTTSGTTNQSRLLFSQAGPQSMSLQARNWLPGPCYRQQRLSKTANDNNNSNFPWTAASKYHLNGRDSLVNPGPAMASHKDDEEKFFPMHGNLIFGKEGTTASNAELDNVMITDEEEIRTTNPVATEQYGTVANNLQSSNTAPTTRTVNDQGALPGMVWQDRDVYLQGPIWAKIPHTDGHFHPSPLMGGFGLKHPPPQIMIKNTPVPANPPTTFSPAKFASFITQYSTGQVSVEIEWELQKENSKRWNPEIQYTSNYNKSVNVDFTVDTNGVYSEPRPIGTRYLTRNL

SEQ ID NO: 825 - protein, 736 aa, Artificial Sequence
  Description of Artificial Sequence: Synthetic polypeptide
MAADGYLPDWLEDNLSEGIREWWALKPGVPQPKANQQHQDDRRGLVLPGYKYLGPGNGLDKGEPVNEADAAALEHDKAYDQQLKAGDNPYLKYNHADAEFQERLQEDTSFGGNLGRAVFQAKKRILEPLGLVEEAAKTAPGKKRPVDQSPQEPDSSSGVGKSGKQPARKRLNFGQTGDSESVPDPQPLGEPPAAPTSLGSNTMASGGGAPMADNNEGADGVGNSSGNWHCDSQWLGDRVITTSTRTWALPTYNNHLYKQISSQSGASNDNHYFGYSTPWGYFDFNRFHCHFSPRDWQRLINNNWGFRPKKLSFKLFNIQVKEVTQNDGTTTIANNLTSTVQVFTDSEYQLPYVLGSAHQGCLPPFPADVFMVPQYGYLTLNNGSQAVGRSSFYCLEYFPSQMLRTGNNFQFSYTFEDVPFHSSYAHSQSLDRLMNPLIDQYLYYLNRTQGTTSGTTNQSRLLFSQAGPQSMSLQARNWLPGPCYRQQRLSKTANDNNNSNFPWTAASKYHLNGRDSLVNPGPAMASHKDDEEKFFPMHGNLIFGKEGTTASNAELDNVMITDEEEIRTTNPVATVQYGTVANNLQSSNTAPTTRTVNDQGALPGMVWQDRDVYLQGPIWAKIPHTDGHFHPSPLMGGFGLKHPPPQIMIKNTPVPANPPTTFSPAKFASFITQYSTGQVSVEIEWELQKENSKRWNPEIQYTSNYNKSVNVDFTVDTNGVYSEPRPIGTRYLTRNL

SEQ ID NO: 826 - protein, 735 aa, Artificial Sequence
  Description of Artificial Sequence: Synthetic polypeptide
MAADGYLPDWLEDNLSEGIREWWALKPGVPQPKANQQHQDNRRGLVLPGYKYLGPGNGLDKGEPVNEADAAALEHDKAYDQQLKAGDNPYLKYNHADAEFQERLQEDTSFGGNLGRAVFQAKKGILEPLGLVEEAAKTAPGKKRPVDQSPQEPDSSSGVGKSGKQPARKRLNFGQTGDSESVPDPQPLGEPPAAPTSLGSNTMASGGGAPMADNNEGADGVGNSSGNWHCDSQWLGDRVITTSTRTWALPTYNNHLYKQISSQSGASNDNHYFGYSTPWGYFDFNRFHCHFSPRDWQRLINNNWGFRPKKLSFKLFNIQVKEVTQNDGTTTIANNLTSTVQVFTDSEYQLPYVFGSAHQGCLPPFPADVFMVPQYGYLTLNNGSQAVGRSSFYCLEYFPSQMLRTGNNFQFSYTFEDVPFHSSYAHSQSSDRLMNPLIDQYLYYLNRTQGTTSGTTNQSRLLFSQAGPQSMSLQARNWLPGPCYRQQRLSKTANDNNNSNFPTAASKYHLNGRDSLVNPGPAMASHKDDEEKFFPMHGNLIFGKEGTTASNAELDNVMITDEEEIRTTNPVATEQYGTVANNLQSSNTAPTTRTVNDQGALPGMVWQDRDVYLQGPIWAKIPHTDGHFHPSPLMGGFGLKHPPPQIMIKNTPVPANPPTTFSPAKFASFITQYSTGQVSVEIEWELQKENSKRWNPEIQYTSNYNKSVNVDFTVDTNGVYSEPRPIGTRYLTRNL

SEQ ID NO: 827 - protein, 736 aa, Artificial Sequence
  Description of Artificial Sequence: Synthetic polypeptide
MAADGYLPDWLEDNLSEGIREWWALKPGVPQPKANQQHQDNRRGLVLPGYKYLGPGNGLDEGEPVNEADAAALEHDKAYDQQLKAGDNPYLKYNHADAEFQERLQEDTSFGGNLGRAVFQAKKRILEPLGLVEGAAKTAPGKKRPVDQSPQEPDSSSGVGKSGKQPARKRLNFGQTGDSESVPDPQPLGEPPAAPTSLGSNTMASGGGAPMADNNEGADGVGNSSGNWHCDSQWLGDRVITTSTRTWALPTYNSHLYKQISSQSGASNDNHYFGYSTPWGYFDFNRFHCHFSPRDWQRLINNNWGFRPKKLSFKLFNIQVKEVTQNDGTTTIANNLTSTVQVFTDSEYQLPYVLGSAHQGCLPPFPADVFMVPQYGYLTLNNGSQAVGRSSFYCLEYFPSQMLRTGNNFQFSYTFEDVPFHSSYAHSQSLDRLMNPLIDQYLYYLNRTQGTTSGTTNQSRLLFSQAGPQSMSLQARNWLPGPCYRQQRLSKTANDNNNSNFPWTAASKYHLNGRDSLVNPGPAMASHKDDEEKFFPMHGNLIFGKEGTTASNAELDNVMITDEEEIRTTNPVATEQYGTVANNLQSSNTAPTTRTVNDQGALPGMVWQDRDVYLQGPIWAKIPHTDGHFHPSPLMGGFGLKHPPPQIMIKNTPVPANPPTTFSPAKFASFITQYSTGQVSVEIEWELQKENSKRWNPEIQYTSNYNKSVNVDFTVDTNGVYSEPRPIGTRYLTRNL

SEQ ID NO: 828 - protein, 668 aa, Artificial Sequence
  Description of Artificial Sequence: Synthetic polypeptide
MAADGYLPDWLEDNLSEGIREWWALKPGVPQPKANQQHQDNRRGLVLPGYKYLGPGNGLDKGEPVNEADAAALEHDKAYDQQLKAGDNPYLKYNHADAEFQERLQEDTSFGGNLGRAVFQAKKRILEPLGLVEGAAKTAPGKKRPVDQSPQEPDSSSGVGKSGKQPARKRLNFGQTGDSESVPDPQPLGEPPAAPTSLGSNTMASGGGAPMADNNEGADGVGNSSGNWHCDSQWLGDRVITTSTRTWALPTYNSHLYKQISSQSGASNDNHYFGYSTPWGILTLTDSTATSHHVTGSDSLTTTGDSGPRNSASSSSTSKLKRSRRTMARRLLPITLPARFKCLRTRSISSRTCSGRRTKAVSRRFQRTPSWSLSMDTSPTTEVKRWDAHPFTAWSTSLRRCGLEITSNSAIPSRMYLFTAATLTARVWIAILLLISICTTTERKEQPLEQPTNHGCFLARLGLSLCLCRPEIGYLGPATGNRDFQRLLTTTTTVTFLGQRPANIISMAATRWIQDQLWPVTRTMKKNFSLCTAIRGPYLAWCGKIVTCTFKDLSGQRFLTRMDTFILLLWEALDNIRLLKSSKILRYRQILRRLSARPSLLHLSLSTPLDRSAWKLSGSYRKKTANVGIQRFSTLPTTTSLLMWTLLTLMVFIVNLALLEPGISHETC

SEQ ID NO: 829 - protein, 734 aa, Artificial Sequence
  Description of Artificial Sequence: Synthetic polypeptide
MTDGYLPDWLEDNLSEGVREWWALQPGAPKPKANQQHQDNARGLVLPGYKYLGPGNGLDKGEPVNAADAAALEHDKAYDQQLKAGDNPYLKYNHADAEFQQRLQGDTSFGGNLGRAVFQAKKRVLEPLGLVEQAGETAPGKKRPLIESPQQPDSSTGIGKKGKQPAKKKLVFEDETGAGDGPPEGSTSGAMSDDSEMRAATGGAAVEGGQGADGVGNASGDWHCDSTWSEGHVTTTSTRTWVLPTYNNHLYKRLGESLQSNTYNGFSTPWGYFDFNRFHCHFSPRDWQRLINNNWGMRPKAMRVKIFNIQVKEVTTSNGETTVANNLTSTVQIFADSSYELPYVMDAGQEGSLPPFPNDVFMVPQYGYCGLVTGNTSQQQTDRNAFYCLEYFPSQMLRTGNNFEITYSFEKVPFHSMYAHSQSLDRLMNPLIDQYLWGLQSTTTGTTLNAGTATTNFTKLRPTNLSNFKKNWLPGPSIKQQGFSKTANQNYKIPATGSDSLIKYETHSTLDGRWSALTPGPPMATAGPADSKFSNSQLIFAGPKQNGNTATVPGTLIFTSEEELAATNATDTDMWGNLPGGDQSNSNLPTVDRLTALGAVPGMVWQNRDIYYQGPIWAKIPHTDGHFHPSPLIGGFGLKHPPPQIFIKNTPVPANPATTFSSTPVNSFITQYSTGQVSVQIDWEIQKERSKRWNPEVQFTSNYGQQNSLLWAPDAAGKYTEPRAIGTRYLTHHL

SEQ ID NO: 830 - protein, 734 aa, Artificial Sequence
  Description of Artificial Sequence: Synthetic polypeptide
MTDGYLPDWLEDNLSEGVREWWALQPGAPKPKANQQHQDNARGLVLPGYKYLGPGNGLDKGEPVNAADAAALEHDKAYDQQLKAGDNPYLKYNHADAEFQQRLQGDTSFGGNLGRAVFQAKKRVLEPLGLVEQAGETAPGKKRPLIESPQQPDSSTGIGKKGKQPAKKKLVFEDETGAGDGPPEGSTSGAMSDDSEMRAAAGGAAVEGGQGADGVGNASGDWHCDSTWSEGHVTTTSTRTWVLPTYNNHLYKRLGESLQSNTYNGFSTPWGYFDFNRFHCHFLPRDWQRLINNNWGVRPKAMRVKIFNIQVKEVTTSNGETTVANNLTSTVQIFADSSYELPYVMDAGQEGSLPPFPNDVFMVPQYGYCGLVTGDTSQQQTDRNAFYCLEYFPSQMLRTGNNFEITYSFEKVPFHSMYAHSQSLDRLMNPLIDQYLWGLQSTTTGTTLNAGTATTNFTKLRPTNFSNFKKNWLPGPSIKQQGFSKTANQNYKIPATGSDSLIKYETHSTLDGRWSALTPGPPMATAGPADSKFSNSQLIFAGPKQNGNTATVPGTLIFTSEEELAATNATDTDMWGNLPGGDQSNSNLPTVDRLTALGAVPGMVWQNRDIYYQGPIWAKIPHTDGHFHPSPLIGGFGLKHPPPQIFIKNTPVPANPATTFSSTPVNSFITQYSTGQVSVQIDWEIQKERSKRWNPEVQFTSNYGQQNSLLWAPDAAGKYTEPRAIGTRYLTHHL

SEQ ID NO: 831 - protein, 734 aa, Artificial Sequence
  Description of Artificial Sequence: Synthetic polypeptide
MTDGYLPDWLEDNLSEGVREWWALQPGAPKPKANQQHQDNARGLVLPGYKYLGPGNGLDEGEPVNAADAAALEHDKAYDQQLKAGDNPYLKYNHADAEFQQRLQGDTSFGGNLGRAVFQAKKRVLEPLGLVEQAGETAPGKKRPLIESPQQPDSSTGIGKKGKQPAKKKLVFEDETGAGDGPPEGSTSGAMSDDSEMRAAAGGAAVEGGQGADGVGNASGDWHCDSTWSEGHVTTTSTRTWVLPTYNNHLYKRLGESLQSNTYNGFSTPWGYFDFNRFHCHFSPRDWQRLINNNWGMRPKAMRVKIFNIQVKEVTTSNGETTVANNLTSTVQIFADSSYELPYVMDAGQEGSLPPFPNDVFMVPQYGYCGLVTGNTSQQQTDRNAFYCLEYFPSQMLRTGNNFEITYSFEKVPFHSMYAHSQSLDRLMNPLIDQYLWGLQSTTTGTTLNAGTATTNFTKLRPTNFSNFKKNWLPGPSIKQQGFSKTANQNYKIPATGSDSLIKYETHSTLDGRWSALTPGPPMATAGPADSKFSNSQLIFAGPKQNGNTATVPGTLIFTSEEELAATNATDTDMWGNLPGGDQSNSNLPTVDRLTALGAVPGMVWQNRDIYYQGPIWAKIPHTDGHFHPSPLIGGFGLKHPPPQIFIKNTPVPANPATTFSSTPVNSFITQYSTGQVSVQIDWEIQKERSKRWNPEVQFTSNYGQQNSLLWAPDAAGKYTEPRAIGTRYLTHHL

SEQ ID NO: 832 - protein, 734 aa, Artificial Sequence
  Description of Artificial Sequence: Synthetic polypeptide
MTDGYLPDWLEDNLSEGVREWWALQPGAPKPKANQQHQDNARGLVLPGYKYLGPGNGLDKGEPVNAADAAALEHDKAYDQQLKAGDNPYLKYNHADAEFQQRLQGDTSFGGNLGRAVFQAKKRVLEPLGLVEQAGETAPGKKRPLIESPQQPDSSTGIGKKGKQPAKKKLVFEDGTGAGDGPPEGSTSGAMSDDSEMRAAAGGAAVEGGQGADGVGNASGDWHCDSTWSEGHVTTTSTRTWVLPTYNNHLYKRLGESLQSNTYNGFPTPWGYFDFNRFHCHFSPRDWQRLINNNWGMRPKAMRVKIFNIQVKEVTTSNGETTAANNLTSTVQIFADSSYELPYVMDAGQEGSLPPFPNDVFMVPQYGYCGLVTGNTSQQQTDRNAFYCLEYFPSQMLRTGNNFEITYSFEKVPFHSMYAHSQSLDRLMNPLIDQYLWGLQSTTTGTTLNAGTATTNFTKLRPTNFSNFKKNWLPGPSIKQQGFSKTANQNYKIPATGSDSLIKYETHSTLDGRWSALTPGPPMATAGPADSKFSNSQLIFAGPKQNGNTATVPGTLIFTSEEELAATNATDTDMWGNLPGGDQSNSNLPTVDRLTALGAVPGMVWQNRDIYYQGPIWAKIPHTDGHFHPSPLIGGFGLKHPPPQIFIKNTPVPANPATTFSSTPVNSFITQYSTGQVSVQIDWEIQKERSKRWNPEVQFTSNYGQQNSLLWAPDAAGKYTEPRAIGTRYLTHHL

SEQ ID NO: 833 - protein, 734 aa, Artificial Sequence
  Description of Artificial Sequence: Synthetic polypeptide
MTDGYLPDWLEDNLSEGVREWWALQPGAPKPKANQQHQDNARGLVLPGYKYLGPGNGLDKGEPVNAADAAALEHDKAYDQQLKAGDNPYLKYNHADAEFQQRLQGDTSFGGNLGRAVFQAKKRVLEPLGLVEQAGETAPGKKRPLIESPQQPDSSTGIGKKGKQPAKKKLVFEDETGAGDGPPEGSTSGAMSDDSEMRAAAGGAAVEGGQGADGVGNASGDWHCDSTWSEGHVTTTSTRTWVLPTYNNHLYKRLGESLQSNTYNGFSTPWGYFDFNRFHCHFSPRDWQRLINNNWGMRPKAMRVKIFNIQVKEVTTSNGETTVANNLTSTVQIFADSSYELPYVMDAGQEGSLPPFPNDVFMVPQYGYRGLVTGNTSQQQTDRNAFYCLEYFPSQMLRTGNNFEITYSFEKVPFHSMYAHSQSLDRLMNPLIDQYLWGLQSTTTGTTLNAGTATTNFTKLRPTNFSNFKKNWLPGPSIKQQGFSKTANQNYKIPATGSDSLIKYETHSTLDGRWSALTPGPPMATAGPADSKFSNSQLIFAGPKQNGNTATVPGTLIFTSEEELAATNATDTDMWGNLPGGDQSNSNLPTVDRLTALGAVPGMVWQNRDIYYQGPIWAKIPHTDGHFHPSPLIGGFGLKHPPPQIFIKNTPVPANPATTFSSTPVNSFITQYSTGQVSVQIDWEIQKERSKRWNPEVQFTSNYGQQNSLLWAPDAAGKYTEPRAIGTRYLTHHL

SEQ ID NO: 834 - protein, 734 aa, Artificial Sequence
  Description of Artificial Sequence: Synthetic polypeptide
MTDGYLPDWLEDNLSEGVREWWALQPGAPKPKANQQHQDNARGLVLQGYKYLGPGNGLDKGEPVNAADAAALEHDKAYDQQLKAGDNPYLKYNHADAEFQQRLQGDTSFGGNLGRAVFQAKKRVLEPLGLVEQAGETAPGKKRPLIESPQQPDSSTGIGKKGKQPAKKKLVFEDETGAGDGPPEGSTSGAMSDDSEMRAAAGGAAVEGGQGADGVGNASGDWHCDSTRSEGHVTTTSTRTWVLPTYNNHLYKRLGESLQSNTYNGFSTPWGYFDFNRFHCHFSPRDWQRLINNNWGMRPKAMRVKIFNIQVKEVTTSNGETTVANNLTSTVQIFADSSYELPYVMDAGQEGSLPPFPNDVFMVPQYGYCGLVTGNTSQQQTDRNAFYCLEYFPSQMLRTGNNFEITYSFEKVPFHSMYAHSQSLDRLMNPLIDQYLWGLQSTTTGTTLNAGTATTNFTKLRPTNFSNFKKNWLPGPSIKQQGFSKTANQNYKIPATGSDSLIKYETHSTLDGRWSARTPGPPMATAGPADSKFSNSQLIFAGPKQNGNTATVPGTLIFTSEEELAATNATDTDMWGNLPGGDQSNSNLPTVDRLTALGAVPGMVWQNRDIYYQGPIWAKIPHTDGHFHPSPLIGGFGLKHPPPQIFIKNTPVPANPATTFSSTPVNSFITQYSTGQVSVQIDWEIQKERSKRWNPEVQFTSNYGQQNSLLWAPDAAGKYTEPRAIGTRYLTHHL

SEQ ID NO: 835 - protein, 724 aa, Artificial Sequence
  Description of Artificial Sequence: Synthetic polypeptide
MSFVDHPPDWLEEVGEGLREFLGLEAGPPKPKPNQQHQDQARGLVLPGYNYLGPGNGLDRGEPVNRADEVAREHDISYNEQLEAGDNPYLKYNHADAEFQERLADDTSFGGNLGKAVFQAKKRVLEPFGLVEEGAKTAPTGKRIDDHFPKRKKARTEEDSKPSTSSDAEAGPSGSQQLQIPAQPASSLGADTMSAGGGGPLGDNNQGADGVGNASGDWHCDSTWMGDRVVTKSTRTWVLPSYNNHQYREIKSGSVDGSNANAYFGYSTPWGYFDFNRFHSHWSPRDWQRLINNYWGFRPRSLRVKIFNIQVKEVTVQDSTTTIANNLTSTVQVFTDDDYQLPYVVGNGTEGCLPAFPPQVFTLPQYGYATLNRDNTENPTERSSFFCLEYFPSKMLRTGNNFEFTYNFEEVPFHSSFAPSQNLFKLANPLVDQYLYRFVSTNNTGGVQFNKNLAGRYANTYKNWFPGPMGRTQGWNLGSGVNRASVSAFATTNRMELEGASYQVPPQPNGMTNNLQGSNTYALENTMIFNSQPANPGTTATYLEGNMLITSESETQPVNRVAYNVGGQMATNNQSSTTAPATGTYNLQEIVPGSVWMERDVYLQGPIWAKIPETEAHFHPSPAMGGFGLKHPPPMMLIKNTPVPGNITSFSDVPVSSFITQYSTGQVTVEMEWELKKENSKRWNPEIQYTNNYNDPQFVDFAPDSTGEYRTTRPIGTRYLTRPL

SEQ ID NO: 836 - protein, 724 aa, Artificial Sequence
  Description of Artificial Sequence: Synthetic polypeptide
MSFVDHPPDWLEEVGEGLREFLGLEAGPPKPKPNQQHQDQARGLVLPGYNYLGPGNGLDRGEPVNRADEVAREHDISYNEQLEAGDNPYLKYNHADAEFQEKLADDTSSGGNLGKAVFQAKKRVLEPFGLVEEGAKTAPTGKRIDDHFPKRKKARTEEDSKPSTSSDAEAGPSGSQQLQIPAQPASSLGADTMSAGGGGPLGDNNQGADGVGNASGDWHCDSTWMGDRVVTKSTRTWVLPSYNNHQYREIKSGSVDGSNANAYFGYSTPWGYFDFNRFHSHWSPRDWQRLINNYWGFRPRSLRVKIFNIQVKEVTVQDSTTTIANNLTSTVQVFTDDDYQLPYVVGNGTEGCLPAFPPQVFTLPQYGYATLNRDNTENPTERSSFFCLEYFPSKMLRTGNNFEFTYNFEEVPFHSSFAPSQNLFKLANPLVDQYLYRFVSTNNTGGVQFNKNLAGRYANTYKNWFPGPMGRTQGWNLGSGVNRASVSAFATTNRMELEGASYQVPPQPNGMTNNLQGSNTYALENTMIFNSQPANPGTTATYLEGNMLITSESETQPVNRVAYNVGGQMATNNQSSTTAPATGTYNLQEIVPGSVWMERDVYLQGPIWAKIPETGAHFHPSPAMGGFGLKHPPPMMLIKNTPVPGNITSFSDVPVSSFITQYSTGQVTVEMEWELKKENSKRWNPEIQYTNNYNDPQFVDFAPDSTGEYRTTRPIGTRYLTRPL

SEQ ID NO: 837 - protein, 724 aa, Artificial Sequence
  Description of Artificial Sequence: Synthetic polypeptide
MSFVDHPPDWLEEVGEGLREFLGLEAGPPKPKPNQQHQDQARGLVLPGYNYLGPGNGLDRGEPVNRADEVAREHDISYNEQLEAGDNPYLKYNHADAEFQEKLADDTSFGGNLGKAVFQAKKRVLEPFGLVEEGAKTAPTGKRIDDHFPKRKKARTEEDSKPSTSSDAEAGPSGSQQLQIPAQPASSLGADTMSAGGGGPLGDNNQGADGVGNASGDWHCDSTWMGDRVVTKSTRTWVLPSYNNHQYREIKSGSVDGSNANAYFGYSTPWGYFDFNRFHSHWSPRDWQRLINNYWGFRPRSLRVKIFNIQVKEVTVQDSTTTIANNLTSTVQVFTDDDYQLPYVVGNGTEGCLPAFPPQVFTLPQYGYATLNRDNTENPTERSSFFCLEYFPSKMLRTGNNFEFTYNFEEVPFHSSFAPSQNLFKLANPLVDQYLYRFVSTNNTGGVQFNKNLAGRYANTYKNWFPGPMGRTQGWNLGSGVNRASVSAFATTNRMELEGASYQVPPQPNGMTNNLQGSNTYALENTMIFNSQPANPGTTATYLEGNMLITSESETQPVNRVAYNVGGQMATNNQSSTTAPATGTYNLQEIVPGSVWMERDVYLQGPIWAKIPETGAHFHPSPAMGGFGLKHPPPMMLIKSTPVPGNITSFSDVPVSSFITQYSTGQVTVEMEWELKKENSKRWNPEIQYTNNYNDPQFVDFAPDSTGEYRTTRPIGTRYLTRPL

SEQ ID NO: 838 - protein, 724 aa, Artificial Sequence
  Description of Artificial Sequence: Synthetic polypeptide
MSFVDHPPDWLEEVGEGLREFLGPEAGPPKPKPNQQHQDQARGLVLPGYNYLGPGNGLDRGEPVNRADEVAREHDISYNEQLEAGDNPYLKYNHADAEFQEKLADDTSFGGNLGKAVFQAKKRVLEPFGLVEEGAKTAPTGKRIDDHFPKRKKVRTEEDSKPSTSSDAEAGPSGSQQLQIPAQPASSLGADTMSAGGGGPLGDNNQGADGVGNASGDWHCDSTWMGDRVVTKSTRTWVPPSYNNHQYREIKSGSVDGSNANAYFGYSTPWGYFDFNRFHSHWSPRDWQRLINNYWGFRPRSLRVKIFNIQVKEVTVQDSTTTIANNLTSTVQVFTDDDYQLPYVVGNGTEGCLPAFPPQVFTLPQYGYATLNRDNTENPTERSSFFCLEYFPSKMLRTGNNFEFTYNFEEVPFHSSFAPSQNLFKLANPLVDQYLYRFVSTNNTGGVQFNKNLAGRYANTYKNWFPGPMGRTQGWNLGSGVNRASVSAFATTNRMELEGASYQVPPQPNGMTNNLQGSNTYALENTMIFNSQPANPGTTATYLEGNMLITSESETQPVNRVACNVGGQMATNNQSSTTAPATGTYNLQEIVPGSVWMERDVYLQGPIWAKIPETGAHFHPSPAMGGFGLKHPPPMMLIKNTPVPGNITSFSDVPVSSFITQYSTGQVTVEMEWELKKENSKRWNPEIQYTNNYNDPQFVDFAPDSTGEYRTTRPIGTRYLTRPL

SEQ ID NO: 839 - protein, 724 aa, Artificial Sequence
  Description of Artificial Sequence: Synthetic polypeptide
MSFVDHPPDWLEEVGEGLREFLGLEAGPPKPKPNQQHQDQARGLVLPGYNYLGPGNGLDRGEPVNRADEVAREHDISYNEQLEAGDNPYLKYNHADAEFQEKLADDTSFGGNLGKAVFQAKKRVLEPFGLVEEGAKTAPTGKRIDDHFPKRKKARTEEDSKPSTSSDAEAGPSGSQQLQIPAQPASSLGADTMSAGGGGPLGDNNQGADGVGNASGDWHCDSTWMGDRVVTKSTRTWVLPSYNNHQYREIKSGSVDGSNANAYFGYSTPWGYFDFNRFHSHWSPRDWQRLINNYWGFRPRSLRVKIFNIQVKEVTVQDSTTTIANNLTSTVQVFTDDDYQLPYVVGNGTEGCLPAFPPQVFTLPQYGYATLNRDNTENPTERSSFFCLEYFPSKMLRTGNNFEFTYNFEEVPFHSSFAPSQNLFKLANPLVDQYLYRFVSTNNTGGVQFNKNLAGRYANTYKNWFPGPMGRTQGWNLGSGVNRASVSAFATTNRMELEGASYQVPPQPNGMTNNLQGSNTYALENTMIFNSQPANPGTTATYLEGNMLITSESETQPVNRVAYNVGGQMATNNQSSTTAPATGAYNLQEIVPGSVWMERDVYLQGPIWAKIPETGAHFHPSPAMGGFGLKHPPPMMLIKNTPVPGNITSFSDVPVSSFITQYSTGQVTVEMEWELKKENSKRWNPEIQYTNNYNDPQFVDFAPDSTGEYRTTRPIGTRYLTRPL

SEQ ID NO: 840 - protein, 724 aa, Artificial Sequence
  Description of Artificial Sequence: Synthetic polypeptide
MSFVDHPPDWLEEVGEGLREFLGLEAGPPKPKPNQQHQDQARGLVLPGYNYLGPGNGLDRGEPVNRADGVAREHDISYNEQLEAGDNPYLKYNHADAEFQEKLADDTSFGGNLGKAVFQAKKRVLEPFGLVEEGAKTAPTGKRIDDHFPKRKKARTEEDSKPSTSSDAEAGPSGSQQLQIPAQPASSLGADTMSAGGGGPLGDNNQGADGVGNASGDWHCDSTWMGDRVVTKSTRTWVLPSYNNHQYREIKSGSVDGSNANAYFGYSTPWGYFDFNRFHSHWSPRDWQRLINNYWGFRPRSLRVKIFNIQVKEVTVQDSTTTIANNLTSTVQAFTDDDYQLPYVVGNGTEGCLPAFPPQVFTLPQYGYATLNRDNTENPTERSSFFCLEYFPSKMLRTGNNFEFTYNFEEVPFHSSFAPSQNLFKLANPLVDQYLYRFVSTNNTGGVQFNKNLAGRYANTYKNWFPGPMGRTQGWNLGSGVNRASVSAFATTNRMELEGASYQVPPQPNGMTNNLQGSNTYALENTMIFNSQPANPGTTATYLEGNMLITSESETQPVNRVAYNVGGQMATNNQSSTTAPATGTYNLQEIVPGSVWMERDVYLQGPIWAKIPETGAHFHPSPAMGGFGLKHPPPMMLIKNTPVPGNITSFSDVPVSSFITQYSTGQVTVEMEWELKKENSKRWNPEIQYTNNYNDPQFVDFAPDSTGEYRTTRPIGTRYLTRPL

SEQ ID NO: 841 - protein, 723 aa, Artificial Sequence
  Description of Artificial Sequence: Synthetic polypeptide
MSFVDHPPDWLEEVGEGLREFLGLEAGPPKPKPNQQHQDQARGLVLPGYNYLGPGNGLDRGEPVNRADEVAREHDISYNEQLEAGDNPYLKYNHADAEFQEKLADDTSFGGNLGKAVFQAKKRVLEPFGLVEEGAKTAPTGKRIDDHFPKRKKARTEEDSKPSTSSDAEAGPSGSQQLQIPAQPASSLGADTMSAGGGGPLGDNNQGADGVGNASGDWHCDSTWMGDRVVTKSTRTWVLPSYNNHQYREIKSGSVDGSNANAYFGYSTPWGYFDFNRFHSHWSPRDWQRLINNYWGFRPRSLRVKIFNIQVKEVTVQDSTTTIANNLTSTVQVFTDDDYQLPYVVGNGTEGCLPAFPPQVFTLPQYGYATLNRDNTENPTERSSFFCLEYFPSKMLRTGNNFEFTYNFEEVPFHSSFAPSQNLFKLANPLVDQYLYRFVSTNNTGGVQFNKNLAGRYANTYKNWFPGPMGRTQGWNLGSGVNRASVSAFATTNRMELEGASYVPPQPNGMTNNLQGSNTYALENTMIFNSQPANPGTTATYLEGNMLITSESETQPVNRVAYNVGGQMATNNQSSTTAPATGTYNLQEIVPGSVWMEGDVYLQGPIWAKIPETGAHFHPSPAMGGFGLKHPPPMMLIKNTPVPGNITSFSDVPVSSFITQYSTGQVTVEMEWELKKENSKRWNPEIQYTNNYNDPQFVDFAPDSTGEYRTTRPIGTRYLTRPL

SEQ ID NO: 842 - protein, 724 aa, Artificial Sequence
  Description of Artificial Sequence: Synthetic polypeptide
MSFVDHPPDWLEEVGEGLREFLGLEAGPPKPKPNQQHQDQARGLVLPGYNYLGPGNGLDRGEPVNRADEVAREHDISYNEQLEAGDNPYLKYNHADAEFQEKLADDTSFGGNLGKAVFQAKKRVLEPFGLVEEGAKTAPTGKRIDDHFPKRKKVRTEEDSKPSTSSDAEAGPSGSQQLQIPAQPASSLGADTMSAGGGGPLGDNNQGADGVGNASGDWHCDSTWMGDRVVTKSTRTWVLPSYNNHQYREIKSGSVDGSNANAYFGYSTPWGYFDFNRFHSHWSPRDWQRLINNYWGFRPRSLRVKIFNIQVKEVTVQDSTTTIANNLTSTVQVFTDDDYQLPYVVGNGTEGCLPAFPPQVFTLPQYGYATLNRDNTENPTERSSFFCLEYFPSKMLRTGNNFEFTYNFEEVPFHSSFAPSQNLFKLANPLVDQYLYRFVSTNNTGGVQFNKNLAGRYANTYKNWFPGPMGRTQGWNLGSGVNRASVSAFATTNRMELEGASYQVPPQPNGMTNNLQGSNTYALENTMIFNSQPANPGTTATYLEGNMLITSESETQPVNRVAYNVGGQMATNNQSSTTAPATGTYNLQEIVPGSVWMERDVYLQGPIWAKIPETGAHFHPSPAMGGFGLKHPPPMMLIKNTPVPGNITSFSDVPVSSFITQYSTGQVTVEMEWELKKENSERWNPEIQYTNNYNDPQFVDFAPDSTGEYRTTRPIGTRYLTRPL

SEQ ID NO: 843 - protein, 724 aa, Artificial Sequence
  Description of Artificial Sequence: Synthetic polypeptide
MSFVDHPPDWLEEVGEGLREFLGLEAGPPKPKPNQQHQDQARGLVLPGYNYLGPGNGLDRGEPVNRADEVAREHDISYSEQLEAGDNPYLKYNHADAEFQEKLADDTSFGGNLGKAVFQAKKRVLEPFGLVEEGAKTAPTGKRIDDHFPKRKKARTEEDSKPSTSSDAEAGPSGSQQLQIPAQPASSLGADTMSAGGGGPLGDNNQGADGVGNASGDWHCDSTWMGDRVVTKSTRTWVLPSYNNHQYREIKSGSVDGSNANAYFGYSTPWGYFDFNRFHSHWSPRDWQRLINNYWGFRPRSLRVKIFNIQVKEVTVQDSTTTIANNLTSTVQVFTDDDYQLPYVVGNGTEGCLPAFPPQVFTLPQYGYATLNRDNTENPTERSSFFCLEYFPSKMLRTGNNFEFTYNFEEVPFHSSFAPSQNLFKLANPLVDQYLYRFVSTNNTGGVQFNKNLAGRYANTYKNWFPGPMGRTQGWNLGSGVNRASVSAFATTNRMELEGASYQVPPQPNGMTNNLQGSNTYALENTMIFNSQPANPGTTATYLEGNMLITSESETQPVNRVAYNVGGQMATNNQSSTTAPATGTYNLQEIVPGSVWMERDVYLQGPIWAKIPETGAHFHPSPAMGGFGLKHPPPMMLIKNTPVPGNITSFSDVPVSSFITQYSTGQVTVEMEWELKKENSKRWNPEIQYTNNYNDPQFVDFAPDSTGEYRTARPIGTRYLTRPL

SEQ ID NO: 844 - protein, 724 aa, Artificial Sequence
  Description of Artificial Sequence: Synthetic polypeptide
MSFVDHPPDWLEEVGEGLREFLGPEAGPPKPKPNQQHQDQARGLVLPGYNYLGPGNGLDRGEPVNRADEVAREHDISYNEQLEAGDNPYLKYNHADAEFQEKLADDTSFGGNLGKAVFQAKKRVLEPFGLVEEGAKTAPTGKRIDDHFPKRKKARTEEDSKPSTSSDAEAGPSGSQQLQIPAQPASSLGADTMSAGGGGPLGDNNQGADGVGNASGDWHCDSTWMGDRVVTKSTRTWVLPSYNNHQYREIKSGSVDGSNANAYFGYSTPWGYFDFNRFHSHWSPRDWQRLINNYWGFRPRSLRVKIFNIQVKEVTVQDSTTTIANNLTSTVQVFTDDDYQLPYVVGNGTEGCLPAFPPQVFTLPQYGYATLNRDNTENPTERSSFFCLEYFPSKMLRTGNNFEFTYNFEEVPFHSSFAPSQNLFKLANPLVDQYLYRFVSTNNTGGVQFNKNLAGRYANTYKNWFPGPMGRTQGWNLGSGVNRASVSAFATTNRMELEGASYQVPPQPNGMTNNLQGSNTYALENTMIFNSQPANPGTTATYLEGNMLITSESETQPVNRVAYNVGGQMTTNNQSSTTAPATGTYNLQEIVPGSVWMERDVYPQGPIWAKIPETGAHFHPSPAMGGFGLKHPPPMMLIKNTPVPGNITSFSDVPVSSFITQYSTGQVTVEMEWELKKENSKRWNPEIQYTNNYNDPQFVDFAPDSTGEYRTTRPIGTRYLTRPL

SEQ ID NO: 845 - protein, 724 aa, Artificial Sequence
  Description of Artificial Sequence: Synthetic polypeptide
MSFVDHPPDWLEEVGEGLREFLGLEAGPPKPKPNQQHQDQARGLVLPGYNYLGPGNGLDRGEPVNRADEVAREHDISYNEQLEAGDNPYLKYNHADAEFQEKLADDTSFGGNLGKAVFQAKKRVLEPFGLVEEGAKTAPTGKRIDDHFPKRKKARTEEDSKPSTSSDAEAGPSGSQQLQIPAQPASSLGADTMSAGGGGPLGDNNQGADGVGNASGDWHCDSTWMGDRVVTKSTRTWVLPSYNNHQYREIKSGSVDGSNANAYFGYSTPWGYFDFNRFHSHWSPRDWQRLINNYWGFRPRSLRVKIFNIQVKEVTVQDSTTTIANNLTSTVQVFTDDDYQLPYVVGNGTEGCLPAFPPQVFTLPQYGYATLNRDNTENPTERSSFLCLEYFPSKMLRTGNNFEFTYNFEEVPFHSSFAPSQNLFKLANPLVDQYLYRFVSTNNTGGVQFNKNLAGRYANTYKNWFPGPMGRTQGWNLGSGVNRASVSAFATTNRMELEGASYQVPPQPNGMTNNLQGSNTYALENTMIFNSQPANPGTTATYLEGNMLITSESETQPVNRVAYNVGGQMATNNQSSTTAPATGTYNLQEIVPGSVWMKRDVYLQGPIWAKIPETGAHFHPSPAMGGFGLKHPPPMMLIKNTPVPGNITSFSDVPVSSFITQYSTGQVTVEMEWELKKENSKRWNPEIQYTNNYNDPQFVDFAPDSTGEYRTTRPIGTRYLTRPL

SEQ ID NO: 846 - protein, 724 aa, Artificial Sequence
  Description of Artificial Sequence: Synthetic polypeptide
MSFVDHPPDWLEEVGEGLREFLGLEAGPPKPKPNQQHQDQARGLVLPGYNYLGPGNGLDRGEPVNRADEVAREHDISYNEQLEAGDNPYLKYNHADAEFQEKLADDTSFGGNLGKAVFQAKKRVLEPFGLVEEGAKTAPTGKRIDDHFPKRKKARTEEDSKPSTPSDAEAGPSGSQQLQIPAQPASSLGADTMSAGGGGPLGDNNQGADGVGNASGDWHCDSTWMGDRVVTKSTRTWVLPSYNNHQYREIKSGSVDGSNANAYFGYSTPWGYFDFNRFHSHWSPRDWQRLINNYWGFRPRSLRVKIFNIQVKEVTVQDSTTTIANNLTSTVQVFTDDDYQLPYVVGNGTEGCLPAFPPQVFTLPQYGYATLNRDNTENPTERSSFFCLEYFPSKMLRTGNNFEFTYNFEEVPFHSSFAPSQNLFKLANPLVDQYLYRFVSTNNTGGVQFNKNLAGRYANTYKNWFPGPMGRTQGWNLGSGVNRASVSAFATTNRMELEGASYQVPPQPNGMTNNLQGSNTYALENTMIFNSQPANPGTTATYLEGNMLITSESETQPVNRVAYNVGGQMATNNQSSTTAPATGTYNLQEIVPGSVWMERDVYLQGPIWAKIPETGAHFHPSPAMGGFGLKHPPPMMLIKNTPVPGNITSFSDVPVSSFITQYSTGQVTVEMEWELKKENSKRWNPEIQYTNNYNDPQFVDFAPDSTGEYRTTRPIGTRYLTRPL

SEQ ID NO: 847 - protein, 724 aa, Artificial Sequence
  Description of Artificial Sequence: Synthetic polypeptide
MSFVDHPPDWLEEVGEGLREFLGLEAGPPKPKPNQQHQDQARGLVLPGYNYLGPGNGLDRGEPVNRADEVAREHDISYNEQLEAGDNPYLKYNHADAEFQEKLADDTSFGGNLGKAVFQAKKRVLEPFGLVEEGAKTAPTGKRIDDHFPKRKKARTEEDSKPSTSSDAEAGPSGSQQLQIPAQPASSLGADTMSAGGGGPLGDNNQGADGVGNASGDWHCDSTWMGDRVVTKSTRTWVLPSYNNHQYREIKSGSVDGSNANAYFGYSTPWGYFDFNRFHSHWSPRDWQRLINNYWGFRPRSLRVKIFNIQVKEVTVQDSTTTIANNLTSTVQVFTDDDYQLPYVVGNGTEGCLPAFPPQVFTLPQYGYATLNRDNTENPTERSSFFCLEYFPSKMLRTGNNFEFTYNFEEVPFHSSFAPSQNLFKLANPLVDQYLYRFVSTNNTGGVQFNKNLAGRYANTHKNWFPGPMGRTQGWNLGSGVNRASVSAFATTNRMELEGASYQVPPQSNGMTNNLRGSNTYALENTMIFNSQPANPGTTATYLEGNMLITSESETQPVNRVAYNVGGQMATNNQSSTTAPATGTYNLQEIVPGSVWMERDVYLQGPIWAKIPETGAHFHPSPAMGGFGLKHPPPMMLIKNTPVPGNITSFSDVPVSSFITQYSTGQVTVEMEWELKKENSKRWNPEIQYTNNYNDPQFVDFAPDSTGEYRTTRPIGTRYLTRPL

SEQ ID NO: 848 - protein, 724 aa, Artificial Sequence
  Description of Artificial Sequence: Synthetic polypeptide
MSFVDHPPDWLEEVGEGLREFLGLEAGPPKPKPNQQHQDQARGLVLPGYNYLGPGNGLDRGEPVNRADEVAREHDISYNEQLEAGDNPYLKYNHADAEFQEKLADDTSFGGNLGKAVFQAKKRVLEPFGLVEEGAKTAPTGKRIDDHFPKRKKARTEEDSKPSTSSDAEAGPSGSQQLQIPAQPASSLGADTMSAGGGGPLGDNNQGADGVGNASGDWHCDSTWMGDRVVTKSTRTWVLPSYNNHQYREIKSGSVDGSNANAYFGYSTPWGYFDFNRFHSHWSPRDWQRLINNYWGFRPRSLRVKIFNIQVKEVTVQDSTTTIANNLTSTVQVFTDDDYQLPYVVGNGTEGCLPAFPPQVFTLPQYGYATLNRDNTENPTERSSFFCLEYFPSKMLRTGNNFEFTYNFEEVPFHSSFAPSQNLFKLANPLVDQYLYRFVSTNNTGGVQFNKNLAGRYANTYKNWFPGPMGRTQGWNLGSGVNRASVSAFATTNRMELEGASYQVPPQPNGMTNNLQGSNTYALENTMIFNSQPANPGTTATYLEGNMLITSESETQPVNRVAYSVGGQMATNNQSSTTAPTTGTYNLQEIVPGSVWMERDVYLQGPIWAKIPETGAHFHPSPAMGGFRLKHPPPMMLIKNTPVPGNITSFSDVPVSSFITQYSTGQVTVEMEWELKKENSKRWNPEIQYTNNYNDPQFVDFAPDSTGEYRTTRPIGTRYLTRPL

SEQ ID NO: 849 - protein, 724 aa, Artificial Sequence
  Description of Artificial Sequence: Synthetic polypeptide
MSFVDHPPDWLEEVGEGLREFLGLEAGPPKPKPNQQHQDQARGLVLPGYNYLGPGNGLDRGEPVNRADEVAREHDISYNEQLEAGDNPYLKYNHADAEFQEKLADDTSFGGNLGKAVFQAKKRVLEPFGLVEEGAKTAPTGKRIDDHFPKRKKARTEEDSKPSTSSDAEAGPSGSQQLQIPAQPASSLGADTMSAGGGGPLGDNNQGADGVGNASGDWHCDSTWMGDRVVTKSTRTWVLPSYNNHQYREIKSGSVDGSNANAYFGYSTPWGYFDFNRFHSHWSPRDWQRLINNYWGFRPRSLRVKIFNIQVKEVTVQDSTTTIANNLTSTVQVFTDDDYQLPYVVGNGTEGCLPAFPPQVFTLPQYGYATLNRDNTENPTERSSFFCLEYFPSKMLRTGNNFEFTYNFEEVPFHSSFAPSQNLFKLANPLVDQYLYRFVSTNNTGGVQFNKNLAGRYANTYKNWFPGPMGRTQGWNLGSGVNRASVSAFAATNRMELEGASYQVPPQPNGMTNNLQGSNTYALENTMIFNSQPANPGTTATYLEGNMLITSESETQPVNRVAYNVGGQMATNNQSSTTAPATGTYNLQEIVPGGVWMERDVYLQGPIWAKIPETGAHFHPSPAMGGFGLKHPPPMMLIKNTPVPGNTTSFSDVPVSSFITQYSTGQVTVEMEWELKKENSKRWNPEIQYTNNYNDPQFVDFAPDSTGEYRTTRPIGTRYLTRPL

SEQ ID NO: 850 - protein, 724 aa, Artificial Sequence
  Description of Artificial Sequence: Synthetic polypeptide
MSFVDHPPDWLEEVGEGLREFLGLEAGPPKPKPNQQHQDQARGLVLPGYNYLGPGNGLDRGEPVNRADEVAREHDISYNEQLEAGDNPYLKYNHADAEFQEKLADDTSFGGNLGKVVFQAKKRVLEPFGLVEEGAKTAPTGKRIDDHFPKRKKARTEEDSKPSTSSDAEAGPSGSQQLQIPAQPASSLGADTMSAGGGGPLGGNNQGADGVGNASGDWHCDSTWMGDRVVTKSTRTWVLPSYNNHQYREIKSGSVDGSNANAYFGYSTPWGYFDFNRFHSHWGPRDWQRLINNYWGFRPRSLRVKIFNIQVKEVTVQDSTTTIANNLTSTVQVFTDDDYQLPYVVGNGTEGCLPAFPPQVFTLPQYGYATLNRDNTENPTERSSFFCLEYFPSKMLRTGNNFEFTYNFEEVPFHSSFAPSQNLFKLANPLVDQYLYRFVSTNNTGGVQFNKNLAGRYANTYKNWFPGPMGRTQGWNLGSGVNRASVSALATTNRMELEGASYQVPPQPNGMTNNLQGSNTYALENTMIFNSQPANPGTTATYLEGNMLITSESETQPVNRVAYNVGGQMATNNQSSTTAPATGTYNLQEIVPGSVWMERDVYLQGPIWAKIPETGAHFHPSPAMGGFGLKHPPPMMLIKNTPVPGNITSFSDVPVSSFITQYSTGQVTVEMEWELKKENSKRWNPEIQYTNNYNDPQFVDFAPDSTGEYRTTRPIGTRYLTRPL

SEQ ID NO: 851 - protein, 723 aa, Artificial Sequence
  Description of Artificial Sequence: Synthetic polypeptide
MSFVDHPPDWLEEVGEGLREFLGLEAGPPKPKPNQQHQDQARGLVLPGYNYLGPGNGLDRGEPVNRADEVAREHDISYNEQLEAGDNPYLKYNHADAEFQEKLADDTSFGGNLGKAVFQAKKRVLEPFGLVEEGAKTAPTGKRIDDHFPKRKKARTEEDSKPSTSSDAEAGPSGSQQLQIPAQPASSLGADTMSAGGGGPLGDNNQGADGVGNASGDWHCDSTWMGDRVVTKSTRTWVLPSYNNHQYREIKSGSVDGSNANAYFGYSTPWGYFDFNRFHSHWSPRDWQRLINNYWGFRPRSLRVKIFNIQVKEVTVQDSTTTIANNLTSTVQVFTDDDYQLPYVVGNGTEGCLPAFPPQVFTLPQYGYATLNRDNTENPTERSSFFCLEYFPSKMLRTGNNFEFTYNFEEVPFHSSFAPSQNLFKLANPLVDQYLYRFVSTNNTGGVQFNKNLAGRYANTYKNWFPGPMGRTQGWNLGSGVNRASVSAFATTNRMELEGASYQVPPQPNGMTNNLQGSNTYALENTMIFNSQPANPGTTATYLEGNMLITSESETQPVNRVAYNVGGQMATNNQSSTTAPATGTYNLQEIVPGSVWMERDVYLQGPIAKIPETGAHFHPSPAMGGFGLKHPPPMMLIKNTPVPGNITSFSDVPVSSFITQYSTGQVTVEMEWELKKENSKRWNPEIQYTNNYNDPQFVDFAPDSTGECRTTRPIGTRYLTRPL

SEQ ID NO: 852 - protein, 724 aa, Artificial Sequence
  Description of Artificial Sequence: Synthetic polypeptide
MSFVDHPPDWLEEVGEGLREFLGLEAGPPKPKPNQQHQDQARGLVLPGYNYLGPGNGLDRGEPVNRADEVAREHDISYNEQLEAGDNPYLKYNHADAEFQEKLADDTSFGGNLGKAVFQAKKRVLEPFGLVEEGAKTAPTGKRIDDHFPKRKKARTEEDSKPSTSSDAEAGPSGSQQLQIPAQPASSLGADTMSAGGGGPLGDNNQGADGVGNASGDWHCDSTWMGDRVVTKSTRTWVLPSYNNHQYREIKSGSVDGSNANAYFGYSTPWGYFDFNRFHSHWSPRDWQRLINNYWGFRPRSLRVKILNIQVKEVTVQDSTTTIANNLTSTVQVFTDDDYQLPYVVGNGTEGCLPAFPPQVFTLPQYGYATLNRDNTENPTERSSFFCLEYFPSKMLRTGNNFEFTYNFEEVPFHSSFAPSQNLFKLANPLVGQYLYRFVSTNNTGGVQFNENLAGRYANTYKNWFPGPMGRTQGWNLGSGVNRASVSAFATTNRMELEGASYQVPPQPNGMTNNLQGSNTYALENTMIFNSQPANPGTTATYLEGNMLITSESETQPVNRVAYNVGGQMATNNQSSTTAPATGTYNLQEIVPGSVWMERDVYLQGPIWAKIPETGAHFHPSPAMGGFGLKHPPPMMLIKNTPVPGNITSFSDVPVSSFITQYSTGQATVEMEWELKKENSKRWNPEIQYTNNYNDPQFVDFAPDSTGEYRTTRPIGTRYLTRPL

SEQ ID NO: 853 - protein, 724 aa, Artificial Sequence
  Description of Artificial Sequence: Synthetic polypeptide
MSFVDHPPDWLEEVGEGLREFLGLEAGPPKPKPNQQHQDQARGLVLPGYNYLGPGNGLDRGEPVNRADEVAREHDISYNEQLEAGDNPYLKYNHADAEFQEKLADDTSFGGNLGKAVFQAKKRVLEPFGLVEEGAKTAPTGKRIDDHFPKRKKARTEEDSKPSTSSDAEAGPSGSQQLQIPAQPASSLGADTMSAGGGGPLGDNNQGADGVGNASGDWHCDSTWMGDRVVTKSTRTWVLPSYNNHQYREIKSGSVDGSNANAYFGYSTPWGYFDFNRFHSHWSPRDWQRLINNYWGFRPRSLRVKIFNIQVKEVTVQDSTTIIANNLTSTVQVFTDDDYQLPYVVGNGTEGCLPAFPPQVFTLPQYGYATLNRDNTENPTERSSFFCLEYFPSKMLRTGNNFEFTYNFEEVPFHSSFAPSQNLFKLANPLVDQYLYRFVSTNNTGGVQFNKNLAGRYANTYKNWFPGPMGRTQGWNLGSGVNRASVSAFATTNRMELEGASYQVPPQPNGMTNNLQGSNTYALENTMIFNSQPANPGTTATYLEGNMLITSESETQPVNRVAYNVGGQMATNNQSSTTAPATGTYNLQEIVPGSVWMERDVYLQGPIWAKIPETGAHFHPSPAMGGFGLKHPPPMMLIKNTPVPGNITSFSDVPVSSFITQYSTGQVTVEMEWELKKENSKRWNPEIQYTNNYNDPQFVDFAPDSTGEYRTTRPIGTRYLTRPL

SEQ ID NO: 854 - protein, 724 aa, Artificial Sequence
  Description of Artificial Sequence: Synthetic polypeptide
MSFVDHPPDWLEEVGEGLREFLGLEAGPPKPKPNQQHQDQARGLVLPGYNYLGPGNGLDRGEPVNRADEVAREHDISYNEQLEAGDNPYLKYNHADAEFQEKLADDTSFGGNLGKAVFQAKKRVLEPFGLVEEGAKTAPTGKRIDDHFPKRKKARTEEDSKPSTSSDAEAGPSGSQQLQIPAQPASSLGADTMSAGGGGPLGDNNQGADGVGNASGDWHCDSTWMGDRVVTKSTRTWVLPSYNNHQYREIKSGSVDGSNANAYFGYSTPWGYFDFNRFHSHWSPRDWQRLINNYWGFRPRSLRVKIFNIQVKEVTVQDSTTTIANNLTSTVQVFTDDDYQLPYVVGNGTEGCLPAFPPQVFTLPQYGYATLNRDNTENPTERSSFFCLEYFPSKMLRTGNNFEFTYNFEEVPFHSSFAPSQNLFKLANPLVDQYLYRFVSTNNTGGVQFNKNLAGRYANTYKNWFPGPMGRTQGWNLGSGVNRASVSAFATTNRMELEGASYQVPPQPNGMTNNLQGSNTYALENTMIFNSQPANPGTTATYLEGNMLITSESETQPVNRVAYNVGGQMATNNQSSTTAPATGTYNLQEIVPGSVWMERDVYLQGPIWAKIPETGAHFHPSPAMGGFGLKHPPPMMLIKNTPVPGNITSLSDVPVSSFITQYSTGQVTVEMEWELKKENSKRWNPEIQYTNNYNDPQFVDFAPDSTGEYRTTRPIGTRYLTRPL

SEQ ID NO: 855 - protein, 724 aa, Artificial Sequence
  Description of Artificial Sequence: Synthetic polypeptide
MSFVDHPPDWLEEVGEGLREFLGLEAGPPKPKPNQQHQDQARGLVLPGYNYLGPGNGLDRGEPANRADEVAREHDISYNEQLEAGDNPYLKYNHAGAEFQEKLADDTSFGGNLGKAVFQAKKRVLEPFGLVEEGAKTAPTGKRIDDHFPKRKKARTEEDSKPSTSSDAEAGPSGSQQLQIPAQPASSLGADTMSAGGGGPLGDNNQGADGVGNASGDWHCDSTWMGDRVVTKSTRTWVLPGYNNHQYREIKSGSVDGSNANAYFGYSTPWGYFDFNRFHSHWSPRDWQRLINNYWGFRPRSLRVKIFNIQVKEVTVQDSTTTIANNLTSTVQVFTDDDYQLPYVVGNGTEGCLPAFPPQVFTLPQYGYATLNRDNTENPTERSSFFCLEYFPSKMLRTGNNFEFTYNFEEVPFHSSFAPSQNLFKLANPLVDQYLYRFVSTNNTGGVQFNKNLAGRYANTYKNWFPGPMGRTQGWNLGSGVNRASVSAFATTNRMELEGASYQVPPQPNGMTNNLQGSNTYALENTMIFNSQPANPGTTATYLEGNMLITSESETQPVNRVAYNVGGQMATNNQSSTTAPATGTYNLQEIVPGSVWMERDVYLQGPIWAKIPETGAHFHPSPAMGGFGLKHPPPMMLIKNTPVPGNITSFSDVPVSSFITQYSTGQVTVEMEWELKKENSKRWNPEIQYTNNYNDPQFVDFAPDSTGEYRTTRPIGTRYLTRPL

SEQ ID NO: 856 - protein, 724 aa, Artificial Sequence
  Description of Artificial Sequence: Synthetic polypeptide
MSFVDHPPDWLEEVGEGLREFLGLEAGPPKPKPNQQHQDQARGLVLPGYNYLGPGNGLDRGEPVNRADEVAREHDISYNEQLEAGDNPYLKYNHADAEFQEKLADDTSFGGNLGKAVFQAKKRVLEPFGLVEEGAKTAPTGKRIDDHFPKRKKARTEEDSKPPTSSDAEAGPSGSQQLQIPAQPASSLGADTMSAGGGGPLGDNNQGADGVGNASGDWHCDSTWMGDRVVTKSTRTWVLPSYNNHQYREIKSGSVDGSNANAYFGYSTPWGYFDFNRFHSHWSPRDWQRLINNYWGFRPRSLRVKIFNIQVKEVTVQDSATTIANNLTSTVQVFTDDDYQLPYVVGNGTEGCLPAFPPQVFTLPQYGYATLNRDNTENPTERSSFFCLEYFPSKMLRTGNNFEFTYNFEEVPFHSSFAPSQNLFKLANPLVDQYLYRFVSTNNTGGVQFNKNLAGRYANTYKNWFPGPMGRTQGWNLGSGVNRASVSAFATTNRMELEGASYQVPPQPNGMTNNLQGSNTYALENTMIFNSQPANPGTTATYLEGNMLITSESETQPVNRVAYNVGGQMATNNQSSTTAPATGTYNLQEIVPGSVWMERDVYLQGPIWAKIPETGAHFHPSPAMGGFGLKHPPPMMLIKNTPVPGNITSFSDVPVSSFITQYSTGQVTVEMEWELKKENSKRWNPEIQYTNNYNDPQFVDFAPDSTGEYRTTRPIGTRYLTRPL

SEQ ID NO: 857 - protein, 724 aa, Artificial Sequence
  Description of Artificial Sequence: Synthetic polypeptide
MSFVDHPPDWLEEVGEGLREFLGLEAGPPKPKPNQQHQDQARGLVLPGYNYLGPGNGLDRGEPVNRADEVAREHDISYNEQLEAGDNPYLKYNHADAEFQEKLADDTSFGGNLGKAVFQAKKRVLEPFGLVEEGAKTAPTGKRIDDHFPKRKKARTEEDSKPSTSSDAEAGPSGSQQPQIPAQPASSLGADTMSAGGGGPLGDNNQGADGVGNASGDWHCDSTWMGDRVVTKSTRTWVLPSYNNHQYREIKSGSVDGSNANAYFGYSTPWGYFDFNRFHSHWSPRDWQRLINNYWGFRPRSLRVKIFNIQVKEVTVQDSTTTIANNLTSTVQVFTDDDYQLPYVVGNGTEGCLPAFPPQVFTLPQYGYATLNRDNTENPTERSSFFCLEYFPSKMLRTGNNFEFTYNFEEVPFHSSFAPSQNLFKLANPLVDQYLYRFVSTNNTGGVQFNKNLAGRYANTYKNWFPGPMGRTQGWNLGSGVNRASVSAFATTNRMELEGASYQVPPQPNGMTNNLQGSNTYALENTMIFNSQPANPGTTATYLEGNMLITSESETQPVNRVAYNVGGQMATNNQSSTTAPATGTYNLQEIVPGSVWMERDVYLQGPIWAKIPETGAHFHPSPAMGGFGLKHPPPMMLIKNTPAPGNITSFSDVPVSSFITQYSTGQVTVEMEWELKKENSKRWNPEIQYTNNYNDPQFVDFAPDSTGEYRTTRPIGTRYLTRPL

SEQ ID NO: 858 - protein, 724 aa, Artificial Sequence
  Description of Artificial Sequence: Synthetic polypeptide
MSFVDHPPDWLEEVGEGLREFLGLEAGPPKPKPNQQHQDQARGLVLPGYNYLGPGNGLDRGEPVNRADEVAREHDISYNEQLEAGDNPYLKYNHADAEFQEKLADDTSFGGNLGKAVFQAKKRVLEPFGLVEEGAKTAPTGKRIDDHFPKRKKARTEEDSKPPTSSDAEAGPSGSQQLQIPAQPASSLGADTMSAGGGGPLGDNNQGADGVGNASGDWHCDSTWMGDRVVTKSTRTWVLPSYNNHQYREIKSGSVDGSNANAYFGYSTPWGYFDFNRFHSHWSPRDWQRLINNYWGFRPRSLRVKIFNIQVKEVTVQDSTTTIANNLTSTVQVFTDDDYQLPYVVGNGTEGCLPAFPPQVFTLPQYGYATLNRDNTENPTERSSFFCLEYFPSKMLRTGNNFEFTYNFEEVPFHSSFAPSQNLFKLANPLVDQYLYRFVSTNNTGGVQFNKNLAGRYANTYKNWFPGPMGRTQGWNLGSGVNRASVSAFATTNRMELEGASYQVPPQPNGMTNNLQGSNTYALENTMIFNSQPANPGTTATYLEGNMLITSESETQPVNRVAYNVGGQMATNNQSSTTAPATGTYNLQEIVPGSVWMERDVYLQGPIWAKIPETGAHFHPSPAMGGFGLKHPPPMMLIKNTPVPGNITSFSDVPVSSFITQYSTGQVTVEMEWELKKENSKRWNPEIQYTNNYNDPQFVDFAPDSTGEYRTTRPIGTRYLTRPL

SEQ ID NO: 859 - protein, 724 aa, Artificial Sequence
  Description of Artificial Sequence: Synthetic polypeptide
MSFVDHPPDWLEEVGEGLREFLGLEAGPPKPKPNQQHQDQARGLVLPGYNYLGPGNGLDRGEPVNRADEVAREHDISYNEQLEAGDNPYLKYNHADAEFQEKLADDTSFGGNLGKAVFQAKKRVLEPFGLVEEGAKTAPTGKRIDDHFPKRKKARTEEDSKPPTSSDAEAGPSGSQQLQIPAQPASSLGADTMSAGGGGPLGDNNQGADGVGNASGDWHCDSTWMGDRVVTKSTRTWVPPSYNNHQYREIKSGSVDGSNANAYFGYSTPWGYFDFNRFHSHWSPRDWQRLINNYWGFRPRSLRVKIFNIQVKEVTVQDSTTTIANNLTSTVQVFTDDDYQLPYVVGNGTEGCLPAFPPQVFTLPQYGYATLNRDNTENPTERSSFFCLEYFPSKMLRTGNNFEFTYNFEEVPFHSSFAPSQNLFKLANPLVDQYLYRFVSTNNTGGVQFNKNLAGRYANTYKNWFPGPMGRTQGWNLGSGVNRASVSAFATTNRMELEGASYQVPPQPNGMTNNLQGSNTYALENTMIFNSQPANPGTTATYLEGNMLITSESETQPVNRVAYNVGGQMATNNQSSTTAPATGTYNLQEIVPGSVWMERDVYLQGPIWAKIPETGAHFHPSPAMGGFGLKHPPPMMLIKNTPVPGNITSFSDVPVSSFITQYSTGQVAVEMEWELKKENSKRWNPEIQYTNNYNDPQFVDFAPDSTGEYRTTRPIGTRYLTRPL

SEQ ID NO: 860 - protein, 724 aa, Artificial Sequence
  Description of Artificial Sequence: Synthetic polypeptide
MSFVDHPPDWLEEVGEGLREFLGLEAGPPKPKPNQQHQDQARGLVLPGYNYLGPGNGLDRGEPVNRADEVAREHDISYNEQLEAGDNPYLKYNHADAEFQEKLADDTSFGGNLGKAVFQAKKRVLEPFGLVEEGAKTAPTGKRIDDHFPKRKKARTEEDSKPSTSSDAEAGPSGSQQLQIPAQPASSLGADTMSAGGGGPLGDNNQGADGVGNASGDWHCDSTWMGDRVVTKSTRTWVLPSYNNHQYREIKSGSVDGSNANAYFGYSTPWGYFDFNRFHSHWSPRDWQRLINNYWGFRPRSLRVKIFNIQVKEVTVQDSTTTIANNLTSTVQVFTDDDYQLPYVVGNGTEGCLPAFPPQVFTLPQYGYATLNRDNTENPTERSSFFCLEYFPSKMLRTGNNFEFTYNFEEVPFHSSFAPSQNLFKLANPLVDQYLYRFVSTNNTGGVQFNKNLAGRYANTYKNWFPGPMGRTQGWNLGSGVNRASVSAFATTNRMELEGASYQVPPQPNGMTNNLQGSNTYALENTMIFNSQPANPGTTATYLEGNMLITSESETQPVNRVAYNVGGQMATNNQSSTTAPATGTYNLQEIVPGSVWMERDVYLQGPIWAKIPETGAHFHPSPAMGGFGLKHPPPMMLIKNTPAPGNITSFSDVPVSSFITQYSTGQVTVEMEWELKKENSKRWNPEIQYTNNYNDPQFVDFAPDSTGEYRTTRPIGTRYLTRPL

SEQ ID NO: 861 - protein, 724 aa, Artificial Sequence
  Description of Artificial Sequence: Synthetic polypeptide
MSFVDHPPDWLEEVGEGLREFLGLEAGPPKPKPNQQHQDQARGLVLPGYNYLGPGNGLDRGEPVNRADEVAREHDISYNEQLEAGDNPYLKYNHADAEFQEKLADDTSFGGNLGKAVFQAKKRVLEPFGLAEEGAKTAPTGKRIDDHFPKRKKARTEEDSKPSTSSDAEAGPSGSQQLQIPAQPASSLGADTMSAGGGGPLGDNNQGADGVGNASGDWHCDSTWMGDRVVTKSTRTWVLPSYNNHQYREIKSGSVDGSNANAYFGYSTPWGYFDFNRFHSHWSPRDWQRLINNYWGFRPRSLRAKIFNIQVKEVTVQDSTTTIANNLTSTVQVFTDDDYQLPYVVGNGTEGCLPAFPPQVFTLPQYGYATLNRDNTENPTERSSFFCLEYFPSKMLRTGNNLEFTYNFEEVPFHSSFAPSQNLFKLANPLVDQYLYRFVSTNNTGGVQFNKNLAGRYANTYKNWFPGPMGRTQGWNLGSGVNRASVSAFATTNRMELEGASYQVPPQPNGMTNNLQGSNTYALENTMIFNSQPANPGTTATYLEGNMLITSESETQPVNRVVHNVGGQMATNNQSSTTAPATGTYNLQEIVPGSVWMERDVYLQGPIWAKIPETGAHFHPSPAMGGFGLKHPPPMMLIKNTPVPGNITSFSDVPVSSFITQYSTGQVTVEMEWELKKENSKRWNPEIQYTNNYNDPQFVDFAPDSTGEYRTTRPIGTRYLTRPL

SEQ ID NO: 862 - protein, 724 aa, Artificial Sequence
  Description of Artificial Sequence: Synthetic polypeptide
MSFVDHPPDWLEEVGEGLREFLGLEAGPPKPKPNQQHQDQARGLVLPGYNYLGPGNGLDRGEPVNRADEVAREHDISYNEQLEAGDNPYLKYNHADAEFQEKLADDTSFGGNLGKAVFQAKKRVLEPFGLVEEGAKTAPTGKRIDDHFPKRKKARTEEDSKPSTSSDAEAGPSGSQQLQIPAQPASSLGADTMSAGGGGPLGDNNQGADGVGNASGDWHCDSTWMGDRVVTKSTRTWVLPSYNNHQYREIKSGSVDGGNANAYFGYSTPWGYFDFNRFHSHWSPRDWQRLINNYWGFRPRSLRVKIFNIQVKEVTVQDSTTTIANNLTSTVQVFTDDDYQLPYVVGNGTEGCLPAFPPQVFTLPQYGYATLNRDNTENPTERSSFFCLEYFPSKMLRTGNNFEFTYNFEEVPFHSSFAPSQNLFKLANPLVDQYLYRFVSTNNTGGVQFNKNLAGRYANTYKNWFPGPMGRTQGWNLGSGVNRASVSAFATTNRMELEGASYQVPPQPNGMTNNLQGSNTYALENTMIFNSQPANPGTTATYLEGNMLITSESETQPVNRVAYNVGGQMATNNQSSTTAPATGTYNLQEIVPGSVWMERDVYLQGPIWAKIPETGAHFHPSPAMGGFGLKHPPPMMLIKNTPAPGNITSFSDVPVSSFITQYSTGQVTVEMEWELKKGNSKRWNPEIQYTNNYNDPQFVDFAPDSTGEYRTTRPIGTRYLTRPL

SEQ ID NO: 863 - protein, 724 aa, Artificial Sequence
  Description of Artificial Sequence: Synthetic polypeptide
MSFVDHPPDWLEEVGEGLREFLGLEAGPPKPKPNQQHQDQARGLVLPGYNYLGPGNGLDRGEPVNRADEVAREHDISYNEQLEAGDNPYLKYNHADAEFQEKLADDTSFGGNLGKAVFQAKKRVLEPFGLVEEGAKTAPTGKRIDDHFPKRKKARTEEDSKPSTSSDAEAGPSGSQQLQIPAQPASSLGADTMSAGGGGPLGDNNQGADGVGNASGDWHCDSTWMGDRVVTKSTRTWVLPSYNNHQYREIKSGSVDGSNANAYFGYSTPWGYFDFNRFHSHWSPRDWQRLINNYWGFRPRSLRVKIFNIQVKEVTVQDSTTTIANNLTSTVQVFTDDDYQLPYVVGNGTEGCLPAFPPQVFTLPQYGYATLNRDNTENPTERSSFFCLEYFPSKMLRTGNNFEFTYNFEEVPFHSSFAPSQNLFKLANPLVDQYLYRFVSTNNTGGVQFNKNLAGRYANTYKNWFPGPMGRTQGWNLGSGVNRASVSAFATTNRMELEGASYQVPPQPNGMTNNLQGSNTYALENTMIFNSQPANPGTTATYLEGNMLITSESETQPVNRVAYNVGGQMATNNQSSTTAPATGTYNLQEIVPGSVWMERDVYLQGPIWAKIPETGVHFHPSPAMGGFGLKHPPPMMLIKNTPVPGNITSFSDVPVSSFITQYSTGQVTVEMEWELKKENSKRWNPEIQYTNNYNDPQFVDFAPDSTGEYRTTRPIGTRYLTRPL

SEQ ID NO: 864 - protein, 724 aa, Artificial Sequence
  Description of Artificial Sequence: Synthetic polypeptide
  MOD_RES (551)..(551): Xaa = any amino acid
MSFVDHPPDWLEEVGEGLREFLGLEAGPPKPKPNQQHQDQARGLVLPGYNYLGPGNGLDRGEPVNRADEVAREHDISYNEQLEAGDNPYLKYNHADAEFQEKLADDTSFGGNLGKAVFQAKKRVLEPFGLVEEGAKTAPTGKRIDDHFPKRKKARTEEDSKPSTSSDAEAGPSGSQQLQIPAQPASSLGADTMSAGGGGPLGDNNQGADGVGNASGDWHCDSTWMGDRVVTKSTRTWVLPSYNNHQYREIKSGSVDGSNANAYFGYSTPWGYFDFNRFHSHWSPRDWQRLINNYWGFRPRSLRVKIFNIQVKEVTVQDSTTTIANNLTSTVQVFTDDDYQLPYVVGNGTEGCLPAFPPQVFTLPQYGYATLNRDNTENPTERSSFFCLEYFPSKMLRTGNNFEFTYNFEEVPFHSSFAPSQNLFKLANPLVDQYLYRFVSTNNTGGVQFNKNLAGRYANTYKNWFPGPMGRTQGWNLGSGVNRASVSAFATTNRMELEGASYQVPPQPNGMTNNLQGSNTYALENTMIFNSQPANPGTTATYLEGSMLITXESETQPVNRVAYNVGGQMATNNQSSTTAPATGTYNLQEIVPGSVWMERDVYLQGPIWAKIPETGAHFHPSPAMGGFGLKHPPPMMLIKNTPVPGNITSFSDVPVSSFITQYSTGQVTVEMEWELKKENSKRWNPEIQYTNNYNDPQFVDFAPDSTGEYRTTRPIGTRYLTRPL

SEQ ID NO: 865 - protein, 736 aa, Artificial Sequence; identical to SEQ ID NO: 39
  Description of Artificial Sequence: Synthetic polypeptide

SEQ ID NO: 866 - protein, 734 aa, Artificial Sequence; identical to SEQ ID NO: 57
  Description of Artificial Sequence: Synthetic polypeptide

SEQ ID NO: 867 - protein, 723 aa, Artificial Sequence
  Description of Artificial Sequence: Synthetic polypeptide
MSFVDHPPDWLEEVGEGLREFLGLEAGPPKPKPNQQHQDQARGLVLPGYNYLGPGNGLDRGEPVNRADEVAREHDISYNEQLEAGDNPYLKYNHADAEFQEKLADDTSFGGNLGKAVFQAKKRVLEPFGLVEEGAKTAPTGKRIDDHFPKRKKARTEEDSKPSTSSDAEAGPSGSQQLQIPAQPASSLGADTMSAGGGPLGDNNQGADGVGNASGDWHCDSTWMGDRVVTKSTRTWVLPSYNNHQYREIKSGSVDGSNANAYFGYSTPWGYFDFNRFHSHWSPRDWQRLINNYWGFRPRSLRVKIFNIQVKEVTVQDSTTTIANNLTSTVQVFTDDDYQLPYVVGNGTEGCLPAFPPQVFTLPQYGYATLNRDNTENPTERSSFFCLEYFPSKMLRTGNNFEFTYNFEEVPFHSSFAPSQNLFKLANPLVDQYLYRFVSTNNTGGVQFNKNLAGRYANTYKNWFPGPMGRTQGWNLGSGVNRASVSAFATTNRMELEGASYQVPPQPNGMTNNLQGSNTYALENTMIFNSQPANPGTTATYLEGNMLITSESETQPVNRVAYNVGGQMATNNQSSTTAPATGTYNLQEIVPGSVWMERDVYLQGPIWAKIPETGAHFHPSPAMGGFGLKHPPPMMLIKNTPVPGNITSFSDVPVSSFITQYSTGQVTVEMEWELKKENSKRWNPEIQYTNNYNDPQFVDFAPDSTGEYRTTRPIGTRYLTRPL

SEQ ID NO: 868 - protein, 743 aa, Artificial Sequence
  Description of Artificial Sequence: Synthetic polypeptide
MAADGYLPDWLEDNLSEGIREWWALKPGAPQPKANQQHQDNARGLVLPGYKYLGPGNGLDKGEPVNAADAAALEHDKAYDQQLKAGDNPYLKYNHADAEFQERLKEDTSFGGNLGRAVFQAKKRLLEPLGLVEEAAKTAPGKKRPVEQSPQEPDSSAGIGKSGAQPAKKRLNFGQTGDTESVPDPQPIGEPPAAPSGVGSLTMASGGGAPVADNNEGADGVGSSSGNWHCDSQWLGDRVITTSTRTWALPTYNNHLYKQISNSTSGGSSNDNAYFGYSTPWGYFDFNRFHCHFSPRDWQRLINNNWGFRPKRLNFKLFNIQVKEVTDNNGVKTIANNLTSTVQVFTDSDYQLPYVLGSAHEGCLPPFPADVFMIPQYGYLTLNDGSQAVGRSSFYCLEYFPSQMLRTGNNFQFSYEFENVPFHSSYAHSQSLDRLMNPLIDQYLYYLSRTINGSGQNQQTLKFSVAGPSNMAVQGRNYIPGPSYRQQRVSTTVTQNNNSEFAWPGASSWALNGRNSLMNPGPAMASHKEGEDRFFPLSGSLIFGKQGTGRDNVDADKVMITNEEEIKTTNPVATESYGQVATNHQSAQTLAVPFKAQAQTGWVQNQGILPGMVWQDRDVYLQGPIWAKIPHTDGNFHPSPLMGGFGMKHPPPQILIKNTPVPADPPTAFNKDKLNSFITQYSTGQVSVEIEWELQKENSKRWNPEIQYTSNYYKSNNVEFAVNTEGVYSEPRPIGTRYLTRNL

SEQ ID NO: 869 - DNA, 2232 bp, Artificial Sequence
  Description of Artificial Sequence: Synthetic polynucleotide
atggctgccgatggttatcttccagattggctcgaggacaaccttagtgaaggaattcgcgagtggtgggctttgaaacctggagcccctcaacccaaggcaaatcaacaacatcaagacaacgctcgaggtcttgtgcttccgggttacaaataccttggacccggcaacggactcgacaagggggagccggtcaacgcagcagacgcggcggccctcgagcacgacaaggcctacgaccagcagctcaaggccggagacaacccgtacctcaagtacaaccacgccgacgccgagttccaggagcggctcaaagaagatacgtcttttgggggcaacctcgggcgagcagtcttccaggccaaaaagaggcttcttgaacctcttggtctggttgaggaagcggctaagacggctcctggaaagaagaggcctgtagagcagtctcctcaggaaccggactcctccgcgggtattggcaaatcgggtgcacagcccgctaaaaagagactcaatttcggtcagactggcgacacagagtcagtcccagaccctcaaccaatcggagaacctcccgcagccccctcaggtgtgggatctcttacaatggcttcaggtggtggcgcaccagtggcagacaataacgaaggtgccgatggagtgggtagttcctcgggaaattggcattgcgattcccaatggctgggggacagagtcatcaccaccagcacccgaacctgggccctgcccacctacaacaatcacctctacaagcaaatctccaacagcacatctggaggatcttcaaatgacaacgcctacttcggctacagcaccccctgggggtattttgacttcaacagattccactgccacttctcaccacgtgactggcagcgactcatcaacaacaactggggattccggcctaagcgactcaacttcaagctcttcaacattcaggtcaaagaggttacggacaacaatggagtcaagaccatcgccaataaccttaccagcacggtccaggtcttcacggactcagactatcagctcccgtacgtgctcgggtcggctcacgagggctgcctcccgccgttcccagcggacgttttcatgattcctcagtacgggtatctgacgcttaatgatggaagccaggccgtgggtcgttcgtccttttactgcctggaatatttcccgtcgcaaatgctaagaacgggtaacaacttccagttcagctacgagtttgagaacgtacctttccatagcagctacgctcacagccaaagcctggaccgactaatgaatccactcatcgaccaatacttgtactatctctctagaactattaacggttctggacagaatcaacaaacgctaaaattcagtgtggccggacccagcaacatggctgtccagggaagaaactacatacctggacccagctaccgacaacaacgtgtctcaaccactgtgactcaaaacaacaacagcgaatttgcttggcctggagcttcttcttgggctctcaatggacgtaatagcttgatgaatcctggacctgctatggccagccacaaagaaggagaggaccgtttctttcctttgtctggatctttaatttttggcaaacaaggtaccggcagagacaacgtggatgcggacaaagtcatgataaccaacgaagaagaaattaaaactactaacccggtagcaacggagtcctatggacaagtggccacaaaccaccagagtgcccaaactttggcggtgccttttaaggcacaggcgcagaccggttgggttcaaaaccaaggaatacttccgggtatggtttggcaggacagagatgtgtacctgcaaggacccatttgggccaaaattcctcacacggacggcaactttcacccttctccgctgatgggagggtttggaatgaagcacccgcctcctcagatcctcatcaaaaacacacctgtacctgcggatcctccaacggccttcaacaaggacaagctgaactctttcatcacccagtattctactggccaagtcagcgtggagatcgagtgggagctgcagaaggaaaacagcaagcgctggaacccggagatccagtacacttccaactattacaagtctaataatgttgaatttgctgttaatactgaaggtgtatatagtgaaccccgccccattggcaccagatacctgactcgtaatctgtaa

SEQ ID NO: 870 - protein, 736 aa, Artificial Sequence
  Description of Artificial Sequence: Synthetic polypeptide
MAADGYLPDWLEDNLSEGIREWWALKPGAPQPKANQQHQDNARGLVLPGYKYLGPGNGLDKGEPVNAADAAALEHDKAYDQQLKAGDNPYLKYNHADAEFQERLKEDTSFGGNLGRAVFQAKKRLLEPLGLVEEAAKTAPGKKRPVEQSPQEPDSSAGIGKSGAQPAKKRLNFGQTGDTESVPDPQPIGEPPAAPSGVGSLTMASGGGAPVADNNEGADGVGSSSGNWHCDSQWLGDRVITTSTRTWALPTYNNHLYKQISNSTSGGSSNDNAYFGYSTPWGYFDFNRFHCHFSPRDWQRLINNNWGFRPKRLNFKLFNIQVKEVTDNNGVKTIANNLTSTVQVFTDSDYQLPYVLGSAHEGCLPPFPADVFMIPQYGYLTLNDGSQAVGRSSFYCLEYFPSQMLRTGNNFQFSYEFENVPFHSSYAHSQSLDRLMNPLIDQYLYYLSRTIQSSQTPRQTLKFSVAGPSNMAVQGRNYIPGPSYRQQRVSTTVTQNNNSEFAWPGASSWALNGRNSLMNPGPAMASHKEGEDRFFPLSGSLIFGKQGTGRDNVDADKVMITNEEEIKTTNPVATESYGQVATNHQSAQAQAQTGWVQNQGILPGMVWQDRDVYLQGPIWAKIPHTDGNFHPSPLMGGFGMKHPPPQILIKNTPVPADPPTAFNKDKLNSFITQYSTGQVSVEIEWELQKENSKRWNPEIQYTSNYYKSNNVEFAVNTEGVYSEPRPIGTRYLTRNL

SEQ ID NO: 871 - protein, 743 aa, Artificial Sequence
  Description of Artificial Sequence: Synthetic polypeptide
MAADGYLPDWLEDNLSEGIREWWALKPGAPQPKANQQHQDNARGLVLPGYKYLGPGNGLDKGEPVNAADAAALEHDKAYDQQLKAGDNPYLKYNHADAEFQERLKEDTSFGGNLGRAVFQAKKRLLEPLGLVEEAAKTAPGKKRPVEQSPQEPDSSAGIGKSGAQPAKKRLNFGQTGDTESVPDPQPIGEPPAAPSGVGSLTMASGGGAPVADNNEGADGVGSSSGNWHCDSQWLGDRVITTSTRTWALPTYNNHLYKQISNSTSGGSSNDNAYFGYSTPWGYFDFNRFHCHFSPRDWQRLINNNWGFRPKRLNFKLFNIQVKEVTDNNGVKTIANNLTSTVQVFTDSDYQLPYVLGSAHEGCLPPFPADVFMIPQYGYLTLNDGSQAVGRSSFYCLEYFPSQMLRTGNNFQFSYEFENVPFHSSYAHSQSLDRLMNPLIDQYLYYLSRTIILGTGTSQTLKFSVAGPSNMAVQGRNYIPGPSYRQQRVSTTVTQNNNSEFAWPGASSWALNGRNSLMNPGPAMASHKEGEDRFFPLSGSLIFGKQGTGRDNVDADKVMITNEEEIKTTNPVATESYGQVATNHQSAQTRTNPEAAQAQTGWVQNQGILPGMVWQDRDVYLQGPIWAKIPHTDGNFHPSPLMGGFGMKHPPPQILIKNTPVPADPPTAFNKDKLNSFITQYSTGQVSVEIEWELQKENSKRWNPEIQYTSNYYKSNNVEFAVNTEGVYSEPRPIGTRYLTRNL

SEQ ID NO: 872 - protein, 743 aa, Artificial Sequence
  Description of Artificial Sequence: Synthetic polypeptide
MAADGYLPDWLEDNLSEGIREWWALKPGAPQPKANQQHQDNARGLVLPGYKYLGPGNGLDKGEPVNAADAAALEHDKAYDQQLKAGDNPYLKYNHADAEFQERLKEDTSFGGNLGRAVFQAKKRLLEPLGLVEEAAKTAPGKKRPVEQSPQEPDSSAGIGKSGAQPAKKRLNFGQTGDTESVPDPQPIGEPPAAPSGVGSLTMASGGGAPVADNNEGADGVGSSSGNWHCDSQWLGDRVITTSTRTWALPTYNNHLYKQISNSTSGGSSNDNAYFGYSTPWGYFDFNRFHCHFSPRDWQRLINNNWGFRPKRLNFKLFNIQVKEVTDNNGVKTIANNLTSTVQVFTDSDYQLPYVLGSAHEGCLPPFPADVFMIPQYGYLTLNDGSQAVGRSSFYCLEYFPSQMLRTGNNFQFSYEFENVPFHSSYAHSQSLDRLMNPLIDQYLYYLSRTIILGTGTSQTLKFSVAGPSNMAVQGRNYIPGPSYRQQRVSTTVTQNNNSEFAWPGASSWALNGRNSLMNPGPAMASHKEGEDRFFPLSGSLIFGKQGTGRDNVDADKVMITNEEEIKTTNPVATESYGQVATNHQSAQNGGTSSSAQAQTGWVQNQGILPGMVWQDRDVYLQGPIWAKIPHTDGNFHPSPLMGGFGMKHPPPQILIKNTPVPADPPTAFNKDKLNSFITQYSTGQVSVEIEWELQKENSKRWNPEIQYTSNYYKSNNVEFAVNTEGVYSEPRPIGTRYLTRNL

SEQ ID NO: 873 - protein, 7 aa, Artificial Sequence
  Description of Artificial Sequence: Synthetic polypeptide
TLAVPFK

SEQ ID NO: 874 - protein, 7 aa, Artificial Sequence
  Description of Artificial Sequence: Synthetic polypeptide
KFPVALT

SEQ ID NO: 875 - protein, 6 aa, Artificial Sequence
  Description of Artificial Sequence: Synthetic polypeptide
LAVPFK

SEQ ID NO: 876 - protein, 5 aa, Artificial Sequence
  Description of Artificial Sequence: Synthetic polypeptide
AVPFK

SEQ ID NO: 877 - protein, 4 aa, Artificial Sequence
  Description of Artificial Sequence: Synthetic polypeptide
VPFK

SEQ ID NO: 878 - protein, 6 aa, Artificial Sequence
  Description of Artificial Sequence: Synthetic polypeptide
TLAVPF

SEQ ID NO: 879 - protein, 5 aa, Artificial Sequence
  Description of Artificial Sequence: Synthetic polypeptide
TLAVP

SEQ ID NO: 880 - protein, 4 aa, Artificial Sequence
  Description of Artificial Sequence: Synthetic polypeptide
TLAV

SEQ ID NO: 881 - protein, 7 aa, Artificial Sequence
  Description of Artificial Sequence: Synthetic polypeptide
SVSKPFL

SEQ ID NO: 882 - protein, 7 aa, Artificial Sequence
  Description of Artificial Sequence: Synthetic polypeptide
FTLTTPK

SEQ ID NO: 883 - protein, 7 aa, Artificial Sequence
  Description of Artificial Sequence: Synthetic polypeptide
MNATKNV

SEQ ID NO: 884 - protein, 7 aa, Artificial Sequence
  Description of Artificial Sequence: Synthetic polypeptide
QSSQTPR

SEQ ID NO: 885 - protein, 7 aa, Artificial Sequence
  Description of Artificial Sequence: Synthetic polypeptide
ILGTGTS

SEQ ID NO: 886 - protein, 7 aa, Artificial Sequence
  Description of Artificial Sequence: Synthetic polypeptide
TRTNPEA

SEQ ID NO: 887 - protein, 7 aa, Artificial Sequence
  Description of Artificial Sequence: Synthetic polypeptide
NGGTSSS

SEQ ID NO: 888 - protein, 7 aa, Artificial Sequence
  Description of Artificial Sequence: Synthetic polypeptide
YTLSQGW

SEQ ID NO: 889 - DNA, 21 bp, Artificial Sequence
  Description of Artificial Sequence: Synthetic polynucleotide
aagtttcctgtggcgttgact

SEQ ID NO: 890 - DNA, 21 bp, Artificial Sequence
  Description of Artificial Sequence: Synthetic polynucleotide
actttggcggtgccttttaag

SEQ ID NO: 891 - DNA, 21 bp, Artificial Sequence
  Description of Artificial Sequence: Synthetic polynucleotide
agtgtgagtaagccttttttg

SEQ ID NO: 892 - DNA, 21 bp, Artificial Sequence
  Description of Artificial Sequence: Synthetic polynucleotide
tttacgttgacgacgcctaag

SEQ ID NO: 893 - DNA, 21 bp, Artificial Sequence
  Description of Artificial Sequence: Synthetic polynucleotide
atgaatgctacgaagaatgtg

SEQ ID NO: 894 - DNA, 21 bp, Artificial Sequence
  Description of Artificial Sequence: Synthetic polynucleotide
cagtcgtcgcagacgcctagg

SEQ ID NO: 895 - DNA, 21 bp, Artificial Sequence
  Description of Artificial Sequence: Synthetic polynucleotide
attctggggactggtacttcg

SEQ ID NO: 896 - DNA, 21 bp, Artificial Sequence
  Description of Artificial Sequence: Synthetic polynucleotide
acgcggactaatcctgaggct

SEQ ID NO: 897 - DNA, 21 bp, Artificial Sequence
  Description of Artificial Sequence: Synthetic polynucleotide
aatggggggactagtagttct

SEQ ID NO: 898 - DNA, 21 bp, Artificial Sequence
  Description of Artificial Sequence: Synthetic polynucleotide
tatactttgtcgcagggttgg

SEQ ID NO: 899 - protein, 9 aa, Artificial Sequence
  Description of Artificial Sequence: Synthetic polypeptide
SADNNNSEY

SEQ ID NO: 900 - protein, 9 aa, Artificial Sequence
  Description of Artificial Sequence: Synthetic polypeptide
LIDQYLYYL

SEQ ID NO: 901 - protein, 9 aa, Artificial Sequence
  Description of Artificial Sequence: Synthetic polypeptide
VPQYGYLTL

SEQ ID NO: 902 - protein, 9 aa, Artificial Sequence
  Description of Artificial Sequence: Synthetic polypeptide
TTSTRTWAL

SEQ ID NO: 903 - protein, 9 aa, Artificial Sequence
  Description of Artificial Sequence: Synthetic polypeptide
YHLNGRDSL

SEQ ID NO: 904 - protein, 9 aa, Artificial Sequence
  Description of Artificial Sequence: Synthetic polypeptide
SQAVGRSSF

SEQ ID NO: 905 - protein, 9 aa, Artificial Sequence
  Description of Artificial Sequence: Synthetic polypeptide
VPANPSTTF

SEQ ID NO: 906 - protein, 9 aa, Artificial Sequence
  Description of Artificial Sequence: Synthetic polypeptide
FPQSGVLIF

SEQ ID NO: 907 - protein, 15 aa, Artificial Sequence
  Description of Artificial Sequence: Synthetic polypeptide
YFDFNRFHCHFSPRD

SEQ ID NO: 908 - protein, 15 aa, Artificial Sequence
  Description of Artificial Sequence: Synthetic polypeptide
VGNSSGNWHCDSTWM

SEQ ID NO: 909 - protein, 15 aa, Artificial Sequence
  Description of Artificial Sequence: Synthetic polypeptide
QFSQAGASDIRDQSR

SEQ ID NO: 910 - protein, 13 aa, Artificial Sequence
  Description of Artificial Sequence: Synthetic polypeptide
GASDIRQSRNWLP

SEQ ID NO: 911 - protein, 15 aa, Artificial Sequence
  Description of Artificial Sequence: Synthetic polypeptide
GNRQAATADVNTQGV

SEQ ID NO: 912 - protein, 9 aa, Artificial Sequence
  Description of Artificial Sequence: Synthetic polypeptide
LDRLMNPLI

SEQ ID NO: 913 - protein, 9 aa, Artificial Sequence
  Description of Artificial Sequence: Synthetic polypeptide
QPAKKRLNF

SEQ ID NO: 914 - RNA, 21 nt, Artificial Sequence
  Description of Artificial Sequence: Synthetic oligonucleotide
uuaacgucaguucauaaacuu

SEQ ID NO: 915 - DNA, 21 bp, Artificial Sequence
  Description of Artificial Sequence: Synthetic oligonucleotide; Description of Combined DNA/RNA Molecule: Synthetic oligonucleotide
  misc_feature (1)..(2): n is u
  misc_feature (7)..(7): n is u
  misc_feature (11)..(12): n is u
  misc_feature (15)..(15): n is u
  misc_feature (20)..(21): TT is a deoxythymidine dinucleotide
nnaacgncagnncanaaactt

SEQ ID NO: 916 - RNA, 21 nt, Artificial Sequence
  Description of Artificial Sequence: Synthetic oligonucleotide
ugucgguaccgucuaacacuu

SEQ ID NO: 917 - DNA, 21 bp, Artificial Sequence
  Description of Artificial Sequence: Synthetic oligonucleotide; Description of Combined DNA/RNA Molecule: Synthetic oligonucleotide
  misc_feature (1)..(1): n is u
  misc_feature (3)..(3): n is u
  misc_feature (7)..(7): n is u
  misc_feature (12)..(12): n is u
  misc_feature (14)..(14): n is u
  misc_feature (20)..(21): Description of Artificial Sequence: Synthetic oligonucleotide; Description of Combined DNA/RNA Molecule: Synthetic oligonucleotide
ngncggnaccgncnaacactt

SEQ ID NO: 918 - RNA, 21 nt, Artificial Sequence
  Description of Artificial Sequence: Synthetic oligonucleotide
uaagcauggagcuagcagguu

SEQ ID NO: 919 - DNA, 21 bp, Artificial Sequence
  Description of Artificial Sequence: Synthetic oligonucleotide; Description of Combined DNA/RNA Molecule: Synthetic oligonucleotide
  misc_feature (1)..(1): n is u
  misc_feature (7)..(7): n is u
  misc_feature (13)..(13): n is u
  misc_feature (20)..(21): TT is a deoxythymidine dinucleotide
naagcanggagcnagcaggtt

SEQ ID NO: 920 - RNA, 21 nt, Artificial Sequence
  Description of Artificial Sequence: Synthetic oligonucleotide
uacaacgagacugaauugcuu

SEQ ID NO: 921 - DNA, 21 bp, Artificial Sequence
  Description of Artificial Sequence: Synthetic oligonucleotide; Description of Combined DNA/RNA Molecule: Synthetic oligonucleotide
  misc_feature (1)..(1): n is u
  misc_feature (12)..(12): n is u
  misc_feature (16)..(17): n is u
  misc_feature (20)..(21): TT is a deoxythymidine dinucleotide
nacaacgagacngaanngctt

SEQ ID NO: 922 - RNA, 21 nt, Artificial Sequence
  Description of Artificial Sequence: Synthetic oligonucleotide
uucaguucauaaaccuggauu

SEQ ID NO: 923 - DNA, 21 bp, Artificial Sequence
  Description of Artificial Sequence: Synthetic oligonucleotide; Description of Combined DNA/RNA Molecule: Synthetic oligonucleotide
  misc_feature (1)..(2): n is u
  misc_feature (6)..(7): n is u
  misc_feature (10)..(10): n is u
  misc_feature (16)..(16): n is u
  misc_feature (20)..(21): TT is a deoxythymidine dinucleotide
nncagnncanaaaccnggatt

SEQ ID NO: 924 - RNA, 21 nt, Artificial Sequence
  Description of Artificial Sequence: Synthetic oligonucleotide
uaacgucaguucauaaaccuu

SEQ ID NO: 925 - DNA, 21 bp, Artificial Sequence
  Description of Artificial Sequence: Synthetic oligonucleotide; Description of Combined DNA/RNA Molecule: Synthetic oligonucleotide
  misc_feature (1)..(1): n is u
  misc_feature (6)..(6): n is u
  misc_feature (10)..(11): n is u
  misc_feature (14)..(14): n is u
  misc_feature (20)..(21): TT is a deoxythymidine dinucleotide
naacgncagnncanaaacctt

SEQ ID NO: 926 - RNA, 21 nt, Artificial Sequence
  Description of Artificial Sequence: Synthetic oligonucleotide
uccggucacaacauugugguu

SEQ ID NO: 927 - DNA, 21 bp, Artificial Sequence
  Description of Artificial Sequence: Synthetic oligonucleotide; Description of Combined DNA/RNA Molecule: Synthetic oligonucleotide
  misc_feature (1)..(1): n is u
  misc_feature (6)..(6): n is u
  misc_feature (14)..(15): n is u
  misc_feature (17)..(17): n is u
  misc_feature (20)..(21): TT is a deoxythymidine dinucleotide
nccggncacaacanngnggtt

SEQ ID NO: 928 - RNA, 21 nt, Artificial Sequence
  Description of Artificial Sequence: Synthetic oligonucleotide
uugcacgguucuuugugacuu

SEQ ID NO: 929 - DNA, 21 bp, Artificial Sequence
  Description of Artificial Sequence: Synthetic oligonucleotide; Description of Combined DNA/RNA Molecule: Synthetic oligonucleotide
  misc_feature (1)..(1): n is u
  misc_feature (2)..(2): n is a, c, g, or t
  misc_feature (9)..(10): n is u
  misc_feature (12)..(14): n is u
  misc_feature (16)..(16): n is u
  misc_feature (20)..(21): TT is a deoxythymidine dinucleotide
nngcacggnncnnngngactt

SEQ ID NO: 930 - RNA, 21 nt, Artificial Sequence
  Description of Artificial Sequence: Synthetic oligonucleotide
uuuuauaacaagagguucauu

SEQ ID NO: 931 - DNA, 21 bp, Artificial Sequence
  Description of Artificial Sequence: Synthetic oligonucleotide; Description of Combined DNA/RNA Molecule: Synthetic oligonucleotide
  misc_feature (1)..(4): n is u
  misc_feature (6)..(6): n is u
  misc_feature (16)..(17): n is u
  misc_feature (20)..(21): TT is a deoxythymidine dinucleotide
nnnnanaacaagaggnncatt

SEQ ID NO: 932 - RNA, 21 nt, Artificial Sequence
  Description of Artificial Sequence: Synthetic oligonucleotide
uccaaauacugguugucgguu

SEQ ID NO: 933 - DNA, 21 bp, Artificial Sequence
  Description of Artificial Sequence: Synthetic oligonucleotide; Description of Combined DNA/RNA Molecule: Synthetic oligonucleotide
  misc_feature (1)..(1): n is u
  misc_feature (7)..(7): n is u
  misc_feature (10)..(10): n is u
  misc_feature (13)..(14): n is u
  misc_feature (16)..(16): n is u
  misc_feature (20)..(21): TT is a deoxythymidine dinucleotide
nccaaanacnggnngncggtt

SEQ ID NO: 934 - RNA, 21 nt, Artificial Sequence
  Description of Artificial Sequence: Synthetic oligonucleotide
uauuuuaggaauuccaauguu

SEQ ID NO: 935 - DNA, 21 bp, Artificial Sequence
  Description of Artificial Sequence: Synthetic oligonucleotide; Description of Combined DNA/RNA Molecule: Synthetic oligonucleotide
  misc_feature (1)..(1): n is u
  misc_feature (3)..(6): n is u
  misc_feature (12)..(13): n is u
  misc_feature (18)..(18): n is u
  misc_feature (20)..(21): TT is a deoxythymidine dinucleotide
nannnnaggaannccaangtt

SEQ ID NO: 936 - RNA, 21 nt, Artificial Sequence
  Description of Artificial Sequence: Synthetic oligonucleotide
uuuaggaauuccaaugaucuu

SEQ ID NO: 937 - DNA, 21 bp, Artificial Sequence
  Description of Artificial Sequence: Synthetic oligonucleotide; Description of Combined DNA/RNA Molecule: Synthetic oligonucleotide
  misc_feature (1)..(3): n is u
  misc_feature (9)..(10): n is u
  misc_feature (15)..(15): n is u
  misc_feature (18)..(18): n is u
  misc_feature (20)..(21): TT is a deoxythymidine dinucleotide
nnnaggaannccaanganctt

SEQ ID NO: 938 - DNA, 21 bp, Artificial Sequence
  Description of Artificial Sequence: Synthetic oligonucleotide; Description of Combined DNA/RNA Molecule: Synthetic oligonucleotide
  misc_feature (1)..(2): n is u
  misc_feature (5)..(5): n is u
  misc_feature (7)..(7): n is u
  misc_feature (9)..(11): n is u
  misc_feature (14)..(14): n is u
  misc_feature (17)..(17): n is u
  misc_feature (19)..(19): n is u
  misc_feature (20)..(21): TT is a deoxythymidine dinucleotide
nnaancncnnnacnganantt

SEQ ID NO: 939 - DNA, 21 bp, Artificial Sequence
  Description of Artificial Sequence: Synthetic oligonucleotide; Description of Combined DNA/RNA Molecule: Synthetic oligonucleotide
  misc_feature (3)..(6): n is u
  misc_feature (12)..(13): n is u
  misc_feature (18)..(18): n is u
  misc_feature (20)..(21): TT is a deoxythymidine dinucleotide
gannnnaggaannccaangtt

SEQ ID NO: 940 - RNA, 22 nt, Artificial Sequence
  Description of Artificial Sequence: Synthetic oligonucleotide
uaagcauggagcuagcaggcuu

SEQ ID NO: 941 - RNA, 21 nt, Artificial Sequence
  Description of Artificial Sequence: Synthetic oligonucleotide
uaagcauggagcuagcagggu

SEQ ID NO: 942 - RNA, 22 nt, Artificial Sequence
  Description of Artificial Sequence: Synthetic oligonucleotide
aaggacuugagggacucgaagu

SEQ ID NO: 943 - RNA, 21 nt, Artificial Sequence
  Description of Artificial Sequence: Synthetic oligonucleotide
aaggacuugagggacucgaag

SEQ ID NO: 944 - RNA, 19 nt, Artificial Sequence
  Description of Artificial Sequence: Synthetic oligonucleotide
aaggacuugagggacucga

SEQ ID NO: 945 - RNA, 21 nt, Artificial Sequence
  Description of Artificial Sequence: Synthetic oligonucleotide
aggacuugagggacucgaagu

SEQ ID NO: 946 - RNA, 22 nt, Artificial Sequence
  Description of Artificial Sequence: Synthetic oligonucleotide
gaggacuugagggacucgaagu

SEQ ID NO: 947 - RNA, 22 nt, Artificial Sequence
  Description of Artificial Sequence: Synthetic oligonucleotide
aaggacuugagggacucgaagu

SEQ ID NO: 948 - RNA, 23 nt, Artificial Sequence
  Description of Artificial Sequence: Synthetic oligonucleotide
aaggacuugagggacucgaaguu

SEQ ID NO: 949 - RNA, 21 nt, Artificial Sequence
  Description of Artificial Sequence: Synthetic oligonucleotide
aaggacuugagggacucgaag

SEQ ID NO: 950 - RNA, 19 nt, Artificial Sequence
  Description of Artificial Sequence: Synthetic oligonucleotide
aaggacuugagggacucga

SEQ ID NO: 951 - RNA, 22 nt, Artificial Sequence
  Description of Artificial Sequence: Synthetic oligonucleotide
aaggacuugagggacucgaagg

SEQ ID NO: 952 - RNA, 21 nt, Artificial Sequence
  Description of Artificial Sequence: Synthetic oligonucleotide
aaggacuugagggacucgaau

SEQ ID NO: 953 - RNA, 22 nt, Artificial Sequence
  Description of Artificial Sequence: Synthetic oligonucleotide
aaggacuugagggacucgaaga

SEQ ID NO: 954 - RNA, 22 nt, Artificial Sequence
  Description of Artificial Sequence: Synthetic oligonucleotide
aaggacuugagggacucgaagg

SEQ ID NO: 955 - RNA, 23 nt, Artificial Sequence
  Description of Artificial Sequence: Synthetic oligonucleotide
aaggacuugagggacucgaaggu

SEQ ID NO: 956 - RNA, 23 nt, Artificial Sequence
  Description of Artificial Sequence: Synthetic oligonucleotide
aaggacuugagggacucgaagga

SEQ ID NO: 957 - RNA, 21 nt, Artificial Sequence
  Description of Artificial Sequence: Synthetic oligonucleotide
aaggacuugagggacucgaag

SEQ ID NO: 958 - RNA, 22 nt, Artificial Sequence
  Description of Artificial Sequence: Synthetic oligonucleotide
aaggacuugagggacucgaagu

SEQ ID NO: 959 - RNA, 19 nt, Artificial Sequence
  Description of Artificial Sequence: Synthetic oligonucleotide
aaggacuugagggacucga

SEQ ID NO: 960 - RNA, 23 nt, Artificial Sequence
  Description of Artificial Sequence: Synthetic oligonucleotide
aaggacuugagggacucgaagga

SEQ ID NO: 961 - RNA, 22 nt, Artificial Sequence
  Description of Artificial Sequence: Synthetic oligonucleotide
aaggacuugagggacucgaagg

SEQ ID NO: 962 - RNA, 24 nt, Artificial Sequence
  Description of Artificial Sequence: Synthetic oligonucleotide
aaggacuugagggacucgaaggau

SEQ ID NO: 963 - RNA, 25 nt, Artificial Sequence
  Description of Artificial Sequence: Synthetic oligonucleotide
aaggacuugagggacucgaaggauu

SEQ ID NO: 964 - RNA, 21 nt, Artificial Sequence
  Description of Artificial Sequence: Synthetic oligonucleotide
aaggacuugagggacucgaag

SEQ ID NO: 965 - RNA, 24 nt, Artificial Sequence
  Description of Artificial Sequence: Synthetic oligonucleotide
aaggacuugagggacucgaaggaa

SEQ ID NO: 966 - RNA, 23 nt, Artificial Sequence
  Description of Artificial Sequence: Synthetic oligonucleotide
gaugaagugcacacauuggauga

SEQ ID NO: 967 - RNA, 22 nt, Artificial Sequence
  Description of Artificial Sequence: Synthetic oligonucleotide
gaugaacugcacacauuggaug

SEQ ID NO: 968 - RNA, 23 nt, Artificial Sequence
  Description of Artificial Sequence: Synthetic oligonucleotide
gaugaauugcacacaguagauga

SEQ ID NO: 969 - RNA, 24 nt, Artificial Sequence
  Description of Artificial Sequence: Synthetic oligonucleotide
aaggacuugagggacucgaagguu

SEQ ID NO: 970 - RNA, 25 nt, Artificial Sequence
  Description of Artificial Sequence: Synthetic oligonucleotide
aaggacuugagggacucgaagguuu

SEQ ID NO: 971 - RNA, 23 nt, Artificial Sequence
  Description of Artificial Sequence: Synthetic oligonucleotide
aaggacuugagggacucgaaggu

SEQ ID NO: 972 - RNA, 26 nt, Artificial Sequence
  Description of Artificial Sequence: Synthetic oligonucleotide
aaggacuugagggacucgaagguuuu

SEQ ID NO: 973 - RNA, 27 nt, Artificial Sequence
  Description of Artificial Sequence: Synthetic oligonucleotide
aaggacuugagggacucgaagguuuuu

SEQ ID NO: 974 - RNA, 22 nt, Artificial Sequence
  Description of Artificial Sequence: Synthetic oligonucleotide
aaggacuugagggacucgaagg

SEQ ID NO: 975 - RNA, 22 nt, Artificial Sequence
  Description of Artificial Sequence: Synthetic oligonucleotide
uaaggacuugagggacucgaag

SEQ ID NO: 976 - RNA, 21 nt, Artificial Sequence
  Description of Artificial Sequence: Synthetic oligonucleotide
aaggacuugagggacucgaag

SEQ ID NO: 977 - RNA, 22 nt, Artificial Sequence
  Description of Artificial Sequence: Synthetic oligonucleotide
aaggacuugagggacucgaagu

SEQ ID NO: 978 - RNA, 30 nt, Artificial Sequence
  Description of Artificial Sequence: Synthetic oligonucleotide
aaggacuugagggacucgaagacgaguccc

SEQ ID NO: 979 - RNA, 31 nt, Artificial Sequence
  Description of Artificial Sequence: Synthetic oligonucleotide
aaggacuugagggacucgaagacgaguccca

SEQ ID NO: 980 - RNA, 31 nt, Artificial Sequence
  Description of Artificial Sequence: Synthetic oligonucleotide
aaggacuugagggacucgaagacgagucccu

SEQ ID NO: 981 - RNA, 23 nt, Artificial Sequence
  Description of Artificial Sequence: Synthetic oligonucleotide
gaugaagugcacacauuggauac

SEQ ID NO: 982 - RNA, 24 nt, Artificial Sequence
  Description of Artificial Sequence: Synthetic oligonucleotide
gaugaagugcacacauuggauaca

SEQ ID NO: 983 - RNA, 30 nt, Artificial Sequence
  Description of Artificial Sequence: Synthetic oligonucleotide
gaugaagugcacacauuggauacaaugugu

SEQ ID NO: 984 - RNA, 21 nt, Artificial Sequence
  Description of Artificial Sequence: Synthetic oligonucleotide
gaugaagugcacacauuggau

SEQ ID NO: 985 - RNA, 22 nt, Artificial Sequence
  Description of Artificial Sequence: Synthetic oligonucleotide
gaugaagugcacacauuggaua

SEQ ID NO: 986 - RNA, 23 nt, Artificial Sequence
  Description of Artificial Sequence: Synthetic oligonucleotide
gaugaauugcacacaguagauau

SEQ ID NO: 987 - RNA, 25 nt, Artificial Sequence
  Description of Artificial Sequence: Synthetic oligonucleotide
gaugaauugcacacaguagauauac

SEQ ID NO: 988 - RNA, 30 nt, Artificial Sequence
  Description of Artificial Sequence: Synthetic oligonucleotide
gaugaauugcacacaguagauauacugugu

SEQ ID NO: 989 - RNA, 24 nt, Artificial Sequence
  Description of Artificial Sequence: Synthetic oligonucleotide
gaugaauugcacacaguagauaua

SEQ ID NO: 990 - RNA, 24 nt, Artificial Sequence
  Description of Artificial Sequence: Synthetic oligonucleotide
augaauugcacacaguagauauac

SEQ ID NO: 991 - RNA, 22 nt, Artificial Sequence
  Description of Artificial Sequence: Synthetic oligonucleotide
gaugaauugcacacaguagaua

SEQ ID NO: 992 - RNA, 30 nt, Artificial Sequence; identical to SEQ ID NO: 988
  Description of Artificial Sequence: Synthetic oligonucleotide

SEQ ID NO: 993 - RNA, 20 nt, Artificial Sequence
  Description of Artificial Sequence: Synthetic oligonucleotide
uacaacgagacugaauugcu

SEQ ID NO: 994 - RNA, 20 nt, Artificial Sequence
  Description of Artificial Sequence: Synthetic oligonucleotide
acaacgagacugaauugcuu

SEQ ID NO: 995 - RNA, 22 nt, Artificial Sequence
  Description of Artificial Sequence: Synthetic oligonucleotide
uccggucacaacauugugguuc

SEQ ID NO: 996 - RNA, 20 nt, Artificial Sequence
  Description of Artificial Sequence: Synthetic oligonucleotide
uccggucacaacauuguggu

SEQ ID NO: 997 - RNA, 18 nt, Artificial Sequence
  Description of Artificial Sequence: Synthetic oligonucleotide
uccggucacaacauugug

SEQ ID NO: 998 - RNA, 20 nt, Artificial Sequence
  Description of Artificial Sequence: Synthetic oligonucleotide
ccggucacaacauugugguu

SEQ ID NO: 999 - RNA, 20 nt, Artificial Sequence
  Description of Artificial Sequence: Synthetic oligonucleotide
uuuuauaacaagagguucau

SEQ ID NO: 1000 - RNA, 20 nt, Artificial Sequence
  Description of Artificial Sequence: Synthetic oligonucleotide
uuuauaacaagagguucauu

SEQ ID NO: 1001 - RNA, 20 nt, Artificial Sequence
  Description of Artificial Sequence: Synthetic oligonucleotide
uaagcauggagcuagcaggu

SEQ ID NO: 1002 - RNA, 20 nt, Artificial Sequence
  Description of Artificial Sequence: Synthetic oligonucleotide
aagcauggagcuagcagguu

SEQ ID NO: 1003 - RNA, 20 nt, Artificial Sequence
  Description of Artificial Sequence: Synthetic oligonucleotide
ccaaauacugguugucgguu

SEQ ID NO: 1004 - RNA, 22 nt, Artificial Sequence
  Description of Artificial Sequence: Synthetic oligonucleotide
uacaacgagacugaauugcuuu

SEQ ID NO: 1005 - RNA, 22 nt, Artificial Sequence
  Description of Artificial Sequence: Synthetic oligonucleotide
uaacgucaguucauaaaccuuu

SEQ ID NO: 1006 - RNA, 22 nt, Artificial Sequence
  Description of Artificial Sequence: Synthetic oligonucleotide
guccggucacaacauugugguu

SEQ ID NO: 1007 - RNA, 23 nt, Artificial Sequence
  Description of Artificial Sequence: Synthetic oligonucleotide
uccggucacaacauugugguuug

SEQ ID NO: 1008 - RNA, 22 nt, Artificial Sequence
  Description of Artificial Sequence: Synthetic oligonucleotide
uccggucacaacauugugguuu

SEQ ID NO: 1009 - RNA, 19 nt, Artificial Sequence
  Description of Artificial Sequence: Synthetic oligonucleotide
uccggucacaacauugugg

SEQ ID NO: 1010 - RNA, 22 nt, Artificial Sequence
  Description of Artificial Sequence: Synthetic oligonucleotide
uaagcauggagcuagcagguuu

SEQ ID NO: 1011 - RNA, 21 nt, Artificial Sequence
  Description of Artificial Sequence: Synthetic oligonucleotide
aagcauggagcuagcagguuu

SEQ ID NO: 1012 - RNA, 22 nt, Artificial Sequence
  Description of Artificial Sequence: Synthetic oligonucleotide
uccaaauacugguugucgguuu

SEQ ID NO: 1013 - RNA, 21 nt, Artificial Sequence
  Description of Artificial Sequence: Synthetic oligonucleotide
ccaaauacugguugucgguuu

SEQ ID NO: 1014 - RNA, 21 nt, Artificial Sequence
  Description of Artificial Sequence: Synthetic oligonucleotide
guuuaugaacugaucuuaccc

SEQ ID NO: 1015 - RNA, 21 nt, Artificial Sequence
  Description of Artificial Sequence: Synthetic oligonucleotide
guguuagacgguacugauccc

SEQ ID NO: 1016 - RNA, 21 nt, Artificial Sequence
  Description of Artificial Sequence: Synthetic oligonucleotide
ccugcuagcuccaugcuuccc

SEQ ID NO: 1017 - RNA, 21 nt, Artificial Sequence
  Description of Artificial Sequence: Synthetic oligonucleotide
guuuaugaacugaucuuagcc

SEQ ID NO: 1018 - RNA, 21 nt, Artificial Sequence
  Description of Artificial Sequence: Synthetic oligonucleotide
guguuagacgguacugaugcc

SEQ ID NO: 1019 - RNA, 21 nt, Artificial Sequence
  Description of Artificial Sequence: Synthetic oligonucleotide
ccugcuagcuccaugcuugcc

SEQ ID NO: 1020 - RNA, 21 nt, Artificial Sequence
  Description of Artificial Sequence: Synthetic oligonucleotide
guuuaugaagugaucuuaacc

SEQ ID NO: 1021 - RNA, 21 nt, Artificial Sequence
  Description of Artificial Sequence: Synthetic oligonucleotide
guguuagaccguacugauacc

SEQ ID NO: 1022 - RNA, 21 nt, Artificial Sequence
  Description of Artificial Sequence: Synthetic oligonucleotide
ccugcuagcaccaugcuuacc

SEQ ID NO: 1023 - RNA, 21 nt, Artificial Sequence
  Description of Artificial Sequence: Synthetic oligonucleotide
guuuaugaacugaucuuaacc

SEQ ID NO: 1024 - RNA, 21 nt, Artificial Sequence
  Description of Artificial Sequence: Synthetic oligonucleotide
guguuagacgguacugauacc

SEQ ID NO: 1025 - RNA, 21 nt, Artificial Sequence
  Description of Artificial Sequence: Synthetic oligonucleotide
ccugcuagcuccaugcuuacc

SEQ ID NO: 1026 - DNA, 21 bp, Artificial Sequence
  Description of Artificial Sequence: Synthetic oligonucleotide; Description of Combined DNA/RNA Molecule: Synthetic oligonucleotide
  misc_feature (3)..(3): n is u
  misc_feature (6)..(6): n is u
  misc_feature (10)..(10): n is u
  misc_feature (14)..(14): n is u
  misc_feature (17)..(18): n is u
  misc_feature (20)..(21): TT is a deoxythymidine dinucleotide
ccngcnagcnccangcnnatt

SEQ ID NO: 1027 - RNA, 21 nt, Artificial Sequence
  Description of Artificial Sequence: Synthetic oligonucleotide
guuuaugaacugaucuugccc

SEQ ID NO: 1028 - RNA, 21 nt, Artificial Sequence
  Description of Artificial Sequence: Synthetic oligonucleotide
guuuaugaacugaucuuggcc

SEQ ID NO: 1029 - RNA, 21 nt, Artificial Sequence
  Description of Artificial Sequence: Synthetic oligonucleotide
guuuaugaacugaucuugacc

SEQ ID NO: 1030 - RNA, 21 nt, Artificial Sequence
  Description of Artificial Sequence: Synthetic oligonucleotide
gcaauucagucucguuguccc

SEQ ID NO: 1031 - RNA, 21 nt, Artificial Sequence
  Description of Artificial Sequence: Synthetic oligonucleotide
uccagguuuaugaacugaccc

SEQ ID NO: 1032 - RNA, 21 nt, Artificial Sequence
  Description of Artificial Sequence: Synthetic oligonucleotide
gguuuaugaacugacguuccc

SEQ ID NO: 1033 - RNA, 21 nt, Artificial Sequence
  Description of Artificial Sequence: Synthetic oligonucleotide
ccacaauguugugacuggccc

SEQ ID NO: 1034 - RNA, 21 nt, Artificial Sequence
  Description of Artificial Sequence: Synthetic oligonucleotide
gucacaaagaaccguguaccc

SEQ ID NO: 1035 - RNA, 21 nt, Artificial Sequence
  Description of Artificial Sequence: Synthetic oligonucleotide
ugaaccucuuguuauaaaccc

SEQ ID NO: 1036 - RNA, 21 nt, Artificial Sequence
  Description of Artificial Sequence: Synthetic oligonucleotide
ccgacaaccaguauuuggccc

SEQ ID NO: 1037 - RNA, 21 nt, Artificial Sequence
  Description of Artificial Sequence: Synthetic oligonucleotide
gcaauucagucucguugugcc

SEQ ID NO: 1038 - RNA, 21 nt, Artificial Sequence
  Description of Artificial Sequence: Synthetic oligonucleotide
uccagguuuaugaacugagcc

SEQ ID NO: 1039 - RNA, 21 nt, Artificial Sequence
  Description of Artificial Sequence: Synthetic oligonucleotide
gguuuaugaacugacguugcc

SEQ ID NO: 1040 - RNA, 21 nt, Artificial Sequence
  Description of Artificial Sequence: Synthetic oligonucleotide
ccacaauguugugacugggcc

SEQ ID NO: 1041 - RNA, 21 nt, Artificial Sequence
  Description of Artificial Sequence: Synthetic oligonucleotide
gucacaaagaaccguguagcc

SEQ ID NO: 1042 - RNA, 21 nt, Artificial Sequence
  Description of Artificial Sequence: Synthetic oligonucleotide
ugaaccucuuguuauaaagcc

SEQ ID NO: 1043 - RNA, 21 nt, Artificial Sequence
  Description of Artificial Sequence: Synthetic oligonucleotide
ccgacaaccaguauuugggcc

SEQ ID NO: 1044 - RNA, 21 nt, Artificial Sequence
  Description of Artificial Sequence: Synthetic oligonucleotide
gcaauucagucucguuguacc

SEQ ID NO: 1045 - DNA, 21 bp, Artificial Sequence
  Description of Artificial Sequence: Synthetic oligonucleotide; Description of Combined DNA/RNA Molecule: Synthetic oligonucleotide
  misc_feature (5)..(6): n is u
  misc_feature (10)..(10): n is u
  misc_feature (12)..(12): n is u
  misc_feature (15)..(16): n is u
  misc_feature (18)..(18): n is u
  misc_feature (20)..(21): TT is a deoxythymidine dinucleotide
gcaanncagncncgnngnatt

SEQ ID NO: 1046 - RNA, 21 nt, Artificial Sequence
  Description of Artificial Sequence: Synthetic oligonucleotide
uccagguuuaugaacugaacc

SEQ ID NO: 1047 - DNA, 21 bp, Artificial Sequence
  Description of Artificial Sequence: Synthetic oligonucleotide; Description of Combined DNA/RNA Molecule: Synthetic oligonucleotide
  misc_feature (1)..(1): n is u
  misc_feature (7)..(9): n is u
  misc_feature (11)..(11): n is u
  misc_feature (16)..(16): n is u
  misc_feature (20)..(21): TT is a deoxythymidine dinucleotide
nccaggnnnangaacngaatt

SEQ ID NO: 1048 - RNA, 21 nt, Artificial Sequence
  Description of Artificial Sequence: Synthetic oligonucleotide
gguuuaugaacugacguuacc

SEQ ID NO: 1049 - RNA, 21 nt, Artificial Sequence
  Description of Artificial Sequence: Synthetic oligonucleotide
ccacaauguugugacuggacc

SEQ ID NO: 1050 - RNA, 21 nt, Artificial Sequence
  Description of Artificial Sequence: Synthetic oligonucleotide
gucacaaagaaccguguaacc

SEQ ID NO: 1051 - RNA, 21 nt, Artificial Sequence
  Description of Artificial Sequence: Synthetic oligonucleotide
ugaaccucuuguuauaaaacc

SEQ ID NO: 1052 - DNA, 21 bp, Artificial Sequence
  Description of Artificial Sequence: Synthetic oligonucleotide; Description of Combined DNA/RNA Molecule: Synthetic oligonucleotide
  misc_feature (1)..(1): n is u
  misc_feature (7)..(7): n is u
  misc_feature (9)..(10): n is u
  misc_feature (12)..(13): n is u
  misc_feature (15)..(15): n is u
  misc_feature (20)..(21): TT is a deoxythymidine dinucleotide
ngaaccncnngnnanaaaatt

SEQ ID NO: 1053 - RNA, 21 nt, Artificial Sequence
  Description of Artificial Sequence: Synthetic oligonucleotide
ccgacaaccaguauuuggacc

SEQ ID NO: 1054 - DNA, 21 bp, Artificial Sequence
  Description of Artificial Sequence: Synthetic oligonucleotide; Description of Combined DNA/RNA Molecule: Synthetic oligonucleotide
  misc_feature (12)..(12): n is u
  misc_feature (14)..(16): n is u
  misc_feature (20)..(21): TT is a deoxythymidine dinucleotide
ccgacaaccagnannnggatt

SEQ ID NO: 1055 - RNA, 21 nt, Artificial Sequence
  Description of Artificial Sequence: Synthetic oligonucleotide
gcaauucagacucguuguacc

SEQ ID NO: 1056 - RNA, 21 nt, Artificial Sequence
  Description of Artificial Sequence: Synthetic oligonucleotide
uccagguuuuugaacugaacc

SEQ ID NO: 1057 - RNA, 21 nt, Artificial Sequence
  Description of Artificial Sequence: Synthetic oligonucleotide
gguuuaugaucugacguuacc

SEQ ID NO: 1058 - RNA, 21 nt, Artificial Sequence
  Description of Artificial Sequence: Synthetic oligonucleotide
ccacaauguagugacuggacc

SEQ ID NO: 1059 - RNA, 21 nt, Artificial Sequence
  Description of Artificial Sequence: Synthetic oligonucleotide
gucacaaaguaccguguaacc

SEQ ID NO: 1060 - RNA, 21 nt, Artificial Sequence
  Description of Artificial Sequence: Synthetic oligonucleotide
ugaaccucuaguuauaaaacc

SEQ ID NO: 1061 - RNA, 21 nt, Artificial Sequence
  Description of Artificial Sequence: Synthetic oligonucleotide
ccgacaaccuguauuuggacc

SEQ ID NO: 1062 - RNA, 21 nt, Artificial Sequence
  Description of Artificial Sequence: Synthetic oligonucleotide
cauuggaauuccuaaaauucc

SEQ ID NO: 1063 - RNA, 21 nt, Artificial Sequence
  Description of Artificial Sequence: Synthetic oligonucleotide
gaucauuggaauuccuaaucc

SEQ ID NO: 1064 - RNA, 21 nt, Artificial Sequence
  Description of Artificial Sequence: Synthetic oligonucleotide
cauuggaauuccuaaaaugcc

SEQ ID NO: 1065 - RNA, 21 nt, Artificial Sequence
  Description of Artificial Sequence: Synthetic oligonucleotide
gaucauuggaauuccuaagcc

SEQ ID NO: 1066 - RNA, 21 nt, Artificial Sequence
  Description of Artificial Sequence: Synthetic oligonucleotide
cauuggaauuccuaaaauacc

SEQ ID NO: 1067 - DNA, 21 bp, Artificial Sequence
  Description of Artificial Sequence: Synthetic oligonucleotide; Description of Combined DNA/RNA Molecule: Synthetic oligonucleotide
  misc_feature (3)..(4): n is u
  misc_feature (9)..(10): n is u
  misc_feature (13)..(13): n is u
  misc_feature (18)..(18): n is u
  misc_feature (20)..(21): TT is a deoxythymidine dinucleotide
cannggaannccnaaaanatt

SEQ ID NO: 1068 - RNA, 21 nt, Artificial Sequence
  Description of Artificial Sequence: Synthetic oligonucleotide
gaucauuggaauuccuaaacc

SEQ ID NO: 1069 - DNA, 21 bp, Artificial Sequence
  Description of Artificial Sequence: Synthetic oligonucleotide; Description of Combined DNA/RNA Molecule: Synthetic oligonucleotide
  misc_feature (3)..(3): n is u
  misc_feature (6)..(7): n is u
  misc_feature (12)..(13): n is u
  misc_feature (16)..(16): n is u
  misc_feature (20)..(21): TT is a deoxythymidine dinucleotide
gancannggaannccnaaatt

SEQ ID NO: 1070 - RNA, 21 nt, Artificial Sequence
  Description of Artificial Sequence: Synthetic oligonucleotide
cauuggaauaccuaaaauacc

SEQ ID NO: 1071 - RNA, 21 nt, Artificial Sequence
  Description of Artificial Sequence: Synthetic oligonucleotide
gaucauugguauuccuaaacc

SEQ ID NO: 1072 - DNA, 21 bp, Artificial Sequence
  Description of Artificial Sequence: Synthetic oligonucleotide; Description of Combined DNA/RNA Molecule: Synthetic oligonucleotide
  misc_feature (2)..(4): n is u
  misc_feature (6)..(6): n is u
  misc_feature (11)..(11): n is u
  misc_feature (16)..(17): n is u
  misc_feature (20)..(21): TT is a deoxythymidine dinucleotide
gnnnangaacngacgnnaatt

SEQ ID NO: 1073 - DNA, 21 bp, Artificial Sequence
  Description of Artificial Sequence: Synthetic oligonucleotide; Description of Combined DNA/RNA Molecule: Synthetic oligonucleotide
  misc_feature (2)..(2): n is u
  misc_feature (4)..(5): n is u
  misc_feature (12)..(12): n is u
  misc_feature (20)..(21): TT is a deoxythymidine dinucleotide
gngnnagacggnaccgacatt

SEQ ID NO: 1074 - DNA, 21 bp, Artificial Sequence
  Description of Artificial Sequence: Synthetic oligonucleotide; Description of Combined DNA/RNA Molecule: Synthetic oligonucleotide
  misc_feature (2)..(2): n is u
  misc_feature (4)..(4): n is u
  misc_feature (8)..(8): n is u
  misc_feature (16)..(17): n is u
  misc_feature (20)..(21): TT is a deoxythymidine dinucleotide
anancagnaaagagannaatt

SEQ ID NO: 1075 - DNA, 21 bp, Artificial Sequence
  Description of Artificial Sequence: Synthetic oligonucleotide; Description of Combined DNA/RNA Molecule: Synthetic oligonucleotide
  misc_feature (3)..(5): n is u
  misc_feature (7)..(7): n is u
  misc_feature (12)..(12): n is u
  misc_feature (17)..(18): n is u
  misc_feature (20)..(21): TT is a deoxythymidine dinucleotide
ggnnnangaacngacgnnatt

SEQ ID NO: 1076 - DNA, 21 bp, Artificial Sequence
  Description of Artificial Sequence: Synthetic oligonucleotide; Description of Combined DNA/RNA Molecule: Synthetic oligonucleotide
  misc_feature (7)..(7): n is u
  misc_feature (9)..(10): n is u
  misc_feature (12)..(12): n is u
  misc_feature (20)..(21): TT is a deoxythymidine dinucleotide
ccacaangnngngaccggatt

SEQ ID NO: 1077 - DNA, 21 bp, Artificial Sequence
  Description of Artificial Sequence: Synthetic oligonucleotide; Description of Combined DNA/RNA Molecule: Synthetic oligonucleotide
  misc_feature (2)..(2): n is u
  misc_feature (15)..(15): n is u
  misc_feature (20)..(21): TT is a deoxythymidine dinucleotide
gncacaaagaaccgngcaatt

SEQ ID NO: 1078 - DNA, 21 bp, Artificial Sequence
  Description of Artificial Sequence: Synthetic oligonucleotide; Description of Combined DNA/RNA Molecule: Synthetic oligonucleotide
  misc_feature (3)..(4): n is u
  misc_feature (9)..(10): n is u
  misc_feature (13)..(13): n is u
  misc_feature (18)..(18): n is u
  misc_feature (20)..(21): TT is a deoxythymidine dinucleotide
cannggaannccnaaaanctt

SEQ ID NO: 1079 - RNA, 21 nt, Artificial Sequence
  Description of Artificial Sequence: Synthetic oligonucleotide
ccugcuagcuccaugcuugcu

SEQ ID NO: 1080 - RNA, 21 nt, Artificial Sequence
  Description of Artificial Sequence: Synthetic oligonucleotide
ccugcuagcuccaugcuugau

SEQ ID NO: 1081 - RNA, 21 nt, Artificial Sequence
  Description of Artificial Sequence: Synthetic oligonucleotide
ccugcuagcuccaugcuuauu

SEQ ID NO: 1082 - RNA, 21 nt, Artificial Sequence
  Description of Artificial Sequence: Synthetic oligonucleotide
ccugcuagcuccaugcuuguu

SEQ ID NO: 1083 - RNA, 20 nt, Artificial Sequence
  Description of Artificial Sequence: Synthetic oligonucleotide
uucgagucccucaaguagcu

SEQ ID NO: 1084 - RNA, 22 nt, Artificial Sequence
  Description of Artificial Sequence: Synthetic oligonucleotide
uucgagucccucaaguagcuuu

SEQ ID NO: 1085 - RNA, 22 nt, Artificial Sequence
  Description of Artificial Sequence: Synthetic oligonucleotide
ucgagucccucaaguccauucu

SEQ ID NO: 1086 - RNA, 21 nt, Artificial Sequence
  Description of Artificial Sequence: Synthetic oligonucleotide
uuccaguccaucaagucaauu

SEQ ID NO: 1087 - RNA, 22 nt, Artificial Sequence
  Description of Artificial Sequence: Synthetic oligonucleotide
uuccgagucuaaaaguccuugg

SEQ ID NO: 1088 - RNA, 23 nt, Artificial Sequence
  Description of Artificial Sequence: Synthetic oligonucleotide
uuccgagucuaaaaguccuuggc

SEQ ID NO: 1089 - RNA, 23 nt, Artificial Sequence
  Description of Artificial Sequence: Synthetic oligonucleotide
cuuccgagucuaaaaguccuugg

SEQ ID NO: 1090 - RNA, 23 nt, Artificial Sequence
  Description of Artificial Sequence: Synthetic oligonucleotide
uuccgagucuaaaaguccuuggu

SEQ ID NO: 1091 - RNA, 24 nt, Artificial Sequence
  Description of Artificial Sequence: Synthetic oligonucleotide
uuccgagucuaaaaguccuuggcu

SEQ ID NO: 1092 - RNA, 23 nt, Artificial Sequence
  Description of Artificial Sequence: Synthetic oligonucleotide
uccaaugugaaacuucaucggcu

SEQ ID NO: 1093 - RNA, 22 nt, Artificial Sequence
  Description of Artificial Sequence: Synthetic oligonucleotide
uccaaugugaaacuucaucggc

SEQ ID NO: 1094 - RNA, 22 nt, Artificial Sequence
  Description of Artificial Sequence: Synthetic oligonucleotide
auccaaugugaaacuucaucgu

SEQ ID NO: 1095 - RNA, 23 nt, Artificial Sequence
  Description of Artificial Sequence: Synthetic oligonucleotide
auccaaugugaaacuucaucggu

SEQ ID NO: 1096 - RNA, 22 nt, Artificial Sequence
  Description of Artificial Sequence: Synthetic oligonucleotide
uccaaugugaaacuucaucggu

SEQ ID NO: 1097 - RNA, 24 nt, Artificial Sequence
  Description of Artificial Sequence: Synthetic oligonucleotide
uccaaugugaaacuucaucggcuu

SEQ ID NO: 1098 - RNA, 22 nt, Artificial Sequence
  Description of Artificial Sequence: Synthetic oligonucleotide
aucuacugugaaaauucaucgg

SEQ ID NO: 1099 - RNA, 21 nt, Artificial Sequence
  Description of Artificial Sequence: Synthetic oligonucleotide
ucuacugugaaaauucaucgg

SEQ ID NO: 1100 - RNA, 22 nt, Artificial Sequence
  Description of Artificial Sequence: Synthetic oligonucleotide
ucuacugugaaaauucaucggc

SEQ ID NO: 1101 - RNA, 23 nt, Artificial Sequence
  Description of Artificial Sequence: Synthetic oligonucleotide
aucuacugugaaaauucaucggu

SEQ ID NO: 1102 - RNA, 22 nt, Artificial Sequence
  Description of Artificial Sequence: Synthetic oligonucleotide
ucuacugugaaaauucaucggu

SEQ ID NO: 1103 - RNA, 23 nt, Artificial Sequence
  Description of Artificial Sequence: Synthetic oligonucleotide
ucuacugugaaaauucaucggcu

SEQ ID NO: 1104 - RNA, 22 nt, Artificial Sequence
  Description of Artificial Sequence: Synthetic oligonucleotide
ccuucgguccucaaguccuuca

SEQ ID NO: 1105 - RNA, 24 nt, Artificial Sequence
  Description of Artificial Sequence: Synthetic oligonucleotide
uucgaguccaucaaauccuauagu

SEQ ID NO: 1106 - RNA, 21 nt, Artificial Sequence
  Description of Artificial Sequence: Synthetic oligonucleotide
uacaaugugugcacuucauau

SEQ ID NO: 1107 - RNA, 23 nt, Artificial Sequence
  Description of Artificial Sequence: Synthetic oligonucleotide
uauacugugugcaauucauuucu

SEQ ID NO: 1108 - RNA, 20 nt, Artificial Sequence
  Description of Artificial Sequence: Synthetic oligonucleotide
gcaauucagucucguugucc

SEQ ID NO: 1109 - RNA, 19 nt, Artificial Sequence
  Description of Artificial Sequence: Synthetic oligonucleotide
gcaauucagucucguuguc

SEQ ID NO: 1110 - RNA, 20 nt, Artificial Sequence
  Description of Artificial Sequence: Synthetic oligonucleotide
caauucagucucguuguccc

SEQ ID NO: 1111 - RNA, 19 nt, Homo sapiens3
caauucagucucguugucc

SEQ ID NO: 1112 - RNA, 20 nt, Artificial Sequence
  Description of Artificial Sequence: Synthetic oligonucleotide
gcaauucagucucguugugc

SEQ ID NO: 1113 - RNA, 20 nt, Artificial Sequence
  Description of Artificial Sequence: Synthetic oligonucleotide
caauucagucucguugugcc

SEQ ID NO: 1114 - RNA, 22 nt, Artificial Sequence
  Description of Artificial Sequence: Synthetic oligonucleotide
ccacaauguugugacugggccu

SEQ ID NO: 1115 - RNA, 20 nt, Artificial Sequence
  Description of Artificial Sequence: Synthetic oligonucleotide
ccacaauguugugacugggc

SEQ ID NO: 1116 - RNA, 20 nt, Artificial Sequence
  Description of Artificial Sequence: Synthetic oligonucleotide
cacaauguugugacugggcc

SEQ ID NO: 1117 - RNA, 22 nt, Artificial Sequence
  Description of Artificial Sequence: Synthetic oligonucleotide
ugaaccucuuguuauaaagccu

SEQ ID NO: 1118 - RNA, 20 nt, Artificial Sequence
  Description of Artificial Sequence: Synthetic oligonucleotide
ugaaccucuuguuauaaagc

SEQ ID NO: 1119 - RNA, 20 nt, Artificial Sequence
  Description of Artificial Sequence: Synthetic oligonucleotide
gaaccucuuguuauaaagcc

SEQ ID NO: 1120 - RNA, 22 nt, Artificial Sequence
  Description of Artificial Sequence: Synthetic oligonucleotide
ccugcuagcuccaugcuugccu

SEQ ID NO: 1121 - RNA, 20 nt, Artificial Sequence
  Description of Artificial Sequence: Synthetic oligonucleotide
ccugcuagcuccaugcuugc

SEQ ID NO: 1122 - RNA, 19 nt, Artificial Sequence
  Description of Artificial Sequence: Synthetic oligonucleotide
ccugcuagcuccaugcuug

SEQ ID NO: 1123 - RNA, 20 nt, Artificial Sequence
  Description of Artificial Sequence: Synthetic oligonucleotide
cugcuagcuccaugcuugcc

SEQ ID NO: 1124 - RNA, 22 nt, Artificial Sequence
  Description of Artificial Sequence: Synthetic oligonucleotide
ccgacaaccaguauuugggccu

SEQ ID NO: 1125 - RNA, 20 nt, Artificial Sequence
  Description of Artificial Sequence: Synthetic oligonucleotide
ccgacaaccaguauuugggc

SEQ ID NO: 1126 - RNA, 19 nt, Artificial Sequence
  Description of Artificial Sequence: Synthetic oligonucleotide
ccgacaaccaguauuuggg

SEQ ID NO: 1127 - RNA, 20 nt, Artificial Sequence
  Description of Artificial Sequence: Synthetic oligonucleotide
cgacaaccaguauuugggcc

SEQ ID NO: 1128 - RNA, 19 nt, Artificial Sequence
  Description of Artificial Sequence: Synthetic oligonucleotide
cgacaaccaguauuugggc

SEQ ID NO: 1129 - RNA, 22 nt, Artificial Sequence
  Description of Artificial Sequence: Synthetic oligonucleotide
gcaauucagucucguuguaccu

SEQ ID NO: 1130 - RNA, 20 nt, Artificial Sequence
  Description of Artificial Sequence: Synthetic oligonucleotide
gcaauucagucucguuguac

SEQ ID NO: 1131 - RNA, 19 nt, Artificial Sequence
  Description of Artificial Sequence: Synthetic oligonucleotide
gcaauucagucucguugua

SEQ ID NO: 1132 - RNA, 20 nt, Artificial Sequence
  Description of Artificial Sequence: Synthetic oligonucleotide
caauucagucucguuguacc

SEQ ID NO: 1133 - RNA, 22 nt, Artificial Sequence
  Description of Artificial Sequence: Synthetic oligonucleotide
gcaauucagacucguuguaccu

SEQ ID NO: 1134 - RNA, 20 nt, Artificial Sequence
  Description of Artificial Sequence: Synthetic oligonucleotide
gcaauucagacucguuguac

SEQ ID NO: 1135 - RNA, 19 nt, Artificial Sequence
  Description of Artificial Sequence: Synthetic oligonucleotide
gcaauucagacucguugua

SEQ ID NO: 1136 - RNA, 20 nt, Artificial Sequence
  Description of Artificial Sequence: Synthetic oligonucleotide
caauucagacucguuguacc

SEQ ID NO: 1137 - RNA, 22 nt, Artificial Sequence
  Description of Artificial Sequence: Synthetic oligonucleotide
agcaauucagucucguuguacc

SEQ ID NO: 1138 - RNA, 21 nt, Artificial Sequence
  Description of Artificial Sequence: Synthetic oligonucleotide
agcaauucagucucguuguac

SEQ ID NO: 1139 - RNA, 21 nt, Artificial Sequence
  Description of Artificial Sequence: Synthetic oligonucleotide
agguuuaugaacugacguuac

SEQ ID NO: 1140 - RNA, 22 nt, Artificial Sequence
  Description of Artificial Sequence: Synthetic oligonucleotide
agguuuaugaacugacguuacc

SEQ ID NO: 1141 - RNA, 21 nt, Artificial Sequence
  Description of Artificial Sequence: Synthetic oligonucleotide
accacaauguugugacuggac

SEQ ID NO: 1142 - RNA, 22 nt, Artificial Sequence
  Description of Artificial Sequence: Synthetic oligonucleotide
accacaauguugugacuggacc

SEQ ID NO: 1143 - RNA, 23 nt, Artificial Sequence
  Description of Artificial Sequence: Synthetic oligonucleotide
ccacaauguugugacuggaccgu

SEQ ID NO: 1144 - RNA, 22 nt, Artificial Sequence
  Description of Artificial Sequence: Synthetic oligonucleotide
ccacaauguugugacuggaccg

SEQ ID NO: 1145 - RNA, 20 nt, Artificial Sequence
  Description of Artificial Sequence: Synthetic oligonucleotide
ccacaauguugugacuggac

SEQ ID NO: 1146 - RNA, 20 nt, Artificial Sequence
  Description of Artificial Sequence: Synthetic oligonucleotide
cacaauguugugacuggacc

SEQ ID NO: 1147 - RNA, 22 nt, Artificial Sequence
  Description of Artificial Sequence: Synthetic oligonucleotide
accugcuagcuccaugcuuccc

SEQ ID NO: 1148 - RNA, 21 nt, Artificial Sequence
  Description of Artificial Sequence: Synthetic oligonucleotide
accugcuagcuccaugcuucc

SEQ ID NO: 1149 - RNA, 20 nt, Artificial Sequence
  Description of Artificial Sequence: Synthetic oligonucleotide
accugcuagcuccaugcuuc

SEQ ID NO: 1150 - RNA, 20 nt, Artificial Sequence
  Description of Artificial Sequence: Synthetic oligonucleotide
ccugcuagcuccaugcuucc

SEQ ID NO: 1151 - RNA, 19 nt, Artificial Sequence
  Description of Artificial Sequence: Synthetic oligonucleotide
ccugcuagcuccaugcuuc

SEQ ID NO: 1152 - RNA, 20 nt, Artificial Sequence
  Description of Artificial Sequence: Synthetic oligonucleotide
cugcuagcuccaugcuuccc

SEQ ID NO: 1153 - RNA, 19 nt, Artificial Sequence
  Description of Artificial Sequence: Synthetic oligonucleotide
cugcuagcuccaugcuucc

SEQ ID NO: 1154 - RNA, 22 nt, Artificial Sequence
  Description of Artificial Sequence: Synthetic oligonucleotide
accgacaaccaguauuuggacc

SEQ ID NO: 1155 - RNA, 21 nt, Artificial Sequence
  Description of Artificial Sequence: Synthetic oligonucleotide
accgacaaccaguauuuggac

SEQ ID NO: 1156 - RNA, 23 nt, Artificial Sequence
  Description of Artificial Sequence: Synthetic oligonucleotide
ccgacaaccaguauuuggaccgu

SEQ ID NO: 1157 - RNA, 23 nt, Artificial Sequence
  Description of Artificial Sequence: Synthetic oligonucleotide
ccgacaaccaguauuuggaccgu

SEQ ID NO: 1158 - RNA, 20 nt, Artificial Sequence
  Description of Artificial Sequence: Synthetic oligonucleotide
ccgacaaccaguauuuggac

SEQ ID NO: 1159 - RNA, 20 nt, Artificial Sequence
  Description of Artificial Sequence: Synthetic oligonucleotide
cgacaaccaguauuuggacc

SEQ ID NO: 1160 - RNA, 21 nt, Artificial Sequence
  Description of Artificial Sequence: Synthetic oligonucleotide
ccugcuagcaccgugcuuacc

SEQ ID NO: 1161 - DNA, 54 bp, Artificial Sequence
  Description of Artificial Sequence: Synthetic oligonucleotide
gtgctgggcggggggcggcgggccctcccgcagaacaccatgcgctcttcggaa

SEQ ID NO: 1162 - DNA, 100 bp, Artificial Sequence
  Description of Artificial Sequence: Synthetic oligonucleotide
gaagcaaagaaggggcagagggagcccgtgagctgagtgggccagggactgggagaaggagtgaggaggcagggccggcatgcctctgctgctggccaga

SEQ ID NO: 1163 - DNA, 54 bp, Artificial Sequence
  Description of Artificial Sequence: Synthetic oligonucleotide
gtgctgggcggggggcggcgggccctcccgcagaacaccatgcgctccacggaa

SEQ ID NO: 1164 - DNA, 35 bp, Artificial Sequence
  Description of Artificial Sequence: Synthetic oligonucleotide
gggccctcccgcagaacaccatgcgctccacggaa

SEQ ID NO: 1165 - DNA, 30 bp, Artificial Sequence
  Description of Artificial Sequence: Synthetic oligonucleotide
ctcccgcagaacaccatgcgctccacggaa

SEQ ID NO: 1166 - DNA, 55 bp, Artificial Sequence
  Description of Artificial Sequence: Synthetic oligonucleotide
gtgctgggcggggggcggcgggccctcccgcagaacaccatgcgctccacggaag

SEQ ID NO: 1167 - DNA, 54 bp, Artificial Sequence
  Description of Artificial Sequence: Synthetic oligonucleotide
gtgctgggcggggggcggcgggccctcccgcagaacaccatgcgctcctcggaa

SEQ ID NO: 1168 - DNA, 10 bp, Artificial Sequence
  Description of Artificial Sequence: Synthetic oligonucleotide
tgtgacctgg

SEQ ID NO: 1169 - DNA, 10 bp, Artificial Sequence
  Description of Artificial Sequence: Synthetic oligonucleotide
tgtgatttgg

SEQ ID NO: 1170 - DNA, 18 bp, Artificial Sequence
  Description of Artificial Sequence: Synthetic oligonucleotide
gtctgcacctgtcactag

SEQ ID NO: 1171 - DNA, 10 bp, Artificial Sequence
  Description of Artificial Sequence: Synthetic oligonucleotide
gtgacccaag

SEQ ID NO: 1172 - DNA, 15 bp, Artificial Sequence
  Description of Artificial Sequence: Synthetic oligonucleotide
gtggccactgagaag

SEQ ID NO: 1173 - DNA, 10 bp, Artificial Sequence
  Description of Artificial Sequence: Synthetic oligonucleotide
gtgacccaat

SEQ ID NO: 1174 - DNA, 10 bp, Artificial Sequence
  Description of Artificial Sequence: Synthetic oligonucleotide
gtgacccaac

SEQ ID NO: 1175 - DNA, 15 bp, Artificial Sequence
  Description of Artificial Sequence: Synthetic oligonucleotide
gtggccactgagaaa

SEQ ID NO: 1176 - protein, 7 aa, Artificial Sequence
  Description of Artificial Sequence: Synthetic polypeptide
QAVRTSL

SEQ ID NO: 1177 - protein, 7 aa, Artificial Sequence
  Description of Artificial Sequence: Synthetic polypeptide
LAKERLS

SEQ ID NO: 1178 - DNA, 52 bp, Artificial Sequence
  Description of Artificial Sequence: Synthetic oligonucleotide
ctgaggagcgccttgacagcagccatgggagggccgccccctacctcagtga

SEQ ID NO: 1179 - DNA, 52 bp, Artificial Sequence
  Description of Artificial Sequence: Synthetic oligonucleotide
ctgtggagcgccttgacagcagccatgggagggccgccccctacctcagtga

SEQ ID NO: 1180 - DNA, 100 bp, Artificial Sequence
  Description of Artificial Sequence: Synthetic oligonucleotide
tggccgtgtagtgctacccagcgctggctgcctcctcagcattgcaattcctctcccatctgggcaccagtcagctaccctggtgggaatctgggtagcc

SEQ ID NO: 1181 - DNA, 35 bp, Artificial Sequence
  Description of Artificial Sequence: Synthetic oligonucleotide
ctgaggagcgccttgacagcagccatgggagggcc

SEQ ID NO: 1182 - DNA, 52 bp, Artificial Sequence
  Description of Artificial Sequence: Synthetic oligonucleotide
ctgcggagcgccttgacagcagccatgggagggccgccccctacctcagtga

SEQ ID NO: 1183 - DNA, 158 bp, Artificial Sequence
  Description of Artificial Sequence: Synthetic oligonucleotide
gtgctgggcggggggcggcgggccctcccgcagaacaccatgcgctcttcggaatccaggtttatgaactgaccctgtgacctggttcagttcataaacctggattctgaggagcgccttgacagcagccatgggagggccgccccctacctcagtga

SEQ ID NO: 1184 - DNA, 158 bp, Artificial Sequence
  Description of Artificial Sequence: Synthetic oligonucleotide
gtgctgggcggggggcggcgggccctcccgcagaacaccatgcgctcttcggaatccaggtttatgaactgagcctgtgacctggttcagttcataaacctggattctgaggagcgccttgacagcagccatgggagggccgccccctacctcagtga

SEQ ID NO: 1185 - DNA, 158 bp, Artificial Sequence
  Description of Artificial Sequence: Synthetic oligonucleotide
gtgctgggcggggggcggcgggccctcccgcagaacaccatgcgctcttcggaatccaggtttatgaactgaacctgtgatttggttcagttcataaacctggattctgaggagcgccttgacagcagccatgggagggccgccccctacctcagtga

SEQ ID NO: 1186 - DNA, 158 bp, Artificial Sequence
  Description of Artificial Sequence: Synthetic oligonucleotide
gtgctgggcggggggcggcgggccctcccgcagaacaccatgcgctcttcggaatccaggtttttgaactgaacctgtgacctggttcagttcataaacctggattctgtggagcgccttgacagcagccatgggagggccgccccctacctcagtga

SEQ ID NO: 1187 - DNA, 158 bp, Artificial Sequence
  Description of Artificial Sequence: Synthetic oligonucleotide
gtgctgggcggggggcggcgggccctcccgcagaacaccatgcgctcttcggaatccaggtttatgaactgaacctgtgacctggttcagttcataaacctggattctgtggagcgccttgacagcagccatgggagggccgccccctacctcagtga

SEQ ID NO: 1188 - DNA, 260 bp, Artificial Sequence
  Description of Artificial Sequence: Synthetic oligonucleotide
gaagcaaagaaggggcagagggagcccgtgagctgagtgggccagggactgggagaaggagtgaggaggcagggccggcatgcctctgctgctggccagatccaggtttatgaactgaaccgtctgcacctgtcactagtgtcggtaccgtctaacactttggccgtgtagtgctacccagcgctggctgcctcctcagcattgcaattcctctcccatctgggcaccagtcagctaccctggtgggaatctgggtagcc

SEQ ID NO: 1189 - DNA, 158 bp, Artificial Sequence
  Description of Artificial Sequence: Synthetic oligonucleotide
gtgctgggcggggggcggcgggccctcccgcagaacaccatgcgctcttcggaaggtttatgaactgacgttccctgtgacctggtaacgtcagttcataaaccttctgaggagcgccttgacagcagccatgggagggccgccccctacctcagtga

SEQ ID NO: 1190 - DNA, 158 bp, Artificial Sequence
  Description of Artificial Sequence: Synthetic oligonucleotide
gtgctgggcggggggcggcgggccctcccgcagaacaccatgcgctcttcggaaggtttatgaactgacgttgcctgtgacctggtaacgtcagttcataaaccttctgaggagcgccttgacagcagccatgggagggccgccccctacctcagtga

SEQ ID NO: 1191 - DNA, 158 bp, Artificial Sequence
  Description of Artificial Sequence: Synthetic oligonucleotide
gtgctgggcggggggcggcgggccctcccgcagaacaccatgcgctcttcggaaggtttatgaactgacgttacctgtgatttggtaacgtcagttcataaaccttctgaggagcgccttgacagcagccatgggagggccgccccctacctcagtga

SEQ ID NO: 1192 - DNA, 158 bp, Artificial Sequence
  Description of Artificial Sequence: Synthetic oligonucleotide
gtgctgggcggggggcggcgggccctcccgcagaacaccatgcgctcttcggaaggtttatgatctgacgttacctgtgacctggtaacgtcagttcataaaccttctgtggagcgccttgacagcagccatgggagggccgccccctacctcagtga

SEQ ID NO: 1193 - DNA, 158 bp, Artificial Sequence
  Description of Artificial Sequence: Synthetic oligonucleotide
gtgctgggcggggggcggcgggccctcccgcagaacaccatgcgctcttcggaaggtttatgaactgacgttacctgtgacctggtaacgtcagttcataaaccttctgtggagcgccttgacagcagccatgggagggccgccccctacctcagtga

SEQ ID NO: 1194 - DNA, 260 bp, Artificial Sequence
  Description of Artificial Sequence: Synthetic oligonucleotide
gaagcaaagaaggggcagagggagcccgtgagctgagtgggccagggactgggagaaggagtgaggaggcagggccggcatgcctctgctgctggccagaggtttatgaactgacgttaccgtctgcacctgtcactagtaacgtcagttcataaacctttggccgtgtagtgctacccagcgctggctgcctcctcagcattgcaattcctctcccatctgggcaccagtcagctaccctggtgggaatctgggtagcc

SEQ ID NO: 1195 - DNA, 158 bp, Artificial Sequence
  Description of Artificial Sequence: Synthetic oligonucleotide
gtgctgggcggggggcggcgggccctcccgcagaacaccatgcgctcttcggaagtttatgaactgatcttaccctgtgacctggttaacgtcagttcataaacttctgaggagcgccttgacagcagccatgggagggccgccccctacctcagtga

SEQ ID NO: 1196 - DNA, 158 bp, Artificial Sequence
  Description of Artificial Sequence: Synthetic oligonucleotide
gtgctgggcggggggcggcgggccctcccgcagaacaccatgcgctcttcggaagtttatgaactgatcttagcctgtgacctggttaacgtcagttcataaacttctgaggagcgccttgacagcagccatgggagggccgccccctacctcagtga

SEQ ID NO: 1197 - DNA, 158 bp, Artificial Sequence
  Description of Artificial Sequence: Synthetic oligonucleotide
gtgctgggcggggggcggcgggccctcccgcagaacaccatgcgctcttcggaagtttatgaactgatcttaccctgtgatttggttaacgtcagttcataaacttctgaggagcgccttgacagcagccatgggagggccgccccctacctcagtga

SEQ ID NO: 1198 - DNA, 158 bp, Artificial Sequence
  Description of Artificial Sequence: Synthetic oligonucleotide
gtgctgggcggggggcggcgggccctcccgcagaacaccatgcgctcttcggaagtttatgaagtgatcttaacctgtgacctggttaacgtcagttcataaacttctgtggagcgccttgacagcagccatgggagggccgccccctacctcagtga

SEQ ID NO: 1199 - DNA, 158 bp, Artificial Sequence
  Description of Artificial Sequence: Synthetic oligonucleotide
gtgctgggcggggggcggcgggccctcccgcagaacaccatgcgctcttcggaagtttatgaactgatcttaacctgtgacctggttaacgtcagttcataaacttctgtggagcgccttgacagcagccatgggagggccgccccctacctcagtga

SEQ ID NO: 1200 - DNA, 260 bp, Artificial Sequence
  Description of Artificial Sequence: Synthetic oligonucleotide
gaagcaaagaaggggcagagggagcccgtgagctgagtgggccagggactgggagaaggagtgaggaggcagggccggcatgcctctgctgctggccagagtttatgaactgatcttacccgtctgcacctgtcactagttaacgtcagttcataaactttggccgtgtagtgctacccagcgctggctgcctcctcagcattgcaattcctctcccatctgggcaccagtcagctaccctggtgggaatctgggtagcc

SEQ ID NO: 1201 - DNA, 158 bp, Artificial Sequence
  Description of Artificial Sequence: Synthetic oligonucleotide
gtgctgggcggggggcggcgggccctcccgcagaacaccatgcgctcttcggaagtttatgaactgatcttgccctgtgacctggttaacgtcagttcataaacttctgaggagcgccttgacagcagccatgggagggccgccccctacctcagtga

SEQ ID NO: 1202 - DNA, 158 bp, Artificial Sequence
  Description of Artificial Sequence: Synthetic oligonucleotide
gtgctgggcggggggcggcgggccctcccgcagaacaccatgcgctcttcggaagtttatgaactgatcttggcctgtgacctggttaacgtcagttcataaacttctgaggagcgccttgacagcagccatgggagggccgccccctacctcagtga

SEQ ID NO: 1203 - DNA, 158 bp, Artificial Sequence
  Description of Artificial Sequence: Synthetic oligonucleotide
gtgctgggcggggggcggcgggccctcccgcagaacaccatgcgctcttcggaagtttatgaactgatcttgccctgtgatttggttaacgtcagttcataaacttctgaggagcgccttgacagcagccatgggagggccgccccctacctcagtga

SEQ ID NO: 1204 - DNA, 158 bp, Artificial Sequence
  Description of Artificial Sequence: Synthetic oligonucleotide
gtgctgggcggggggcggcgggccctcccgcagaacaccatgcgctcttcggaagtttatgaactgatcttgacctgtgacctggttaacgtcagttcataaacttctgtggagcgccttgacagcagccatgggagggccgccccctacctcagtga

SEQ ID NO: 1205 - DNA, 260 bp, Artificial Sequence
  Description of Artificial Sequence: Synthetic oligonucleotide
gaagcaaagaaggggcagagggagcccgtgagctgagtgggccagggactgggagaaggagtgaggaggcagggccggcatgcctctgctgctggccagagtttatgaactgatcttgcccgtctgcacctgtcactagttaacgtcagttcataaactttggccgtgtagtgctacccagcgctggctgcctcctcagcattgcaattcctctcccatctgggcaccagtcagctaccctggtgggaatctgggtagcc

SEQ ID NO: 1206 - DNA, 158 bp, Artificial Sequence
  Description of Artificial Sequence: Synthetic oligonucleotide
gtgctgggcggggggcggcgggccctcccgcagaacaccatgcgctcttcggaaccacaatgttgtgactggccctgtgacctggtccggtcacaacattgtggttctgaggagcgccttgacagcagccatgggagggccgccccctacctcagtga

SEQ ID NO: 1207 - DNA, 158 bp, Artificial Sequence
  Description of Artificial Sequence: Synthetic oligonucleotide
gtgctgggcggggggcggcgggccctcccgcagaacaccatgcgctcttcggaaccacaatgttgtgactgggcctgtgacctggtccggtcacaacattgtggttctgaggagcgccttgacagcagccatgggagggccgccccctacctcagtga

SEQ ID NO: 1208 - DNA, 158 bp, Artificial Sequence
  Description of Artificial Sequence: Synthetic oligonucleotide
gtgctgggcggggggcggcgggccctcccgcagaacaccatgcgctcttcggaaccacaatgttgtgactggacctgtgatttggtccggtcacaacattgtggttctgaggagcgccttgacagcagccatgggagggccgccccctacctcagtga

SEQ ID NO: 1209 - DNA, 158 bp, Artificial Sequence
  Description of Artificial Sequence: Synthetic oligonucleotide
gtgctgggcggggggcggcgggccctcccgcagaacaccatgcgctcttcggaaccacaatgtagtgactggacctgtgacctggtccggtcacaacattgtggttctgtggagcgccttgacagcagccatgggagggccgccccctacctcagtga

SEQ ID NO: 1210 - DNA, 158 bp, Artificial Sequence
  Description of Artificial Sequence: Synthetic oligonucleotide
gtgctgggcggggggcggcgggccctcccgcagaacaccatgcgctcttcggaaccacaatgttgtgactggacctgtgacctggtccggtcacaacattgtggttctgtggagcgccttgacagcagccatgggagggccgccccctacctcagtga

SEQ ID NO: 1211 - DNA, 260 bp, Artificial Sequence
  Description of Artificial Sequence: Synthetic oligonucleotide
gaagcaaagaaggggcagagggagcccgtgagctgagtgggccagggactgggagaaggagtgaggaggcagggccggcatgcctctgctgctggccagaccacaatgttgtgactggaccgtctgcacctgtcactagtccggtcacaacattgtggtttggccgtgtagtgctacccagcgctggctgcctcctcagcattgcaattcctctcccatctgggcaccagtcagctaccctggtgggaatctgggtagcc

SEQ ID NO: 1212 - DNA, 158 bp, Artificial Sequence
  Description of Artificial Sequence: Synthetic oligonucleotide
gtgctgggcggggggcggcgggccctcccgcagaacaccatgcgctcttcggaagtgttagacggtactgatccctgtgacctggtgtcggtaccgtctaacacttctgaggagcgccttgacagcagccatgggagggccgccccctacctcagtga

SEQ ID NO: 1213 - DNA, 158 bp, Artificial Sequence
  Description of Artificial Sequence: Synthetic oligonucleotide
gtgctgggcggggggcggcgggccctcccgcagaacaccatgcgctcttcggaagtgttagacggtactgatgcctgtgacctggtgtcggtaccgtctaacacttctgaggagcgccttgacagcagccatgggagggccgccccctacctcagtga

SEQ ID NO: 1214 - DNA, 158 bp, Artificial Sequence
  Description of Artificial Sequence: Synthetic oligonucleotide
gtgctgggcggggggcggcgggccctcccgcagaacaccatgcgctcttcggaagtgttagacggtactgatccctgtgatttggtgtcggtaccgtctaacacttctgaggagcgccttgacagcagccatgggagggccgccccctacctcagtga

SEQ ID NO: 1215 - DNA, 158 bp, Artificial Sequence
  Description of Artificial Sequence: Synthetic oligonucleotide
gtgctgggcggggggcggcgggccctcccgcagaacaccatgcgctcttcggaagtgttagaccgtactgatacctgtgacctggtgtcggtaccgtctaacacttctgtggagcgccttgacagcagccatgggagggccgccccctacctcagtga

SEQ ID NO: 1216 - DNA, 158 bp, Artificial Sequence
  Description of Artificial Sequence: Synthetic oligonucleotide
gtgctgggcggggggcggcgggccctcccgcagaacaccatgcgctcttcggaagtgttagacggtactgatacctgtgacctggtgtcggtaccgtctaacacttctgtggagcgccttgacagcagccatgggagggccgccccctacctcagtga

SEQ ID NO: 1217 - DNA, 260 bp, Artificial Sequence
  Description of Artificial Sequence: Synthetic oligonucleotide
gaagcaaagaaggggcagagggagcccgtgagctgagtgggccagggactgggagaaggagtgaggaggcagggccggcatgcctctgctgctggccagagtgttagacggtactgatcccgtctgcacctgtcactagtgtcggtaccgtctaacactttggccgtgtagtgctacccagcgctggctgcctcctcagcattgcaattcctctcccatctgggcaccagtcagctaccctggtgggaatctgggtagcc

SEQ ID NO: 1218 - DNA, 158 bp, Artificial Sequence
  Description of Artificial Sequence: Synthetic oligonucleotide
gtgctgggcggggggcggcgggccctcccgcagaacaccatgcgctcttcggaaccgacaaccagtatttggccctgtgacctggtccaaatactggttgtcggttctgaggagcgccttgacagcagccatgggagggccgccccctacctcagtga

SEQ ID NO: 1219 - DNA, 158 bp, Artificial Sequence
  Description of Artificial Sequence: Synthetic oligonucleotide
gtgctgggcggggggcggcgggccctcccgcagaacaccatgcgctcttcggaaccgacaaccagtatttgggcctgtgacctggtccaaatactggttgtcggttctgaggagcgccttgacagcagccatgggagggccgccccctacctcagtga

SEQ ID NO: 1220 - DNA, 158 bp, Artificial Sequence
  Description of Artificial Sequence: Synthetic oligonucleotide
gtgctgggcggggggcggcgggccctcccgcagaacaccatgcgctcttcggaaccgacaaccagtatttggacctgtgatttggtccaaatactggttgtcggttctgaggagcgccttgacagcagccatgggagggccgccccctacctcagtga

SEQ ID NO: 1221 - DNA, 158 bp, Artificial Sequence
  Description of Artificial Sequence: Synthetic oligonucleotide
gtgctgggcggggggcggcgggccctcccgcagaacaccatgcgctcttcggaaccgacaacctgtatttggacctgtgacctggtccaaatactggttgtcggttctgtggagcgccttgacagcagccatgggagggccgccccctacctcagtga

SEQ ID NO: 1222 - DNA, 158 bp, Artificial Sequence
  Description of Artificial Sequence: Synthetic oligonucleotide
gtgctgggcggggggcggcgggccctcccgcagaacaccatgcgctcttcggaaccgacaaccagtatttggacctgtgacctggtccaaatactggttgtcggttctgtggagcgccttgacagcagccatgggagggccgccccctacctcagtga

SEQ ID NO: 1223 - DNA, 260 bp, Artificial Sequence
  Description of Artificial Sequence: Synthetic oligonucleotide
gaagcaaagaaggggcagagggagcccgtgagctgagtgggccagggactgggagaaggagtgaggaggcagggccggcatgcctctgctgctggccagaccgacaaccagtatttggaccgtctgcacctgtcactagtccaaatactggttgtcggtttggccgtgtagtgctacccagcgctggctgcctcctcagcattgcaattcctctcccatctgggcaccagtcagctaccctggtgggaatctgggtagcc

SEQ ID NO: 1224 - DNA, 158 bp, Artificial Sequence
  Description of Artificial Sequence: Synthetic oligonucleotide
gtgctgggcggggggcggcgggccctcccgcagaacaccatgcgctcttcggaagtcacaaagaaccgtgtaccctgtgacctggttgcacggttctttgtgacttctgaggagcgccttgacagcagccatgggagggccgccccctacctcagtga

SEQ ID NO: 1225 - DNA, 158 bp, Artificial Sequence
  Description of Artificial Sequence: Synthetic oligonucleotide
gtgctgggcggggggcggcgggccctcccgcagaacaccatgcgctcttcggaagtcacaaagaaccgtgtagcctgtgacctggttgcacggttctttgtgacttctgaggagcgccttgacagcagccatgggagggccgccccctacctcagtga

SEQ ID NO: 1226 - DNA, 158 bp, Artificial Sequence
  Description of Artificial Sequence: Synthetic oligonucleotide
gtgctgggcggggggcggcgggccctcccgcagaacaccatgcgctcttcggaagtcacaaagaaccgtgtaacctgtgatttggttgcacggttctttgtgacttctgaggagcgccttgacagcagccatgggagggccgccccctacctcagtga

SEQ ID NO: 1227 - DNA, 158 bp, Artificial Sequence
  Description of Artificial Sequence: Synthetic oligonucleotide
gtgctgggcggggggcggcgggccctcccgcagaacaccatgcgctcttcggaagtcacaaagtaccgtgtaacctgtgacctggttgcacggttctttgtgacttctgtggagcgccttgacagcagccatgggagggccgccccctacctcagtga

SEQ ID NO: 1228 - DNA, 158 bp, Artificial Sequence
  Description of Artificial Sequence: Synthetic oligonucleotide
gtgctgggcggggggcggcgggccctcccgcagaacaccatgcgctcttcggaagtcacaaagaaccgtgtaacctgtgacctggttgcacggttctttgtgacttctgtggagcgccttgacagcagccatgggagggccgccccctacctcagtga

SEQ ID NO: 1229 - DNA, 260 bp, Artificial Sequence
  Description of Artificial Sequence: Synthetic oligonucleotide
gaagcaaagaaggggcagagggagcccgtgagctgagtgggccagggactgggagaaggagtgaggaggcagggccggcatgcctctgctgctggccagagtcacaaagaaccgtgtaaccgtctgcacctgtcactagttgcacggttctttgtgactttggccgtgtagtgctacccagcgctggctgcctcctcagcattgcaattcctctcccatctgggcaccagtcagctaccctggtgggaatctgggtagcc

SEQ ID NO: 1230 - DNA, 158 bp, Artificial Sequence
  Description of Artificial Sequence: Synthetic oligonucleotide
gtgctgggcggggggcggcgggccctcccgcagaacaccatgcgctcttcggaatgaacctcttgttataaaccctgtgacctggttttataacaagaggttcattctgaggagcgccttgacagcagccatgggagggccgccccctacctcagtga

SEQ ID NO: 1231 - DNA, 158 bp, Artificial Sequence
  Description of Artificial Sequence: Synthetic oligonucleotide
gtgctgggcggggggcggcgggccctcccgcagaacaccatgcgctcttcggaatgaacctcttgttataaagcctgtgacctggttttataacaagaggttcattctgaggagcgccttgacagcagccatgggagggccgccccctacctcagtga

SEQ ID NO: 1232 - DNA, 158 bp, Artificial Sequence
  Description of Artificial Sequence: Synthetic oligonucleotide
gtgctgggcggggggcggcgggccctcccgcagaacaccatgcgctcttcggaatgaacctcttgttataaaacctgtgatttggttttataacaagaggttcattctgaggagcgccttgacagcagccatgggagggccgccccctacctcagtga

SEQ ID NO: 1233 - DNA, 158 bp, Artificial Sequence
  Description of Artificial Sequence: Synthetic oligonucleotide
gtgctgggcggggggcggcgggccctcccgcagaacaccatgcgctcttcggaatgaacctctagttataaaacctgtgacctggttttataacaagaggttcattctgtggagcgccttgacagcagccatgggagggccgccccctacctcagtga

SEQ ID NO: 1234 - DNA, 158 bp, Artificial Sequence
  Description of Artificial Sequence: Synthetic oligonucleotide
gtgctgggcggggggcggcgggccctcccgcagaacaccatgcgctcttcggaatgaacctcttgttataaaacctgtgacctggttttataacaagaggttcattctgtggagcgccttgacagcagccatgggagggccgccccctacctcagtga

SEQ ID NO: 1235 - DNA, 260 bp, Artificial Sequence
  Description of Artificial Sequence: Synthetic oligonucleotide
gaagcaaagaaggggcagagggagcccgtgagctgagtgggccagggactgggagaaggagtgaggaggcagggccggcatgcctctgctgctggccagatgaacctcttgttataaaaccgtctgcacctgtcactagttttataacaagaggttcatttggccgtgtagtgctacccagcgctggctgcctcctcagcattgcaattcctctcccatctgggcaccagtcagctaccctggtgggaatctgggtagcc

SEQ ID NO: 1236 - DNA, 158 bp, Artificial Sequence
  Description of Artificial Sequence: Synthetic oligonucleotide
gtgctgggcggggggcggcgggccctcccgcagaacaccatgcgctcttcggaagatcattggaattcctaatcctgtgacctggtttaggaattccaatgatcttctgaggagcgccttgacagcagccatgggagggccgccccctacctcagtga

SEQ ID NO: 1237 - DNA, 158 bp, Artificial Sequence
  Description of Artificial Sequence: Synthetic oligonucleotide
gtgctgggcggggggcggcgggccctcccgcagaacaccatgcgctcttcggaagatcattggaattcctaagcctgtgacctggtttaggaattccaatgatcttctgaggagcgccttgacagcagccatgggagggccgccccctacctcagtga

SEQ ID NO: 1238 - DNA, 158 bp, Artificial Sequence
  Description of Artificial Sequence: Synthetic oligonucleotide
gtgctgggcggggggcggcgggccctcccgcagaacaccatgcgctcttcggaagatcattggaattcctaaacctgtgatttggtttaggaattccaatgatcttctgaggagcgccttgacagcagccatgggagggccgccccctacctcagtga

SEQ ID NO: 1239 - DNA, 158 bp, Artificial Sequence
  Description of Artificial Sequence: Synthetic oligonucleotide
gtgctgggcggggggcggcgggccctcccgcagaacaccatgcgctcttcggaagatcattggtattcctaaacctgtgacctggtttaggaattccaatgatcttctgtggagcgccttgacagcagccatgggagggccgccccctacctcagtga

SEQ ID NO: 1240 - DNA, 158 bp, Artificial Sequence
  Description of Artificial Sequence: Synthetic oligonucleotide
gtgctgggcggggggcggcgggccctcccgcagaacaccatgcgctcttcggaagatcattggaattcctaaacctgtgacctggtttaggaattccaatgatcttctgtggagcgccttgacagcagccatgggagggccgccccctacctcagtga

SEQ ID NO: 1241 - DNA, 260 bp, Artificial Sequence
  Description of Artificial Sequence: Synthetic oligonucleotide
gaagcaaagaaggggcagagggagcccgtgagctgagtgggccagggactgggagaaggagtgaggaggcagggccggcatgcctctgctgctggccagagatcattggaattcctaaaccgtctgcacctgtcactagtttaggaattccaatgatctttggccgtgtagtgctacccagcgctggctgcctcctcagcattgcaattcctctcccatctgggcaccagtcagctaccctggtgggaatctgggtagcc

SEQ ID NO: 1242 - DNA, 158 bp, Artificial Sequence
  Description of Artificial Sequence: Synthetic oligonucleotide
gtgctgggcggggggcggcgggccctcccgcagaacaccatgcgctcttcggaacattggaattcctaaaattcctgtgacctggtattttaggaattccaatgttctgaggagcgccttgacagcagccatgggagggccgccccctacctcagtga

SEQ ID NO: 1243 - DNA, 158 bp, Artificial Sequence
  Description of Artificial Sequence: Synthetic oligonucleotide
gtgctgggcggggggcggcgggccctcccgcagaacaccatgcgctcttcggaacattggaattcctaaaatgcctgtgacctggtattttaggaattccaatgttctgaggagcgccttgacagcagccatgggagggccgccccctacctcagtga

SEQ ID NO: 1244 - DNA, 158 bp, Artificial Sequence
  Description of Artificial Sequence: Synthetic oligonucleotide
gtgctgggcggggggcggcgggccctcccgcagaacaccatgcgctcttcggaacattggaattcctaaaatacctgtgatttggtattttaggaattccaatgttctgaggagcgccttgacagcagccatgggagggccgccccctacctcagtga

SEQ ID NO: 1245 - DNA, 158 bp, Artificial Sequence
  Description of Artificial Sequence: Synthetic oligonucleotide
gtgctgggcggggggcggcgggccctcccgcagaacaccatgcgctcttcggaacattggaatacctaaaatacctgtgacctggtattttaggaattccaatgttctgtggagcgccttgacagcagccatgggagggccgccccctacctcagtga

SEQ ID NO: 1246 - DNA, 158 bp, Artificial Sequence
  Description of Artificial Sequence: Synthetic oligonucleotide
gtgctgggcggggggcggcgggccctcccgcagaacaccatgcgctcttcggaacattggaattcctaaaatacctgtgacctggtattttaggaattccaatgttctgtggagcgccttgacagcagccatgggagggccgccccctacctcagtga

SEQ ID NO: 1247 - DNA, 260 bp, Artificial Sequence
  Description of Artificial Sequence: Synthetic oligonucleotide
gaagcaaagaaggggcagagggagcccgtgagctgagtgggccagggactgggagaaggagtgaggaggcagggccggcatgcctctgctgctggccagacattggaattcctaaaataccgtctgcacctgtcactagtattttaggaattccaatgtttggccgtgtagtgctacccagcgctggctgcctcctcagcattgcaattcctctcccatctgggcaccagtcagctaccctggtgggaatctgggtagcc

SEQ ID NO: 1248 - DNA, 158 bp, Artificial Sequence
  Description of Artificial Sequence: Synthetic oligonucleotide
gtgctgggcggggggcggcgggccctcccgcagaacaccatgcgctcttcggaagcaattcagtctcgttgtccctgtgacctggtacaacgagactgaattgcttctgaggagcgccttgacagcagccatgggagggccgccccctacctcagtga

SEQ ID NO: 1249 - DNA, 158 bp, Artificial Sequence
  Description of Artificial Sequence: Synthetic oligonucleotide
gtgctgggcggggggcggcgggccctcccgcagaacaccatgcgctcttcggaagcaattcagtctcgttgtgcctgtgacctggtacaacgagactgaattgcttctgaggagcgccttgacagcagccatgggagggccgccccctacctcagtga

SEQ ID NO: 1250 - DNA, 158 bp, Artificial Sequence
  Description of Artificial Sequence: Synthetic oligonucleotide
gtgctgggcggggggcggcgggccctcccgcagaacaccatgcgctcttcggaagcaattcagtctcgttgtacctgtgatttggtacaacgagactgaattgcttctgaggagcgccttgacagcagccatgggagggccgccccctacctcagtga

SEQ ID NO: 1251 - DNA, 158 bp, Artificial Sequence
  Description of Artificial Sequence: Synthetic oligonucleotide
gtgctgggcggggggcggcgggccctcccgcagaacaccatgcgctcttcggaagcaattcagactcgttgtacctgtgacctggtacaacgagactgaattgcttctgtggagcgccttgacagcagccatgggagggccgccccctacctcagtga

SEQ ID NO: 1252 - DNA, 158 bp, Artificial Sequence
  Description of Artificial Sequence: Synthetic oligonucleotide
gtgctgggcggggggcggcgggccctcccgcagaacaccatgcgctcttcggaagcaattcagtctcgttgtacctgtgacctggtacaacgagactgaattgcttctgtggagcgccttgacagcagccatgggagggccgccccctacctcagtga

SEQ ID NO: 1253 - DNA, 260 bp, Artificial Sequence
  Description of Artificial Sequence: Synthetic oligonucleotide
gaagcaaagaaggggcagagggagcccgtgagctgagtgggccagggactgggagaaggagtgaggaggcagggccggcatgcctctgctgctggccagagcaattcagtctcgttgtaccgtctgcacctgtcactagtacaacgagactgaattgctttggccgtgtagtgctacccagcgctggctgcctcctcagcattgcaattcctctcccatctgggcaccagtcagctaccctggtgggaatctgggtagcc

SEQ ID NO: 1254 - DNA, 158 bp, Artificial Sequence
  Description of Artificial Sequence: Synthetic oligonucleotide
gtgctgggcggggggcggcgggccctcccgcagaacaccatgcgctcttcggaacctgctagctccatgcttccctgtgacctggtaagcatggagctagcaggttctgaggagcgccttgacagcagccatgggagggccgccccctacctcagtga

SEQ ID NO: 1255 - DNA, 158 bp, Artificial Sequence
  Description of Artificial Sequence: Synthetic oligonucleotide
gtgctgggcggggggcggcgggccctcccgcagaacaccatgcgctcttcggaacctgctagctccatgcttgcctgtgacctggtaagcatggagctagcaggttctgaggagcgccttgacagcagccatgggagggccgccccctacctcagtga

SEQ ID NO: 1256 - DNA, 158 bp, Artificial Sequence
  Description of Artificial Sequence: Synthetic oligonucleotide
gtgctgggcggggggcggcgggccctcccgcagaacaccatgcgctcttcggaacctgctagctccatgcttccctgtgatttggtaagcatggagctagcaggttctgaggagcgccttgacagcagccatgggagggccgccccctacctcagtga

SEQ ID NO: 1257 - DNA, 158 bp, Artificial Sequence
  Description of Artificial Sequence: Synthetic oligonucleotide
gtgctgggcggggggcggcgggccctcccgcagaacaccatgcgctcttcggaacctgctagcaccatgcttacctgtgacctggtaagcatggagctagcaggttctgtggagcgccttgacagcagccatgggagggccgccccctacctcagtga

SEQ ID NO: 1258 - DNA, 158 bp, Artificial Sequence
  Description of Artificial Sequence: Synthetic oligonucleotide
gtgctgggcggggggcggcgggccctcccgcagaacaccatgcgctcttcggaacctgctagctccatgcttacctgtgacctggtaagcatggagctagcaggttctgtggagcgccttgacagcagccatgggagggccgccccctacctcagtga

SEQ ID NO: 1259 - DNA, 260 bp, Artificial Sequence
  Description of Artificial Sequence: Synthetic oligonucleotide
gaagcaaagaaggggcagagggagcccgtgagctgagtgggccagggactgggagaaggagtgaggaggcagggccggcatgcctctgctgctggccagacctgctagctccatgcttcccgtctgcacctgtcactagtaagcatggagctagcaggtttggccgtgtagtgctacccagcgctggctgcctcctcagcattgcaattcctctcccatctgggcaccagtcagctaccctggtgggaatctgggtagcc

SEQ ID NO: 1260 - DNA, 158 bp, Artificial Sequence
  Description of Artificial Sequence: Synthetic oligonucleotide
gtgctgggcggggggcggcgggccctcccgcagaacaccatgcgctcttcggaacctgctagctccatgcttgctgtgacccaagtaagcatggagctagcaggttctgaggagcgccttgacagcagccatgggagggccgccccctacctcagtga

SEQ ID NO: 1261 - DNA, 158 bp, Artificial Sequence
  Description of Artificial Sequence: Synthetic oligonucleotide
gtgctgggcggggggcggcgggccctcccgcagaacaccatgcgctccacggaacctgctagctccatgcttgctgtgacccaagtaagcatggagctagcaggttctgaggagcgccttgacagcagccatgggagggccgccccctacctcagtga

SEQ ID NO: 1262 - DNA, 163 bp, Artificial Sequence
  Description of Artificial Sequence: Synthetic oligonucleotide
gtgctgggcggggggcggcgggccctcccgcagaacaccatgcgctccacggaacctgctagctccatgcttgctgtggccactgagaagtaagcatggagctagcaggttctgaggagcgccttgacagcagccatgggagggccgccccctacctcagtga

SEQ ID NO: 1263 - DNA, 122 bp, Artificial Sequence
  Description of Artificial Sequence: Synthetic oligonucleotide
gggccctcccgcagaacaccatgcgctccacggaacctgctagctccatgcttgctgtgacccaagtaagcatggagctagcaggttctgaggagcgccttgacagcagccatgggagggcc

SEQ ID NO: 1264 - DNA, 117 bp, Artificial Sequence
  Description of Artificial Sequence: Synthetic oligonucleotide
ctcccgcagaacaccatgcgctccacggaacctgctagctccatgcttgctgtgacccaagtaagcatggagctagcaggttctgaggagcgccttgacagcagccatgggagggcc

SEQ ID NO: 1265 - DNA, 160 bp, Artificial Sequence
  Description of Artificial Sequence: Synthetic oligonucleotide
gtgctgggcggggggcggcgggccctcccgcagaacaccatgcgctccacggaagcctgctagctccatgcttgctgtgacccaagtaagcatggagctagcaggcttctgaggagcgccttgacagcagccatgggagggccgccccctacctcagtga

SEQ ID NO: 1266 - DNA, 158 bp, Artificial Sequence
  Description of Artificial Sequence: Synthetic oligonucleotide
gtgctgggcggggggcggcgggccctcccgcagaacaccatgcgctccacggaacctgctagctccatgcttgatgtgacccaattaagcatggagctagcaggttctgaggagcgccttgacagcagccatgggagggccgccccctacctcagtga

SEQ ID NO: 1267 - DNA, 158 bp, Artificial Sequence
  Description of Artificial Sequence: Synthetic oligonucleotide
gtgctgggcggggggcggcgggccctcccgcagaacaccatgcgctcctcggaacctgctagctccatgcttgctgtgacccaagtaagcatggagctagcaggttctgcggagcgccttgacagcagccatgggagggccgccccctacctcagtga

SEQ ID NO: 1268 - DNA, 158 bp, Artificial Sequence; identical to SEQ ID NO: 1242
  Description of Artificial Sequence: Synthetic oligonucleotide

SEQ ID NO: 1269 - DNA, 158 bp, Artificial Sequence; identical to SEQ ID NO: 1236
  Description of Artificial Sequence: Synthetic oligonucleotide

SEQ ID NO: 1270 - DNA, 158 bp, Artificial Sequence; identical to SEQ ID NO: 1243
  Description of Artificial Sequence: Synthetic oligonucleotide

SEQ ID NO: 1271 - DNA, 158 bp, Artificial Sequence; identical to SEQ ID NO: 1237
  Description of Artificial Sequence: Synthetic oligonucleotide

SEQ ID NO: 1272 - DNA, 158 bp, Artificial Sequence; identical to SEQ ID NO: 1244
  Description of Artificial Sequence: Synthetic oligonucleotide

SEQ ID NO: 1273 - DNA, 158 bp, Artificial Sequence; identical to SEQ ID NO: 1238
  Description of Artificial Sequence: Synthetic oligonucleotide

SEQ ID NO: 1274 - DNA, 158 bp, Artificial Sequence; identical to SEQ ID NO: 1245
  Description of Artificial Sequence: Synthetic oligonucleotide

SEQ ID NO: 1275 - DNA, 158 bp, Artificial Sequence; identical to SEQ ID NO: 1239
  Description of Artificial Sequence: Synthetic oligonucleotide

SEQ ID NO: 1276 - DNA, 158 bp, Artificial Sequence; identical to SEQ ID NO: 1246
  Description of Artificial Sequence: Synthetic oligonucleotide

SEQ ID NO: 1277 - DNA, 158 bp, Artificial Sequence; identical to SEQ ID NO: 1240
  Description of Artificial Sequence: Synthetic oligonucleotide

SEQ ID NO: 1278 - DNA, 260 bp, Artificial Sequence; identical to SEQ ID NO: 1247
  Description of Artificial Sequence: Synthetic oligonucleotide

SEQ ID NO: 1279 - DNA, 260 bp, Artificial Sequence; identical to SEQ ID NO: 1241
  Description of Artificial Sequence: Synthetic oligonucleotide

SEQ ID NO: 1280 - DNA, 21 bp, Artificial Sequence
  Description of Artificial Sequence: Synthetic oligonucleotide
gtttatgaactgatcttaccc

SEQ ID NO: 1281 - DNA, 21 bp, Artificial Sequence
  Description of Artificial Sequence: Synthetic oligonucleotide
gtgttagacggtactgatccc

SEQ ID NO: 1282 - DNA, 21 bp, Artificial Sequence
  Description of Artificial Sequence: Synthetic oligonucleotide
cctgctagctccatgcttccc

SEQ ID NO: 1283 - DNA, 21 bp, Artificial Sequence
  Description of Artificial Sequence: Synthetic oligonucleotide
gtttatgaactgatcttagcc

SEQ ID NO: 1284 - DNA, 21 bp, Artificial Sequence
  Description of Artificial Sequence: Synthetic oligonucleotide
gtgttagacggtactgatgcc

SEQ ID NO: 1285 - DNA, 21 bp, Artificial Sequence
  Description of Artificial Sequence: Synthetic oligonucleotide
cctgctagctccatgcttgcc

SEQ ID NO: 1286 - DNA, 21 bp, Artificial Sequence
  Description of Artificial Sequence: Synthetic oligonucleotide
gtttatgaagtgatcttaacc

SEQ ID NO: 1287 - DNA, 21 bp, Artificial Sequence
  Description of Artificial Sequence: Synthetic oligonucleotide
gtgttagaccgtactgatacc

SEQ ID NO: 1288 - DNA, 21 bp, Artificial Sequence
  Description of Artificial Sequence: Synthetic oligonucleotide
cctgctagcaccatgcttacc

SEQ ID NO: 1289 - DNA, 21 bp, Artificial Sequence
  Description of Artificial Sequence: Synthetic oligonucleotide
gtttatgaactgatcttaacc

SEQ ID NO: 1290 - DNA, 21 bp, Artificial Sequence
  Description of Artificial Sequence: Synthetic oligonucleotide
gtgttagacggtactgatacc

SEQ ID NO: 1291 - DNA, 21 bp, Artificial Sequence
  Description of Artificial Sequence: Synthetic oligonucleotide
cctgctagctccatgcttacc

SEQ ID NO: 1292 - DNA, 21 bp, Artificial Sequence
  Description of Artificial Sequence: Synthetic oligonucleotide
gtttatgaactgatcttgccc

SEQ ID NO: 1293 - DNA, 21 bp, Artificial Sequence
  Description of Artificial Sequence: Synthetic oligonucleotide
gtttatgaactgatcttggcc

SEQ ID NO: 1294 - DNA, 21 bp, Artificial Sequence
  Description of Artificial Sequence: Synthetic oligonucleotide
gtttatgaactgatcttgacc

SEQ ID NO: 1295 - DNA, 21 bp, Artificial Sequence
  Description of Artificial Sequence: Synthetic oligonucleotide
gcaattcagtctcgttgtccc

SEQ ID NO: 1296 - DNA, 21 bp, Artificial Sequence
  Description of Artificial Sequence: Synthetic oligonucleotide
tccaggtttatgaactgaccc

SEQ ID NO: 1297 - DNA, 21 bp, Artificial Sequence
  Description of Artificial Sequence: Synthetic oligonucleotide
ggtttatgaactgacgttccc

SEQ ID NO: 1298 - DNA, 21 bp, Artificial Sequence
  Description of Artificial Sequence: Synthetic oligonucleotide
ccacaatgttgtgactggccc

SEQ ID NO: 1299 - DNA, 21 bp, Artificial Sequence
  Description of Artificial Sequence: Synthetic oligonucleotide
gtcacaaagaaccgtgtaccc

SEQ ID NO: 1300 - DNA, 21 bp, Artificial Sequence
  Description of Artificial Sequence: Synthetic oligonucleotide
tgaacctcttgttataaaccc

SEQ ID NO: 1301 - DNA, 21 bp, Artificial Sequence
  Description of Artificial Sequence: Synthetic oligonucleotide
ccgacaaccagtatttggccc

SEQ ID NO: 1302 - DNA, 21 bp, Artificial Sequence
  Description of Artificial Sequence: Synthetic oligonucleotide
gcaattcagtctcgttgtgcc

SEQ ID NO: 1303 - DNA, 21 bp, Artificial Sequence
  Description of Artificial Sequence: Synthetic oligonucleotide
tccaggtttatgaactgagcc

SEQ ID NO: 1304 - DNA, 21 bp, Artificial Sequence
  Description of Artificial Sequence: Synthetic oligonucleotide
ggtttatgaactgacgttgcc

SEQ ID NO: 1305 - DNA, 21 bp, Artificial Sequence
  Description of Artificial Sequence: Synthetic oligonucleotide
ccacaatgttgtgactgggcc

SEQ ID NO: 1306 - DNA, 21 bp, Artificial Sequence
  Description of Artificial Sequence: Synthetic oligonucleotide
gtcacaaagaaccgtgtagcc

SEQ ID NO: 1307 - DNA, 21 bp, Artificial Sequence
  Description of Artificial Sequence: Synthetic oligonucleotide
tgaacctcttgttataaagcc

SEQ ID NO: 1308 - DNA, 21 bp, Artificial Sequence
  Description of Artificial Sequence: Synthetic oligonucleotide
ccgacaaccagtatttgggcc

SEQ ID NO: 1309 - DNA, 21 bp, Artificial Sequence
  Description of Artificial Sequence: Synthetic oligonucleotide
gcaattcagtctcgttgtacc

SEQ ID NO: 1310 - DNA, 21 bp, Artificial Sequence
  Description of Artificial Sequence: Synthetic oligonucleotide
tccaggtttatgaactgaacc

SEQ ID NO: 1311 - DNA, 21 bp, Artificial Sequence
  Description of Artificial Sequence: Synthetic oligonucleotide
ggtttatgaactgacgttacc

SEQ ID NO: 1312 - DNA, 21 bp, Artificial Sequence
  Description of Artificial Sequence: Synthetic oligonucleotide
ccacaatgttgtgactggacc

SEQ ID NO: 1313 - DNA, 21 bp, Artificial Sequence
  Description of Artificial Sequence: Synthetic oligonucleotide
gtcacaaagaaccgtgtaacc

SEQ ID NO: 1314 - DNA, 21 bp, Artificial Sequence
  Description of Artificial Sequence: Synthetic oligonucleotide
tgaacctcttgttataaaacc

SEQ ID NO: 1315 - DNA, 21 bp, Artificial Sequence
  Description of Artificial Sequence: Synthetic oligonucleotide
ccgacaaccagtatttggacc

SEQ ID NO: 1316 - DNA, 21 bp, Artificial Sequence
  Description of Artificial Sequence: Synthetic oligonucleotide
gcaattcagactcgttgtacc

SEQ ID NO: 1317 - DNA, 21 bp, Artificial Sequence
  Description of Artificial Sequence: Synthetic oligonucleotide
tccaggtttttgaactgaacc

SEQ ID NO: 1318 - DNA, 21 bp, Artificial Sequence
  Description of Artificial Sequence: Synthetic oligonucleotide
ggtttatgatctgacgttacc

SEQ ID NO: 1319 - DNA, 21 bp, Artificial Sequence
  Description of Artificial Sequence: Synthetic oligonucleotide
ccacaatgtagtgactggacc

SEQ ID NO: 1320 - DNA, 21 bp, Artificial Sequence
  Description of Artificial Sequence: Synthetic oligonucleotide
gtcacaaagtaccgtgtaacc

SEQ ID NO: 1321 - DNA, 21 bp, Artificial Sequence
  Description of Artificial Sequence: Synthetic oligonucleotide
tgaacctctagttataaaacc

SEQ ID NO: 1322 - DNA, 21 bp, Artificial Sequence
  Description of Artificial Sequence: Synthetic oligonucleotide
ccgacaacctgtatttggacc

SEQ ID NO: 1323 - DNA, 21 bp, Artificial Sequence
  Description of Artificial Sequence: Synthetic oligonucleotide
cattggaattcctaaaattcc

SEQ ID NO: 1324 - DNA, 21 bp, Artificial Sequence
  Description of Artificial Sequence: Synthetic oligonucleotide
gatcattggaattcctaatcc

SEQ ID NO: 1325 - DNA, 21 bp, Artificial Sequence
  Description of Artificial Sequence: Synthetic oligonucleotide
cattggaattcctaaaatgcc

SEQ ID NO: 1326 - DNA, 21 bp, Artificial Sequence
  Description of Artificial Sequence: Synthetic oligonucleotide
gatcattggaattcctaagcc

SEQ ID NO: 1327 - DNA, 21 bp, Artificial Sequence
  Description of Artificial Sequence: Synthetic oligonucleotide
cattggaattcctaaaatacc

SEQ ID NO: 1328 - DNA, 21 bp, Artificial Sequence
  Description of Artificial Sequence: Synthetic oligonucleotide
gatcattggaattcctaaacc

SEQ ID NO: 1329 - DNA, 21 bp, Artificial Sequence
  Description of Artificial Sequence: Synthetic oligonucleotide
cattggaatacctaaaatacc

SEQ ID NO: 1330 - DNA, 21 bp, Artificial Sequence
  Description of Artificial Sequence: Synthetic oligonucleotide
gatcattggtattcctaaacc

SEQ ID NO: 1331 - DNA, 21 bp, Artificial Sequence
  Description of Artificial Sequence: Synthetic oligonucleotide
cctgctagctccatgcttgct

SEQ ID NO: 1332 - DNA, 21 bp, Artificial Sequence
  Description of Artificial Sequence: Synthetic oligonucleotide
cctgctagctccatgcttgat

SEQ ID NO: 1333 - DNA, 21 bp, Artificial Sequence
  Description of Artificial Sequence: Synthetic oligonucleotide
ttaacgtcagttcataaactt

SEQ ID NO: 1334 - DNA, 21 bp, Artificial Sequence
  Description of Artificial Sequence: Synthetic oligonucleotide
tgtcggtaccgtctaacactt

SEQ ID NO: 1335 - DNA, 21 bp, Artificial Sequence
  Description of Artificial Sequence: Synthetic oligonucleotide
taagcatggagctagcaggtt

SEQ ID NO: 1336 - DNA, 21 bp, Artificial Sequence
  Description of Artificial Sequence: Synthetic oligonucleotide
tacaacgagactgaattgctt

SEQ ID NO: 1337 - DNA, 21 bp, Artificial Sequence
  Description of Artificial Sequence: Synthetic oligonucleotide
ttcagttcataaacctggatt

SEQ ID NO: 1338 - DNA, 21 bp, Artificial Sequence
  Description of Artificial Sequence: Synthetic oligonucleotide
taacgtcagttcataaacctt

SEQ ID NO: 1339 - DNA, 21 bp, Artificial Sequence
  Description of Artificial Sequence: Synthetic oligonucleotide
tccggtcacaacattgtggtt

SEQ ID NO: 1340 - DNA, 21 bp, Artificial Sequence
  Description of Artificial Sequence: Synthetic oligonucleotide
ttgcacggttctttgtgactt

SEQ ID NO: 1341 - DNA, 21 bp, Artificial Sequence
  Description of Artificial Sequence: Synthetic oligonucleotide
ttttataacaagaggttcatt

SEQ ID NO: 1342 - DNA, 21 bp, Homo sapiens3
tccaaatactggttgtcggtt

SEQ ID NO: 1343 - DNA, 21 bp, Artificial Sequence
  Description of Artificial Sequence: Synthetic oligonucleotide
tattttaggaattccaatgtt

SEQ ID NO: 1344 - DNA, 21 bp, Artificial Sequence
  Description of Artificial Sequence: Synthetic oligonucleotide
tttaggaattccaatgatctt

SEQ ID NO: 1345 - DNA, 22 bp, Artificial Sequence
  Description of Artificial Sequence: Synthetic oligonucleotide
taagcatggagctagcaggctt

SEQ ID NO: 1346 - DNA, 158 bp, Artificial Sequence
  Description of Artificial Sequence: Synthetic oligonucleotide
gtgctgggcggggggcggcgggccctcccgcagaacaccatgcgctccacggaataagcatggagctagcagggtgtgacccaaccctgctagctccatgcttattctgaggagcgccttgacagcagccatgggagggccgccccctacctcagtga

SEQ ID NO: 1347 - DNA, 163 bp, Artificial Sequence
  Description of Artificial Sequence: Synthetic oligonucleotide
gtgctgggcggggggcggcgggccctcccgcagaacaccatgcgctcctcggaataagcatggagctagcaggttgtggccactgagaaacctgctagctccatgcttgttctgcggagcgccttgacagcagccatgggagggccgccccctacctcagtga

SEQ ID NO: 1348 - DNA, 21 bp, Artificial Sequence
  Description of Artificial Sequence: Synthetic oligonucleotide
cctgctagctccatgcttatt

SEQ ID NO: 1349 - DNA, 21 bp, Artificial Sequence
  Description of Artificial Sequence: Synthetic oligonucleotide
cctgctagctccatgcttgtt

SEQ ID NO: 1350 - DNA, 21 bp, Artificial Sequence
  Description of Artificial Sequence: Synthetic oligonucleotide
taagcatggagctagcagggt

SEQ ID NO: 1351 - DNA, 21 bp, Artificial Sequence
  Description of Artificial Sequence: Synthetic oligonucleotide
taagcatggagctagcaggtt

SEQ ID NO: 1352 - DNA, 2301 bp, Artificial Sequence
  Description of Artificial Sequence: Synthetic polynucleotide
cctgcaggcagctgcgcgctcgctcgctcactgaggccgcccgggcaaagcccgggcgtcgggcgacctttggtcgcccggcctcagtgagcgagcgagcgcgcagagagggagtggccaactccatcactaggggttccttgtagttaatgattaacccgccatgctacttatctacgtagccatgcgtcgacataacgcgtcgacattgattattgactagttattaatagtaatcaattacggggtcattagttcatagcccatatatggagttccgcgttacataacttacggtaaatggcccgcctggctgaccgcccaacgacccccgcccattgacgtcaataatgacgtatgttcccatagtaacgccaatagggactttccattgacgtcaatgggtggagtatttacggtaaactgcccacttggcagtacatcaagtgtatcatatgccaagtacgccccctattgacgtcaatgacggtaaatggcccgcctggcattatgcccagtacatgaccttatgggactttcctacttggcagtacatctacgtattagtcatcgctattaccatgtcgaggccacgttctgcttcactctccccatctcccccccctccccacccccaattttgtatttatttattttttaattattttgtgcagcgatgggggcggggggggggggcgcgcgccaggcggggcggggcggggcgaggggcggggcggggcgaggcggagaggtgcggcggcagccaatcagagcggcgcgctccgaaagtttccttttatggcgaggcggcggcggcggcggccctataaaaagcgaagcgcgcggcgggcgggagcaagcttgaactgaaaaaccagaaagttaactggtaagtttagtctttttgtcttttatttcaggtcccggatccggtggtggtgcaaatcaaagaactgctcctcagtggatgttgcctttacttctaggcctgtacggaagtgttacttctgctctaaaagctgcggaattgtacccgcggccgatccaccggtgtgctgggcggggggcggcgggccctcccgcagaacaccatgcgctccacggaacctgctagctccatgcttgctgtggccactgagaagtaagcatggagctagcaggttctgaggagcgccttgacagcagccatgggagggccgccccctacctcagtgactcgaggacggggtgaactacgcctgaggatccgatctttttccctctgccaaaaattatggggacatcatgaagccccttgagcatctgacttctggctaataaaggaaatttattttcattgcaatagtgtgttggaattttttgtgtctctcactcgactagatttaaataattcgcccttgggcctaggcaattggatccgccggcagagaaaacatcccagggatttacagatcacatgcaggcagggaccagctcaacccttctttaatgtcatccagggagggggccagggatggaggggaggggttgaggagcgagaggcagttatttttgggtgggattcaccacttttcccatgaagaggggagacttggtattttgttcaatcattaagaagacaaagggtttgttgaacttgacctcgggggggatagacatgggtatggcctctaaaaacatggccccagcagcttcagtccctttctcgtcgatggtcagcacagccttatgcacggcctggaggggagagaagcagagacacgttgtaaggctgatcccaggcctcgagcaaggctcacgtggacacctcccaggaagcgctcactccccctggacggccctggccctgcacatcctctccctccctgtcacataggccttgctcctcctcaaggctttggctgatggggctggctcccctctgtccatcttcctgacaagcgcctctccccctgctcaggtgcacccacaactcagaacagggaagagcatcgtcactccacgtctgcctccagggctctctcctttctagtacacggcttgaagctccttgaggacacggaccctggcagtgaccttcacagtgcccagaccatttaaatatgtcgtgcatcgatgctacgtagataagtagcatggcgggttaatcattaactacagaggaacccctagtgatggagttggccactccctctctgcgcgctcgctcgctcactgaggccgggcgaccaaaggtcgcccgacgcccgggctttgcccgggcggcctcagtgagcgagcgagcgcgcagctgcctgcagg

SEQ ID NO: 1353 - DNA, 4608 bp, Artificial Sequence
  Description of Artificial Sequence: Synthetic polynucleotide
cctgcaggcagctgcgcgctcgctcgctcactgaggccgcccgggcaaagcccgggcgtcgggcgacctttggtcgcccggcctcagtgagcgagcgagcgcgcagagagggagtggccaactccatcactaggggttccttgtagttaatgattaacccgccatgctacttatctacgtagccatgcgtcgacataacgcgtcgacattgattattgactagttattaatagtaatcaattacggggtcattagttcatagcccatatatggagttccgcgttacataacttacggtaaatggcccgcctggctgaccgcccaacgacccccgcccattgacgtcaataatgacgtatgttcccatagtaacgccaatagggactttccattgacgtcaatgggtggagtatttacggtaaactgcccacttggcagtacatcaagtgtatcatatgccaagtacgccccctattgacgtcaatgacggtaaatggcccgcctggcattatgcccagtacatgaccttatgggactttcctacttggcagtacatctacgtattagtcatcgctattaccatgtcgaggccacgttctgcttcactctccccatctcccccccctccccacccccaattttgtatttatttattttttaattattttgtgcagcgatgggggcggggggggggggcgcgcgccaggcggggcggggcggggcgaggggcggggcggggcgaggcggagaggtgcggcggcagccaatcagagcggcgcgctccgaaagtttccttttatggcgaggcggcggcggcggcggccctataaaaagcgaagcgcgcggcgggcgggagcaagcttgaactgaaaaaccagaaagttaactggtaagtttagtctttttgtcttttatttcaggtcccggatccggtggtggtgcaaatcaaagaactgctcctcagtggatgttgcctttacttctaggcctgtacggaagtgttacttctgctctaaaagctgcggaattgtacccgcggccgatccaccggtgtgctgggcggggggcggcgggccctcccgcagaacaccatgcgctccacggaacctgctagctccatgcttgctgtggccactgagaagtaagcatggagctagcaggttctgaggagcgccttgacagcagccatgggagggccgccccctacctcagtgactcgaggacggggtgaactacgcctgaggatccgatctttttccctctgccaaaaattatggggacatcatgaagccccttgagcatctgacttctggctaataaaggaaatttattttcattgcaatagtgtgttggaattttttgtgtctctcactcgactagatttaaataattcgcccttgggcctaggcaattggatccgccggcagagaaaacatcccagggatttacagatcacatgcaggcagggaccagctcaacccttctttaatgtcatccagggagggggccagggatggaggggaggggttgaggagcgagaggcagttatttttgggtgggattcaccacttttcccatgaagaggggagacttggtattttgttcaatcattaagaagacaaagggtttgttgaacttgacctcgggggggatagacatgggtatggcctctaaaaacatggccccagcagcttcagtccctttctcgtcgatggtcagcacagccttatgcacggcctggaggggagagaagcagagacacgttgtaaggctgatcccaggcctcgagcaaggctcacgtggacacctcccaggaagcgctcactccccctggacggccctggccctgcacatcctctccctccctgtcacataggccttgctcctcctcaaggctttggctgatggggctggctcccctctgtccatcttcctgacaagcgcctctccccctgctcaggtgcacccacaactcagaacagggaagagcatcgtcactccacgtctgcctccagggctctctcctttctagtacacggcttgaagctccttgaggacacggaccctggcagtgaccttcacagtgcccagaccccaagataatgcagccattcatggaactgcaggttgttcattggtcgcctttagttttccaaaataagtgtcactttagctgaaatcattcattaattcagacaccaaatctcacagatcgaaggagtcagaaattcctttgaaacaacttagcccaaacctttctgtgtcagtatggataaatcaaggcccaatgtctagaaggtcttgggcaaagttgaaattcagggtcagtgacacaacctcaagggaggccccgaaagtgccagctgcacagcagcccctgcctggctttgctgtttgcccaccgtcccgtgtcagtgaatcacgggcatcttcaggagctcagcctgggtcttcatttgtttccctcggccccttcctcagcctcaggacagtgctgcagcccccacacattcttccctacagataccatggtgcaacaaggtcgtcagggtgatctcaccttggagagcttcaggggtgcctcctctgtgaccccggagaggtcagccccattgctgaagaccttagtgatgcccagttgacccaggacgctcttcagatcataggttccagtaatggacagtttgggtaaatgtaagctggcagacctgtcgtgcagaaaagaaattcaaggcatggcacagcattcctcttgttcttctgggacccaccacagtgcaagtgttttcttttctgattatttctgccacttactcctgtgtcctccacccacactaagatgggaactcggctttggtttgttctacttttagctcttctacattgagtcaaagaatgttaacatcgaatgaatcacaaaagcttgaaatgccacctcctctgatattctaggtgtcctggaagcctgtctcatcttgccctgtagtgttgggtcacctggcccccagcctgtaacatccccagggccctacacccagagaaacacggggctggtggcagtgcccagtgacaaccgtttagtggataagagaagagtgaccacaccaggctgagtgctcctctctggttttccatggggagacaatgccaccctgagcagggtctggtgtgagcggcagctggctctgggctctctgatccgttaccctctcagcctctttgttctttctcaacccctggagcagagacctcaggaggtgctggcatggaacagagaaattccagcctcgattcctattatgaacccgacaccttttgtattttcatcttggttttacagtgtacaaaacgaactagatcagcagggcatgggcataatcacgaatgcacacacatacactaatgtgtggctcatgtttaagtatcacttactacaggacacccaatctaacagcaccgataaagtgacagagaaacgcaagccttctgcgaacatggcctggctgttccaattccgaaccttgcttttctgggccttgccacacaggctcttcccccgtccccccagggacattctacccttgaactccacactccactgctgcctttgccaggaagcccatctgttcctttttggttctgccagaacgtgtggtggtgctgctgtccctgccttgggcactggatattgggaagggacagtgtccacactggagtgggaagttcccagggacgagacctttacctcctcaccctgggtactgttctcctcatggagcatggacggcgctgcctgaactcagtggtggcctcattctggaagccaagtttatacagagtagcagtgacccagggatgtggggttcaccctcctcagccctctggccagtcctgatgggcctcagtcccaacatggctaagaggtgtgggcagcttcttggtcaccctcaggttggggaatcaccttctgtcttcattttccaggaacttggtgatgatatcgtgggtgagttcatttaccaggtgctgtagtttcccctcatcaggcaggaagaagatggcggtggcattgcccaggtatttcatcagcagcacccagctggacagcttcttacagtgctggatgttaaacatgcctaaacgcttcatcataggcaccttcacggtggtcacctggtccacgtggaagtcctcttcctcggtgtccttgacttcaaagggtctctcccatttgcctggagagaggggaaggtgggcatcaccaggggtgagtgaaggtttggaagagtgtagcagaataagaaaccatgagtcccctccctgagaagccctgagcccccttgacgacacacatccctcgaggctcagcttcatcatctgtaaaaggtgctgaaactgaccatttaaatatgtcgtgcatcgatgctacgtagataagtagcatggcgggttaatcattaactacagaggaacccctagtgatggagttggccactccctctctgcgcgctcgctcgctcactgaggccgggcgaccaaaggtcgcccgacgcccgggctttgcccgggcggcctcagtgagcgagcgagcgcgcagctgcctgcagg

SEQ ID NO: 1354 - DNA, 2296 bp, Artificial Sequence
  Description of Artificial Sequence: Synthetic polynucleotide
cctgcaggcagctgcgcgctcgctcgctcactgaggccgcccgggcaaagcccgggcgtcgggcgacctttggtcgcccggcctcagtgagcgagcgagcgcgcagagagggagtggccaactccatcactaggggttccttgtagttaatgattaacccgccatgctacttatctacgtagccatgcgtcgacataacgcgtcgacattgattattgactagttattaatagtaatcaattacggggtcattagttcatagcccatatatggagttccgcgttacataacttacggtaaatggcccgcctggctgaccgcccaacgacccccgcccattgacgtcaataatgacgtatgttcccatagtaacgccaatagggactttccattgacgtcaatgggtggagtatttacggtaaactgcccacttggcagtacatcaagtgtatcatatgccaagtacgccccctattgacgtcaatgacggtaaatggcccgcctggcattatgcccagtacatgaccttatgggactttcctacttggcagtacatctacgtattagtcatcgctattaccatgtcgaggccacgttctgcttcactctccccatctcccccccctccccacccccaattttgtatttatttattttttaattattttgtgcagcgatgggggcggggggggggggcgcgcgccaggcggggcggggcggggcgaggggcggggcggggcgaggcggagaggtgcggcggcagccaatcagagcggcgcgctccgaaagtttccttttatggcgaggcggcggcggcggcggccctataaaaagcgaagcgcgcggcgggcgggagcaagcttgaactgaaaaaccagaaagttaactggtaagtttagtctttttgtcttttatttcaggtcccggatccggtggtggtgcaaatcaaagaactgctcctcagtggatgttgcctttacttctaggcctgtacggaagtgttacttctgctctaaaagctgcggaattgtacccgcggccgatccaccggtgtgctgggcggggggcggcgggccctcccgcagaacaccatgcgctcttcggaagcaattcagtctcgttgtacctgtgatttggtacaacgagactgaattgcttctgaggagcgccttgacagcagccatgggagggccgccccctacctcagtgactcgaggacggggtgaactacgcctgaggatccgatctttttccctctgccaaaaattatggggacatcatgaagccccttgagcatctgacttctggctaataaaggaaatttattttcattgcaatagtgtgttggaattttttgtgtctctcactcgactagatttaaataattcgcccttgggcctaggcaattggatccgccggcagagaaaacatcccagggatttacagatcacatgcaggcagggaccagctcaacccttctttaatgtcatccagggagggggccagggatggaggggaggggttgaggagcgagaggcagttatttttgggtgggattcaccacttttcccatgaagaggggagacttggtattttgttcaatcattaagaagacaaagggtttgttgaacttgacctcgggggggatagacatgggtatggcctctaaaaacatggccccagcagcttcagtccctttctcgtcgatggtcagcacagccttatgcacggcctggaggggagagaagcagagacacgttgtaaggctgatcccaggcctcgagcaaggctcacgtggacacctcccaggaagcgctcactccccctggacggccctggccctgcacatcctctccctccctgtcacataggccttgctcctcctcaaggctttggctgatggggctggctcccctctgtccatcttcctgacaagcgcctctccccctgctcaggtgcacccacaactcagaacagggaagagcatcgtcactccacgtctgcctccagggctctctcctttctagtacacggcttgaagctccttgaggacacggaccctggcagtgaccttcacagtgcccagaccatttaaatatgtcgtgcatcgatgctacgtagataagtagcatggcgggttaatcattaactacagaggaacccctagtgatggagttggccactccctctctgcgcgctcgctcgctcactgaggccgggcgaccaaaggtcgcccgacgcccgggctttgcccgggcggcctcagtgagcgagcgagcgcgcagctgcctgcagg

SEQ ID NO: 1355 - DNA, 2301 bp, Artificial Sequence
  Description of Artificial Sequence: Synthetic polynucleotide
cctgcaggcagctgcgcgctcgctcgctcactgaggccgcccgggcaaagcccgggcgtcgggcgacctttggtcgcccggcctcagtgagcgagcgagcgcgcagagagggagtggccaactccatcactaggggttccttgtagttaatgattaacccgccatgctacttatctacgtagccatgcgtcgacataacgcgtcgacattgattattgactagttattaatagtaatcaattacggggtcattagttcatagcccatatatggagttccgcgttacataacttacggtaaatggcccgcctggctgaccgcccaacgacccccgcccattgacgtcaataatgacgtatgttcccatagtaacgccaatagggactttccattgacgtcaatgggtggagtatttacggtaaactgcccacttggcagtacatcaagtgtatcatatgccaagtacgccccctattgacgtcaatgacggtaaatggcccgcctggcattatgcccagtacatgaccttatgggactttcctacttggcagtacatctacgtattagtcatcgctattaccatgtcgaggccacgttctgcttcactctccccatctcccccccctccccacccccaattttgtatttatttattttttaattattttgtgcagcgatgggggcggggggggggggcgcgcgccaggcggggcggggcggggcgaggggcggggcggggcgaggcggagaggtgcggcggcagccaatcagagcggcgcgctccgaaagtttccttttatggcgaggcggcggcggcggcggccctataaaaagcgaagcgcgcggcgggcgggagcaagcttgaactgaaaaaccagaaagttaactggtaagtttagtctttttgtcttttatttcaggtcccggatccggtggtggtgcaaatcaaagaactgctcctcagtggatgttgcctttacttctaggcctgtacggaagtgttacttctgctctaaaagctgcggaattgtacccgcggccgatccaccggtgtgctgggcggggggcggcgggccctcccgcagaacaccatgcgctcctcggaataagcatggagctagcaggttgtggccactgagaaacctgctagctccatgcttgttctgcggagcgccttgacagcagccatgggagggccgccccctacctcagtgactcgaggacggggtgaactacgcctgaggatccgatctttttccctctgccaaaaattatggggacatcatgaagccccttgagcatctgacttctggctaataaaggaaatttattttcattgcaatagtgtgttggaattttttgtgtctctcactcgactagatttaaataattcgcccttgggcctaggcaattggatccgccggcagagaaaacatcccagggatttacagatcacatgcaggcagggaccagctcaacccttctttaatgtcatccagggagggggccagggatggaggggaggggttgaggagcgagaggcagttatttttgggtgggattcaccacttttcccatgaagaggggagacttggtattttgttcaatcattaagaagacaaagggtttgttgaacttgacctcgggggggatagacatgggtatggcctctaaaaacatggccccagcagcttcagtccctttctcgtcgatggtcagcacagccttatgcacggcctggaggggagagaagcagagacacgttgtaaggctgatcccaggcctcgagcaaggctcacgtggacacctcccaggaagcgctcactccccctggacggccctggccctgcacatcctctccctccctgtcacataggccttgctcctcctcaaggctttggctgatggggctggctcccctctgtccatcttcctgacaagcgcctctccccctgctcaggtgcacccacaactcagaacagggaagagcatcgtcactccacgtctgcctccagggctctctcctttctagtacacggcttgaagctccttgaggacacggaccctggcagtgaccttcacagtgcccagaccatttaaatatgtcgtgcatcgatgctacgtagataagtagcatggcgggttaatcattaactacagaggaacccctagtgatggagttggccactccctctctgcgcgctcgctcgctcactgaggccgggcgaccaaaggtcgcccgacgcccgggctttgcccgggcggcctcagtgagcgagcgagcgcgcagctgcctgcagg

SEQ ID NO: 1356 - DNA, 4606 bp, Artificial Sequence
  Description of Artificial Sequence: Synthetic polynucleotide
cctgcaggcagctgcgcgctcgctcgctcactgaggccgcccgggcaaagcccgggcgtcgggcgacctttggtcgcccggcctcagtgagcgagcgagcgcgcagagagggagtggccaactccatcactaggggttccttgtagttaatgattaacccgccatgctacttatctacgtagccatgcgtcgacataacgcgtaattcgcccttgggcctaggcaattggatccgccggcagagaaaacatcccagggatttacagatcacatgcaggcagggaccagctcaacccttctttaatgtcatccagggagggggccagggatggaggggaggggttgaggagcgagaggcagttatttttgggtgggattcaccacttttcccatgaagaggggagacttggtattttgttcaatcattaagaagacaaagggtttgttgaacttgacctcgggggggatagacatgggtatggcctctaaaaacatggccccagcagcttcagtccctttctcgtcgatggtcagcacagccttatgcacggcctggaggggagagaagcagagacacgttgtaaggctgatcccaggcctcgagcaaggctcacgtggacacctcccaggaagcgctcactccccctggacggccctggccctgcacatcctctccctccctgtcacataggccttgctcctcctcaaggctttggctgatggggctggctcccctctgtccatcttcctgacaagcgcctctccccctgctcaggtgcacccacaactcagaacagggaagagcatcgtcactccacgtctgcctccagggctctctcctttctagtacacggcttgaagctccttgaggacacggaccctggcagtgaccttcacagtgcccagaccccaagataatgcagccattcatggaactgcaggttgttcattggtcgcctttagttttccaaaataagtgtcactttagctgaaatcattcattaattcagacaccaaatctcacagatcgaaggagtcagaaattcctttgaaacaacttagcccaaacctttctgtgtcagtatggataaatcaaggcccaatgtctagaaggtcttgggcaaagttgaaattcagggtcagtgacacaacctcaagggaggccccgaaagtgccagctgcacagcagcccctgcctggctttgctgtttgcccaccgtcccgtgtcagtgaatcacgggcatcttcaggagctcagcctgggtcttcatttgtttccctcggccccttcctcagcctcaggacagtgctgcagcccccacacattcttccctacagataccatggtgcaacaaggtcgtcagggtgatctcaccttggagagcttcaggggtgcctcctctgtgaccccggagaggtcagccccattgctgaagaccttagtgatgcccagttgacccaggacgctcttcagatcataggttccagtaatggacagtttgggtaaatgtaagctggcagacctgtcgtgcagaaaagaaattcaaggcatggcacagcattcctcttgttcttctgggacccaccacagtgcaagtgttttcttttctgattatttctgccacttactcctgtgtcctccacccacactaagatgggaactcggctttggtttgttctacttttagctcttctacattgagtcaaagaatgttaacatcgaatgaatcacaaaagcttgaaatgccacctcctctgatattctaggtgtcctggaagcctgtctcatcttgccctgtagtgttgggtcacctggcccccagcctgtaacatccccagggccctacacccagagaaacacggggctggtggcagtgcccagtgacaaccgtttagtggataagagaagagtgaccacaccaggctgagtgctcctctctggttttccatggggagacaatgccaccctgagcagggtctggtgtgagcggcagctggctctgggctctctgatccgttaccctctcagcctctttgttctttctcaacccctggagcagagacctcaggaggtgctggcatggaacagagaaattccagcctcgattcctattatgaacccgacaccttttgtattttcatcttggttttacagtgtacaaaacgaactagatcagcagggcatgggcataatcacgaatgcacacacatacactaatgtgtggctcatgtttaagtatcacttactacaggacacccaatctaacagcaccgataaagtgacagagaaacgcaagccttctgcgaacatggcctggctgttccaattccgaaccttgcttttctgggccttgccacacaggctcttcccccgtccccccagggacattctacccttgaactccacactccactgctgcctttgccaggaagcccatctgttcctttttggttctgccagaacgtgtggtggtgctgctgtccctgccttgggcactggatattgggaagggacagtgtccacactggagtgggaagttcccagggacgagacctttacctcctcaccctgggtactgttctcctcatggagcatggacggcgctgcctgaactcagtggtggcctcattctggaagccaagtttatacagagtagcagtgacccagggatgtggggttcaccctcctcagccctctggccagtcctgatgggcctcagtcccaacatggctaagaggtgtgggcagcttcttggtcaccctcaggttggggaatcaccttctgtcttcattttccaggaacttggtgatgatatcgtgggtgagttcatttaccaggtgctgtagtttcccctcatcaggcaggaagaagatggcggtggcattgcccaggtatttcatcagcagcacccagctggacagcttcttacagtgctggatgttaaacatgcctaaacgcttcatcataggcaccttcacggtggtcacctggtccacgtggaagtcctcttcctcggtgtccttgacttcaaagggtctctcccatttgcctggagagaggggaaggtgggcatcaccaggggtgagtgaaggtttggaagagtgtagcagaataagaaaccatgagtcccctccctgagaagccctgagcccccttgacgacacacatccctcgaggctcagcttcatcatctgtaaaaggtgctgaaactgaccacgcgtcgacattgattattgactagttattaatagtaatcaattacggggtcattagttcatagcccatatatggagttccgcgttacataacttacggtaaatggcccgcctggctgaccgcccaacgacccccgcccattgacgtcaataatgacgtatgttcccatagtaacgccaatagggactttccattgacgtcaatgggtggagtatttacggtaaactgcccacttggcagtacatcaagtgtatcatatgccaagtacgccccctattgacgtcaatgacggtaaatggcccgcctggcattatgcccagtacatgaccttatgggactttcctacttggcagtacatctacgtattagtcatcgctattaccatgtcgaggccacgttctgcttcactctccccatctcccccccctccccacccccaattttgtatttatttattttttaattattttgtgcagcgatgggggcggggggggggggcgcgcgccaggcggggcggggcggggcgaggggcggggcggggcgaggcggagaggtgcggcggcagccaatcagagcggcgcgctccgaaagtttccttttatggcgaggcggcggcggcggcggccctataaaaagcgaagcgcgcggcgggcgggagcaagcttgaactgaaaaaccagaaagttaactggtaagtttagtctttttgtcttttatttcaggtcccggatccggtggtggtgcaaatcaaagaactgctcctcagtggatgttgcctttacttctaggcctgtacggaagtgttacttctgctctaaaagctgcggaattgtacccgcggccgatccaccggtgtgctgggcggggggcggcgggccctcccgcagaacaccatgcgctccacggaacctgctagctccatgcttgctgtggccactgagaagtaagcatggagctagcaggttctgaggagcgccttgacagcagccatgggagggccgccccctacctcagtgactcgaggacggggtgaactacgcctgaggatccgatctttttccctctgccaaaaattatggggacatcatgaagccccttgagcatctgacttctggctaataaaggaaatttattttcattgcaatagtgtgttggaattttttgtgtctctcactcgactagatttaaatatgtcgtgcatcgatgctacgtagataagtagcatggcgggttaatcattaactacagaggaacccctagtgatggagttggccactccctctctgcgcgctcgctcgctcactgaggccgggcgaccaaaggtcgcccgacgcccgggctttgcccgggcggcctcagtgagcgagcgagcgcgcagctgcctgcagg

SEQ ID NO: 1357 - DNA, 2299 bp, Artificial Sequence
  Description of Artificial Sequence: Synthetic polynucleotide
cctgcaggcagctgcgcgctcgctcgctcactgaggccgcccgggcaaagcccgggcgtcgggcgacctttggtcgcccggcctcagtgagcgagcgagcgcgcagagagggagtggccaactccatcactaggggttccttgtagttaatgattaacccgccatgctacttatctacgtagccatgcgtcgacataacgcgtaattcgcccttgggcctaggcaattggatccgccggcagagaaaacatcccagggatttacagatcacatgcaggcagggaccagctcaacccttctttaatgtcatccagggagggggccagggatggaggggaggggttgaggagcgagaggcagttatttttgggtgggattcaccacttttcccatgaagaggggagacttggtattttgttcaatcattaagaagacaaagggtttgttgaacttgacctcgggggggatagacatgggtatggcctctaaaaacatggccccagcagcttcagtccctttctcgtcgatggtcagcacagccttatgcacggcctggaggggagagaagcagagacacgttgtaaggctgatcccaggcctcgagcaaggctcacgtggacacctcccaggaagcgctcactccccctggacggccctggccctgcacatcctctccctccctgtcacataggccttgctcctcctcaaggctttggctgatggggctggctcccctctgtccatcttcctgacaagcgcctctccccctgctcaggtgcacccacaactcagaacagggaagagcatcgtcactccacgtctgcctccagggctctctcctttctagtacacggcttgaagctccttgaggacacggaccctggcagtgaccttcacagtgcccagaccacgcgtcgacattgattattgactagttattaatagtaatcaattacggggtcattagttcatagcccatatatggagttccgcgttacataacttacggtaaatggcccgcctggctgaccgcccaacgacccccgcccattgacgtcaataatgacgtatgttcccatagtaacgccaatagggactttccattgacgtcaatgggtggagtatttacggtaaactgcccacttggcagtacatcaagtgtatcatatgccaagtacgccccctattgacgtcaatgacggtaaatggcccgcctggcattatgcccagtacatgaccttatgggactttcctacttggcagtacatctacgtattagtcatcgctattaccatgtcgaggccacgttctgcttcactctccccatctcccccccctccccacccccaattttgtatttatttattttttaattattttgtgcagcgatgggggcggggggggggggcgcgcgccaggcggggcggggcggggcgaggggcggggcggggcgaggcggagaggtgcggcggcagccaatcagagcggcgcgctccgaaagtttccttttatggcgaggcggcggcggcggcggccctataaaaagcgaagcgcgcggcgggcgggagcaagcttgaactgaaaaaccagaaagttaactggtaagtttagtctttttgtcttttatttcaggtcccggatccggtggtggtgcaaatcaaagaactgctcctcagtggatgttgcctttacttctaggcctgtacggaagtgttacttctgctctaaaagctgcggaattgtacccgcggccgatccaccggtgtgctgggcggggggcggcgggccctcccgcagaacaccatgcgctccacggaacctgctagctccatgcttgctgtggccactgagaagtaagcatggagctagcaggttctgaggagcgccttgacagcagccatgggagggccgccccctacctcagtgactcgaggacggggtgaactacgcctgaggatccgatctttttccctctgccaaaaattatggggacatcatgaagccccttgagcatctgacttctggctaataaaggaaatttattttcattgcaatagtgtgttggaattttttgtgtctctcactcgactagatttaaatatgtcgtgcatcgatgctacgtagataagtagcatggcgggttaatcattaactacagaggaacccctagtgatggagttggccactccctctctgcgcgctcgctcgctcactgaggccgggcgaccaaaggtcgcccgacgcccgggctttgcccgggcggcctcagtgagcgagcgagcgcgcagctgcctgcagg

SEQ ID NO: 1358 - DNA, 2294 bp, Artificial Sequence
  Description of Artificial Sequence: Synthetic polynucleotide
cctgcaggcagctgcgcgctcgctcgctcactgaggccgcccgggcaaagcccgggcgtcgggcgacctttggtcgcccggcctcagtgagcgagcgagcgcgcagagagggagtggccaactccatcactaggggttccttgtagttaatgattaacccgccatgctacttatctacgtagccatgcgtcgacataacgcgtaattcgcccttgggcctaggcaattggatccgccggcagagaaaacatcccagggatttacagatcacatgcaggcagggaccagctcaacccttctttaatgtcatccagggagggggccagggatggaggggaggggttgaggagcgagaggcagttatttttgggtgggattcaccacttttcccatgaagaggggagacttggtattttgttcaatcattaagaagacaaagggtttgttgaacttgacctcgggggggatagacatgggtatggcctctaaaaacatggccccagcagcttcagtccctttctcgtcgatggtcagcacagccttatgcacggcctggaggggagagaagcagagacacgttgtaaggctgatcccaggcctcgagcaaggctcacgtggacacctcccaggaagcgctcactccccctggacggccctggccctgcacatcctctccctccctgtcacataggccttgctcctcctcaaggctttggctgatggggctggctcccctctgtccatcttcctgacaagcgcctctccccctgctcaggtgcacccacaactcagaacagggaagagcatcgtcactccacgtctgcctccagggctctctcctttctagtacacggcttgaagctccttgaggacacggaccctggcagtgaccttcacagtgcccagaccacgcgtcgacattgattattgactagttattaatagtaatcaattacggggtcattagttcatagcccatatatggagttccgcgttacataacttacggtaaatggcccgcctggctgaccgcccaacgacccccgcccattgacgtcaataatgacgtatgttcccatagtaacgccaatagggactttccattgacgtcaatgggtggagtatttacggtaaactgcccacttggcagtacatcaagtgtatcatatgccaagtacgccccctattgacgtcaatgacggtaaatggcccgcctggcattatgcccagtacatgaccttatgggactttcctacttggcagtacatctacgtattagtcatcgctattaccatgtcgaggccacgttctgcttcactctccccatctcccccccctccccacccccaattttgtatttatttattttttaattattttgtgcagcgatgggggcggggggggggggcgcgcgccaggcggggcggggcggggcgaggggcggggcggggcgaggcggagaggtgcggcggcagccaatcagagcggcgcgctccgaaagtttccttttatggcgaggcggcggcggcggcggccctataaaaagcgaagcgcgcggcgggcgggagcaagcttgaactgaaaaaccagaaagttaactggtaagtttagtctttttgtcttttatttcaggtcccggatccggtggtggtgcaaatcaaagaactgctcctcagtggatgttgcctttacttctaggcctgtacggaagtgttacttctgctctaaaagctgcggaattgtacccgcggccgatccaccggtgtgctgggcggggggcggcgggccctcccgcagaacaccatgcgctcttcggaagcaattcagtctcgttgtacctgtgatttggtacaacgagactgaattgcttctgaggagcgccttgacagcagccatgggagggccgccccctacctcagtgactcgaggacggggtgaactacgcctgaggatccgatctttttccctctgccaaaaattatggggacatcatgaagccccttgagcatctgacttctggctaataaaggaaatttattttcattgcaatagtgtgttggaattttttgtgtctctcactcgactagatttaaatatgtcgtgcatcgatgctacgtagataagtagcatggcgggttaatcattaactacagaggaacccctagtgatggagttggccactccctctctgcgcgctcgctcgctcactgaggccgggcgaccaaaggtcgcccgacgcccgggctttgcccgggcggcctcagtgagcgagcgagcgcgcagctgcctgcagg

SEQ ID NO: 1359 - DNA, 2299 bp, Artificial Sequence
  Description of Artificial Sequence: Synthetic polynucleotide
cctgcaggcagctgcgcgctcgctcgctcactgaggccgcccgggcaaagcccgggcgtcgggcgacctttggtcgcccggcctcagtgagcgagcgagcgcgcagagagggagtggccaactccatcactaggggttccttgtagttaatgattaacccgccatgctacttatctacgtagccatgcgtcgacataacgcgtaattcgcccttgggcctaggcaattggatccgccggcagagaaaacatcccagggatttacagatcacatgcaggcagggaccagctcaacccttctttaatgtcatccagggagggggccagggatggaggggaggggttgaggagcgagaggcagttatttttgggtgggattcaccacttttcccatgaagaggggagacttggtattttgttcaatcattaagaagacaaagggtttgttgaacttgacctcgggggggatagacatgggtatggcctctaaaaacatggccccagcagcttcagtccctttctcgtcgatggtcagcacagccttatgcacggcctggaggggagagaagcagagacacgttgtaaggctgatcccaggcctcgagcaaggctcacgtggacacctcccaggaagcgctcactccccctggacggccctggccctgcacatcctctccctccctgtcacataggccttgctcctcctcaaggctttggctgatggggctggctcccctctgtccatcttcctgacaagcgcctctccccctgctcaggtgcacccacaactcagaacagggaagagcatcgtcactccacgtctgcctccagggctctctcctttctagtacacggcttgaagctccttgaggacacggaccctggcagtgaccttcacagtgcccagaccacgcgtcgacattgattattgactagttattaatagtaatcaattacggggtcattagttcatagcccatatatggagttccgcgttacataacttacggtaaatggcccgcctggctgaccgcccaacgacccccgcccattgacgtcaataatgacgtatgttcccatagtaacgccaatagggactttccattgacgtcaatgggtggagtatttacggtaaactgcccacttggcagtacatcaagtgtatcatatgccaagtacgccccctattgacgtcaatgacggtaaatggcccgcctggcattatgcccagtacatgaccttatgggactttcctacttggcagtacatctacgtattagtcatcgctattaccatgtcgaggccacgttctgcttcactctccccatctcccccccctccccacccccaattttgtatttatttattttttaattattttgtgcagcgatgggggcggggggggggggcgcgcgccaggcggggcggggcggggcgaggggcggggcggggcgaggcggagaggtgcggcggcagccaatcagagcggcgcgctccgaaagtttccttttatggcgaggcggcggcggcggcggccctataaaaagcgaagcgcgcggcgggcgggagcaagcttgaactgaaaaaccagaaagttaactggtaagtttagtctttttgtcttttatttcaggtcccggatccggtggtggtgcaaatcaaagaactgctcctcagtggatgttgcctttacttctaggcctgtacggaagtgttacttctgctctaaaagctgcggaattgtacccgcggccgatccaccggtgtgctgggcggggggcggcgggccctcccgcagaacaccatgcgctcctcggaataagcatggagctagcaggttgtggccactgagaaacctgctagctccatgcttgttctgcggagcgccttgacagcagccatgggagggccgccccctacctcagtgactcgaggacggggtgaactacgcctgaggatccgatctttttccctctgccaaaaattatggggacatcatgaagccccttgagcatctgacttctggctaataaaggaaatttattttcattgcaatagtgtgttggaattttttgtgtctctcactcgactagatttaaatatgtcgtgcatcgatgctacgtagataagtagcatggcgggttaatcattaactacagaggaacccctagtgatggagttggccactccctctctgcgcgctcgctcgctcactgaggccgggcgaccaaaggtcgcccgacgcccgggctttgcccgggcggcctcagtgagcgagcgagcgcgcagctgcctgcagg

SEQ ID NO: 1360 - DNA, 4618 bp, Artificial Sequence
  Description of Artificial Sequence: Synthetic polynucleotide
cctgcaggcagctgcgcgctcgctcgctcactgaggccgcccgggcaaagcccgggcgtcgggcgacctttggtcgcccggcctcagtgagcgagcgagcgcgcagagagggagtggccaactccatcactaggggttccttgtagttaatgattaacccgccatgctacttatctacgtagccatgcgtcgacataacgcgtaattcgcccttgggcctaggcaattggatccgccggcagagaaaacatcccagggatttacagatcacatgcaggcagggaccagctcaacccttctttaatgtcatccagggagggggccagggatggaggggaggggttgaggagcgagaggcagttatttttgggtgggattcaccacttttcccatgaagaggggagacttggtattttgttcaatcattaagaagacaaagggtttgttgaacttgacctcgggggggatagacatgggtatggcctctaaaaacatggccccagcagcttcagtccctttctcgtcgatggtcagcacagccttatgcacggcctggaggggagagaagcagagacacgttgtaaggctgatcccaggcctcgagcaaggctcacgtggacacctcccaggaagcgctcactccccctggacggccctggccctgcacatcctctccctccctgtcacataggccttgctcctcctcaaggctttggctgatggggctggctcccctctgtccatcttcctgacaagcgcctctccccctgctcaggtgcacccacaactcagaacagggaagagcatcgtcactccacgtctgcctccagggctctctcctttctagtacacggcttgaagctccttgaggacacggaccctggcagtgaccttcacagtgcccagaccccaagataatgcagccattcatggaactgcagttgttcattggtcgcctttagttttccaaaataagtgtcatctttagctgaaatcattcattaattcagacaccaaatctcacagatcgaaggagtcagaaattcctttgaaacaacttagcccaaacctttctgtgtcagtatggataaatcaaggcccaatgtctagaaggtcttgggcaaagttgaaattcagggtcagtgacacaacctcaagggaggccccgaaagtgccagctgcacagcagtcccctgcctggctttgctgtttgaccacgtcccgtgtcagtgaatcacgggcatcttcaggagctcagcctgggtcttcatttgtttccctcggccccttcctcagcctcaggacagagctgcagcccccacacattcttccctacagataccatggtgcaacaaggtcgtcagggtgatctcaccttggagagcttcaggggtgcctcctctgtgaccccggagaggtcagccccattgctgaagaccttagtgatgcccagttgacccaggacgctcttcagatcataggttccagtaatggacagtttgggtaaatgtaagctggcagacctgtcgtgcagaaaagaaattcaaggcatggcacagcattcctcttgttcttctgggacccaccacagtgcaagtgttttcttttctgattatttctgccacttactcctgtgtcctccacccacactaagatgggaactcggctttggtttgttctacttttagctcttctacattgagtcaaagacgcgtcgacattgattattgactagttattaatagtaatcaattacggggtcattagttcatagcccatatatggagttccgcgttacataacttacggtaaatggcccgcctggctgaccgcccaacgacccccgcccattgacgtcaataatgacgtatgttcccatagtaacgccaatagggactttccattgacgtcaatgggtggagtatttacggtaaactgcccacttggcagtacatcaagtgtatcatatgccaagtacgccccctattgacgtcaatgacggtaaatggcccgcctggcattatgcccagtacatgaccttatgggactttcctacttggcagtacatctacgtattagtcatcgctattaccatgtcgaggccacgttctgcttcactctccccatctcccccccctccccacccccaattttgtatttatttattttttaattattttgtgcagcgatgggggcggggggggggggcgcgcgccaggcggggcggggcggggcgaggggcggggcggggcgaggcggagaggtgcggcggcagccaatcagagcggcgcgctccgaaagtttccttttatggcgaggcggcggcggcggcggccctataaaaagcgaagcgcgcggcgggcgggagcaagcttgaactgaaaaaccagaaagttaactggtaagtttagtctttttgtcttttatttcaggtcccggatccggtggtggtgcaaatcaaagaactgctcctcagtggatgttgcctttacttctaggcctgtacggaagtgttacttctgctctaaaagctgcggaattgtacccgcggccgatccaccggtgtgctgggcggggggcggcgggccctcccgcagaacaccatgcgctccacggaacctgctagctccatgcttgctgtggccactgagaagtaagcatggagctagcaggttctgaggagcgccttgacagcagccatgggagggccgccccctacctcagtgactcgaggacggggtgaactacgcctgaggatccgatctttttccctctgccaaaaattatggggacatcatgaagccccttgagcatctgacttctggctaataaaggaaatttattttcattgcaatagtgtgttggaattttttgtgtctctcactcgactagatttaaataatgttaacatcgaatgaatcacaaaagcttgaaatgccacctcctctgatattctaggtgtcctggaagcctgtctcatcttgccctgtagtgttgggtcacctggcccccagcctgtaacatccccagggccctacacccagagaaacacggggctggtggcagtgcccagtgacaaccgtttagtggataagagaagagtgaccacaccaggctgagtgctcctctctggttttccatggggagacaatgccaccctgagcagggtctggtgtgagcgggcagcttggctctgggctctctgatccgttaccctctcagcctctttgttctttctcaacccctggagcagagacctcaggaggtgctggcatggaacagagaaattccagcctcgattcctattatgaacccgacaccttttgtattttcatcttggttttacagtgtacaaaacgaactagatcagcagggcatgggcataatcacgaatgcacacacatacactaatgtgtggctcatgtttaagtatcacttactacaggacacccaatctaacagcaccgataaagtgacagagaaacgcaagccttctgcgaacatggcctggctgttccaattccgaaccttgcttttctgggccttgccacacaggctcttcccccgtccccccagggacattctacccttgaactccacactccactgctgcctttgccaggaagcccatctgttcctttttggttctgccagaacgtgtggtggtgctgctgtccctgccctgggcactggatattgggaagggacagtgtccacactggagtgggaagtccccagggacgagacctttacctcctcacccctgggtactgtcctcctcatggagcatggatggcgctgcctgaactcagtggtggcctcattctggaagccaagtttatacagagtagcagtgacccagggatgtggggttcaccctcctcagccctctggccagtcctgatgggcctcagtcccaacatggctaagaggtgtgggcagcttcttggtcaccctcaggttggggaatcaccttctgtcttcattttccaggaacttggtgatgatatcgtgggtgagttcattttccaggtgctgtagtttcccctcatcaggcaggaagaagatggcggtggcattgcccaggtatttcatcagcagcacccagctggacagcttcttacagtgctggatgttaaacatgcctaaacgcttcatcataggcaccttcacggtggtcacctggtccacgtggaagtcctcttcctcggtgtccttgacttcaaagggtctctcccatttgcctggagagaggggaaggtgggcatcaccaggggtgagtgaaggtttggaagagtgtagcagaataaagaaaccatgagtcccctccctgagaagccctgagcccccttgacgacacacatccctcgaggctcagcttcatcatctgtaaaaggtgctgaaactgaccatttaaatatgtcgtgcatcgatgctacgtagataagtagcatggcgggttaatcattaactacagaggaacccctagtgatggagttggccactccctctctgcgcgctcgctcgctcactgaggccgggcgaccaaaggtcgcccgacgcccgggctttgcccgggcggcctcagtgagcgagcgagcgcgcagctgcctgcagg

SEQ ID NO: 1361 - DNA, 2307 bp, Artificial Sequence
  Description of Artificial Sequence: Synthetic polynucleotide
cctgcaggcagctgcgcgctcgctcgctcactgaggccgcccgggcaaagcccgggcgtcgggcgacctttggtcgcccggcctcagtgagcgagcgagcgcgcagagagggagtggccaactccatcactaggggttccttgtagttaatgattaacccgccatgctacttatctacgtagccatgcgtcgacataacgcgtaattcgcccttgggcctaggcaattggatccgccggcagagaaaacatcccagggatttacagatcacatgcaggcagggaccagctcaacccttctttaatgtcatccagggagggggccagggatggaggggaggggttgaggagcgagaggcagttatttttgggtgggattcaccacttttcccatgaagaggggagacttggtattttgttcaatcattaagaagacaaagggtttgttgaacttgacctcgggggggatagacatgggtatggcctctaaaaacatggccccagcagcttcagtccctttctcgtcgatggtcagcacagccttatgcacggcctggagggacgcgtcgacattgattattgactagttattaatagtaatcaattacggggtcattagttcatagcccatatatggagttccgcgttacataacttacggtaaatggcccgcctggctgaccgcccaacgacccccgcccattgacgtcaataatgacgtatgttcccatagtaacgccaatagggactttccattgacgtcaatgggtggagtatttacggtaaactgcccacttggcagtacatcaagtgtatcatatgccaagtacgccccctattgacgtcaatgacggtaaatggcccgcctggcattatgcccagtacatgaccttatgggactttcctacttggcagtacatctacgtattagtcatcgctattaccatgtcgaggccacgttctgcttcactctccccatctcccccccctccccacccccaattttgtatttatttattttttaattattttgtgcagcgatgggggcggggggggggggcgcgcgccaggcggggcggggcggggcgaggggcggggcggggcgaggcggagaggtgcggcggcagccaatcagagcggcgcgctccgaaagtttccttttatggcgaggcggcggcggcggcggccctataaaaagcgaagcgcgcggcgggcgggagcaagcttgaactgaaaaaccagaaagttaactggtaagtttagtctttttgtcttttatttcaggtcccggatccggtggtggtgcaaatcaaagaactgctcctcagtggatgttgcctttacttctaggcctgtacggaagtgttacttctgctctaaaagctgcggaattgtacccgcggccgatccaccggtgtgctgggcggggggcggcgggccctcccgcagaacaccatgcgctccacggaacctgctagctccatgcttgctgtggccactgagaagtaagcatggagctagcaggttctgaggagcgccttgacagcagccatgggagggccgccccctacctcagtgactcgaggacggggtgaactacgcctgaggatccgatctttttccctctgccaaaaattatggggacatcatgaagccccttgagcatctgacttctggctaataaaggaaatttattttcattgcaatagtgtgttggaattttttgtgtctctcactcgactagatttaaatgagagaagcagagacacgttgtaaggctgatcccaggcctcgagcaaggctcacgtggacacctcccaggaagcgctcactccccctggacggccctggccctgcacatcctctccctccctgtcacataggccttgctcctcctcaaggctttggctgatggggctggctcccctctgtccatcttcctgacaagcgcctctccccctgctcaggtgcacccacaactcagaacagggaagagcatcgtcactccacgtctgcctccagggctctctcctttctagtacacggcttgaagctccttgaggacacggaccctggcagtgaccttcacagtgcccagaccatttaaatatgtcgtgcatcgatgctacgtagataagtagcatggcgggttaatcattaactacagaggaacccctagtgatggagttggccactccctctctgcgcgctcgctcgctcactgaggccgggcgaccaaaggtcgcccgacgcccgggctttgcccgggcggcctcagtgagcgagcgagcgcgcagctgcctgcagg

SEQ ID NO: 1362 - DNA, 2302 bp, Artificial Sequence
  Description of Artificial Sequence: Synthetic polynucleotide
cctgcaggcagctgcgcgctcgctcgctcactgaggccgcccgggcaaagcccgggcgtcgggcgacctttggtcgcccggcctcagtgagcgagcgagcgcgcagagagggagtggccaactccatcactaggggttccttgtagttaatgattaacccgccatgctacttatctacgtagccatgcgtcgacataacgcgtaattcgcccttgggcctaggcaattggatccgccggcagagaaaacatcccagggatttacagatcacatgcaggcagggaccagctcaacccttctttaatgtcatccagggagggggccagggatggaggggaggggttgaggagcgagaggcagttatttttgggtgggattcaccacttttcccatgaagaggggagacttggtattttgttcaatcattaagaagacaaagggtttgttgaacttgacctcgggggggatagacatgggtatggcctctaaaaacatggccccagcagcttcagtccctttctcgtcgatggtcagcacagccttatgcacggcctggagggacgcgtcgacattgattattgactagttattaatagtaatcaattacggggtcattagttcatagcccatatatggagttccgcgttacataacttacggtaaatggcccgcctggctgaccgcccaacgacccccgcccattgacgtcaataatgacgtatgttcccatagtaacgccaatagggactttccattgacgtcaatgggtggagtatttacggtaaactgcccacttggcagtacatcaagtgtatcatatgccaagtacgccccctattgacgtcaatgacggtaaatggcccgcctggcattatgcccagtacatgaccttatgggactttcctacttggcagtacatctacgtattagtcatcgctattaccatgtcgaggccacgttctgcttcactctccccatctcccccccctccccacccccaattttgtatttatttattttttaattattttgtgcagcgatgggggcggggggggggggcgcgcgccaggcggggcggggcggggcgaggggcggggcggggcgaggcggagaggtgcggcggcagccaatcagagcggcgcgctccgaaagtttccttttatggcgaggcggcggcggcggcggccctataaaaagcgaagcgcgcggcgggcgggagcaagcttgaactgaaaaaccagaaagttaactggtaagtttagtctttttgtcttttatttcaggtcccggatccggtggtggtgcaaatcaaagaactgctcctcagtggatgttgcctttacttctaggcctgtacggaagtgttacttctgctctaaaagctgcggaattgtacccgcggccgatccaccggtgtgctgggcggggggcggcgggccctcccgcagaacaccatgcgctcttcggaagcaattcagtctcgttgtacctgtgatttggtacaacgagactgaattgcttctgaggagcgccttgacagcagccatgggagggccgccccctacctcagtgactcgaggacggggtgaactacgcctgaggatccgatctttttccctctgccaaaaattatggggacatcatgaagccccttgagcatctgacttctggctaataaaggaaatttattttcattgcaatagtgtgttggaattttttgtgtctctcactcgactagatttaaatgagagaagcagagacacgttgtaaggctgatcccaggcctcgagcaaggctcacgtggacacctcccaggaagcgctcactccccctggacggccctggccctgcacatcctctccctccctgtcacataggccttgctcctcctcaaggctttggctgatggggctggctcccctctgtccatcttcctgacaagcgcctctccccctgctcaggtgcacccacaactcagaacagggaagagcatcgtcactccacgtctgcctccagggctctctcctttctagtacacggcttgaagctccttgaggacacggaccctggcagtgaccttcacagtgcccagaccatttaaatatgtcgtgcatcgatgctacgtagataagtagcatggcgggttaatcattaactacagaggaacccctagtgatggagttggccactccctctctgcgcgctcgctcgctcactgaggccgggcgaccaaaggtcgcccgacgcccgggctttgcccgggcggcctcagtgagcgagcgagcgcgcagctgcctgcagg

SEQ ID NO: 1363 - DNA, 2307 bp, Artificial Sequence
  Description of Artificial Sequence: Synthetic polynucleotide
cctgcaggcagctgcgcgctcgctcgctcactgaggccgcccgggcaaagcccgggcgtcgggcgacctttggtcgcccggcctcagtgagcgagcgagcgcgcagagagggagtggccaactccatcactaggggttccttgtagttaatgattaacccgccatgctacttatctacgtagccatgcgtcgacataacgcgtaattcgcccttgggcctaggcaattggatccgccggcagagaaaacatcccagggatttacagatcacatgcaggcagggaccagctcaacccttctttaatgtcatccagggagggggccagggatggaggggaggggttgaggagcgagaggcagttatttttgggtgggattcaccacttttcccatgaagaggggagacttggtattttgttcaatcattaagaagacaaagggtttgttgaacttgacctcgggggggatagacatgggtatggcctctaaaaacatggccccagcagcttcagtccctttctcgtcgatggtcagcacagccttatgcacggcctggagggacgcgtcgacattgattattgactagttattaatagtaatcaattacggggtcattagttcatagcccatatatggagttccgcgttacataacttacggtaaatggcccgcctggctgaccgcccaacgacccccgcccattgacgtcaataatgacgtatgttcccatagtaacgccaatagggactttccattgacgtcaatgggtggagtatttacggtaaactgcccacttggcagtacatcaagtgtatcatatgccaagtacgccccctattgacgtcaatgacggtaaatggcccgcctggcattatgcccagtacatgaccttatgggactttcctacttggcagtacatctacgtattagtcatcgctattaccatgtcgaggccacgttctgcttcactctccccatctcccccccctccccacccccaattttgtatttatttattttttaattattttgtgcagcgatgggggcggggggggggggcgcgcgccaggcggggcggggcggggcgaggggcggggcggggcgaggcggagaggtgcggcggcagccaatcagagcggcgcgctccgaaagtttccttttatggcgaggcggcggcggcggcggccctataaaaagcgaagcgcgcggcgggcgggagcaagcttgaactgaaaaaccagaaagttaactggtaagtttagtctttttgtcttttatttcaggtcccggatccggtggtggtgcaaatcaaagaactgctcctcagtggatgttgcctttacttctaggcctgtacggaagtgttacttctgctctaaaagctgcggaattgtacccgcggccgatccaccggtgtgctgggcggggggcggcgggccctcccgcagaacaccatgcgctcctcggaataagcatggagctagcaggttgtggccactgagaaacctgctagctccatgcttgttctgcggagcgccttgacagcagccatgggagggccgccccctacctcagtgactcgaggacggggtgaactacgcctgaggatccgatctttttccctctgccaaaaattatggggacatcatgaagccccttgagcatctgacttctggctaataaaggaaatttattttcattgcaatagtgtgttggaattttttgtgtctctcactcgactagatttaaatgagagaagcagagacacgttgtaaggctgatcccaggcctcgagcaaggctcacgtggacacctcccaggaagcgctcactccccctggacggccctggccctgcacatcctctccctccctgtcacataggccttgctcctcctcaaggctttggctgatggggctggctcccctctgtccatcttcctgacaagcgcctctccccctgctcaggtgcacccacaactcagaacagggaagagcatcgtcactccacgtctgcctccagggctctctcctttctagtacacggcttgaagctccttgaggacacggaccctggcagtgaccttcacagtgcccagaccatttaaatatgtcgtgcatcgatgctacgtagataagtagcatggcgggttaatcattaactacagaggaacccctagtgatggagttggccactccctctctgcgcgctcgctcgctcactgaggccgggcgaccaaaggtcgcccgacgcccgggctttgcccgggcggcctcagtgagcgagcgagcgcgcagctgcctgcagg

SEQ ID NO: 1364 - DNA, 1587 bp, Artificial Sequence
  Description of Artificial Sequence: Synthetic polynucleotide
cctgcaggcagctgcgcgctcgctcgctcactgaggccgcccgggcaaagcccgggcgtcgggcgacctttggtcgcccggcctcagtgagcgagcgagcgcgcagagagggagtggccaactccatcactaggggttccttgtagttaatgattaacccgccatgctacttatctacgtagccatgcgtcgacataacgcgtcgacattgattattgactagttattaatagtaatcaattacggggtcattagttcatagcccatatatggagttccgcgttacataacttacggtaaatggcccgcctggctgaccgcccaacgacccccgcccattgacgtcaataatgacgtatgttcccatagtaacgccaatagggactttccattgacgtcaatgggtggagtatttacggtaaactgcccacttggcagtacatcaagtgtatcatatgccaagtacgccccctattgacgtcaatgacggtaaatggcccgcctggcattatgcccagtacatgaccttatgggactttcctacttggcagtacatctacgtattagtcatcgctattaccatgtcgaggccacgttctgcttcactctccccatctcccccccctccccacccccaattttgtatttatttattttttaattattttgtgcagcgatgggggcggggggggggggcgcgcgccaggcggggcggggcggggcgaggggcggggcggggcgaggcggagaggtgcggcggcagccaatcagagcggcgcgctccgaaagtttccttttatggcgaggcggcggcggcggcggccctataaaaagcgaagcgcgcggcgggcgggagcaagcttgaactgaaaaaccagaaagttaactggtaagtttagtctttttgtcttttatttcaggtcccggatccggtggtggtgcaaatcaaagaactgctcctcagtggatgttgcctttacttctaggcctgtacggaagtgttacttctgctctaaaagctgcggaattgtacccgcggccgatccaccggtgtgctgggcggggggcggcgggccctcccgcagaacaccatgcgctccacggaacctgctagctccatgcttgctgtggccactgagaagtaagcatggagctagcaggttctgaggagcgccttgacagcagccatgggagggccgccccctacctcagtgactcgaggacggggtgaactacgcctgaggatccgatctttttccctctgccaaaaattatggggacatcatgaagccccttgagcatctgacttctggctaataaaggaaatttattttcattgcaatagtgtgttggaattttttgtgtctctcactcgactagatttaaatatgtcgtgcatcgatgctacgtagataagtagcatggcgggttaatcattaactacagaggaacccctagtgatggagttggccactccctctctgcgcgctcgctcgctcactgaggccgggcgaccaaaggtcgcccgacgcccgggctttgcccgggcggcctcagtgagcgagcgagcgcgcagctgcctgcagg

SEQ ID NO: 1365 - DNA, 1582 bp, Artificial Sequence
  Description of Artificial Sequence: Synthetic polynucleotide
cctgcaggcagctgcgcgctcgctcgctcactgaggccgcccgggcaaagcccgggcgtcgggcgacctttggtcgcccggcctcagtgagcgagcgagcgcgcagagagggagtggccaactccatcactaggggttccttgtagttaatgattaacccgccatgctacttatctacgtagccatgcgtcgacataacgcgtcgacattgattattgactagttattaatagtaatcaattacggggtcattagttcatagcccatatatggagttccgcgttacataacttacggtaaatggcccgcctggctgaccgcccaacgacccccgcccattgacgtcaataatgacgtatgttcccatagtaacgccaatagggactttccattgacgtcaatgggtggagtatttacggtaaactgcccacttggcagtacatcaagtgtatcatatgccaagtacgccccctattgacgtcaatgacggtaaatggcccgcctggcattatgcccagtacatgaccttatgggactttcctacttggcagtacatctacgtattagtcatcgctattaccatgtcgaggccacgttctgcttcactctccccatctcccccccctccccacccccaattttgtatttatttattttttaattattttgtgcagcgatgggggcggggggggggggcgcgcgccaggcggggcggggcggggcgaggggcggggcggggcgaggcggagaggtgcggcggcagccaatcagagcggcgcgctccgaaagtttccttttatggcgaggcggcggcggcggcggccctataaaaagcgaagcgcgcggcgggcgggagcaagcttgaactgaaaaaccagaaagttaactggtaagtttagtctttttgtcttttatttcaggtcccggatccggtggtggtgcaaatcaaagaactgctcctcagtggatgttgcctttacttctaggcctgtacggaagtgttacttctgctctaaaagctgcggaattgtacccgcggccgatccaccggtgtgctgggcggggggcggcgggccctcccgcagaacaccatgcgctcttcggaagcaattcagtctcgttgtgcctgtgacctggtacaacgagactgaattgcttctgaggagcgccttgacagcagccatgggagggccgccccctacctcagtgactcgaggacggggtgaactacgcctgaggatccgatctttttccctctgccaaaaattatggggacatcatgaagccccttgagcatctgacttctggctaataaaggaaatttattttcattgcaatagtgtgttggaattttttgtgtctctcactcgactagatttaaatatgtcgtgcatcgatgctacgtagataagtagcatggcgggttaatcattaactacagaggaacccctagtgatggagttggccactccctctctgcgcgctcgctcgctcactgaggccgggcgaccaaaggtcgcccgacgcccgggctttgcccgggcggcctcagtgagcgagcgagcgcgcagctgcctgcagg

SEQ ID NO: 1366 - DNA, 1584 bp, Artificial Sequence
  Description of Artificial Sequence: Synthetic polynucleotide
ctgcgcgctcgctcgctcactgaggccgcccgggcaaagcccgggcgtcgggcgacctttggtcgcccggcctcagtgagcgagcgagcgcgcagagagggagtgtagccatgctctaggaagatcaattcaattcacgcgtcgacattgattattgactagttattaatagtaatcaattacggggtcattagttcatagcccatatatggagttccgcgttacataacttacggtaaatggcccgcctggctgaccgcccaacgacccccgcccattgacgtcaataatgacgtatgttcccatagtaacgccaatagggactttccattgacgtcaatgggtggagtatttacggtaaactgcccacttggcagtacatcaagtgtatcatatgccaagtacgccccctattgacgtcaatgacggtaaatggcccgcctggcattatgcccagtacatgaccttatgggactttcctacttggcagtacatctacgtattagtcatcgctattaccatgtcgaggccacgttctgcttcactctccccatctcccccccctccccacccccaattttgtatttatttattttttaattattttgtgcagcgatgggggcggggggggggggcgcgcgccaggcggggcggggcggggcgaggggcggggcggggcgaggcggagaggtgcggcggcagccaatcagagcggcgcgctccgaaagtttccttttatggcgaggcggcggcggcggcggccctataaaaagcgaagcgcgcggcgggcgggagcaagcttgaactgaaaaaccagaaagttaactggtaagtttagtctttttgtcttttatttcaggtcccggatccggtggtggtgcaaatcaaagaactgctcctcagtggatgttgcctttacttctaggcctgtacggaagtgttacttctgctctaaaagctgcggaattgtacccgcggccgatccaccggtgaagcaaagaaggggcagagggagcccgtgagctgagtgggccagggactgggagaaggagtgaggaggcagggccggcatgcctctgctgctggccagacctgctagctccatgcttcccgtctgcacctgtcactagtaagcatggagctagcaggtttggccgtgtagtgctacccagcgctggctgcctcctcagcattgcaattcctctcccatctgggcaccagtcagctaccctggtgggaatctgggtagccctcgaggacggggtgaactacgcctgaggatccgatctttttccctctgccaaaaattatggggacatcatgaagccccttgagcatctgacttctggctaataaaggaaatttattttcattgcaatagtgtgttggaattttttgtgtctctcactcggcctaggtagataagtagcatggcgggttaatcattaactacaaggaacccctagtgatggagttggccactccctctctgcgcgctcgctcgctcactgaggccgggcgaccaaaggtcgcccgacgcccgggctttgcccgggcggcctcagtgagcgagcgagcgcgcag

SEQ ID NO: 1367 - DNA, 1482 bp, Artificial Sequence
  Description of Artificial Sequence: Synthetic polynucleotide
ctgcgcgctcgctcgctcactgaggccgcccgggcaaagcccgggcgtcgggcgacctttggtcgcccggcctcagtgagcgagcgagcgcgcagagagggagtgtagccatgctctaggaagatcaattcaattcacgcgtcgacattgattattgactagttattaatagtaatcaattacggggtcattagttcatagcccatatatggagttccgcgttacataacttacggtaaatggcccgcctggctgaccgcccaacgacccccgcccattgacgtcaataatgacgtatgttcccatagtaacgccaatagggactttccattgacgtcaatgggtggagtatttacggtaaactgcccacttggcagtacatcaagtgtatcatatgccaagtacgccccctattgacgtcaatgacggtaaatggcccgcctggcattatgcccagtacatgaccttatgggactttcctacttggcagtacatctacgtattagtcatcgctattaccatgtcgaggccacgttctgcttcactctccccatctcccccccctccccacccccaattttgtatttatttattttttaattattttgtgcagcgatgggggcggggggggggggcgcgcgccaggcggggcggggcggggcgaggggcggggcggggcgaggcggagaggtgcggcggcagccaatcagagcggcgcgctccgaaagtttccttttatggcgaggcggcggcggcggcggccctataaaaagcgaagcgcgcggcgggcgggagcaagcttgaactgaaaaaccagaaagttaactggtaagtttagtctttttgtcttttatttcaggtcccggatccggtggtggtgcaaatcaaagaactgctcctcagtggatgttgcctttacttctaggcctgtacggaagtgttacttctgctctaaaagctgcggaattgtacccgcggccgatccaccggtgtgctgggcggggggcggcgggccctcccgcagaacaccatgcgctcttcggaagcaattcagtctcgttgtgcctgtgacctggtacaacgagactgaattgcttctgaggagcgccttgacagcagccatgggagggccgccccctacctcagtgactcgaggacggggtgaactacgcctgaggatccgatctttttccctctgccaaaaattatggggacatcatgaagccccttgagcatctgacttctggctaataaaggaaatttattttcattgcaatagtgtgttggaattttttgtgtctctcactcggcctaggtagataagtagcatggcgggttaatcattaactacaaggaacccctagtgatggagttggccactccctctctgcgcgctcgctcgctcactgaggccgggcgaccaaaggtcgcccgacgcccgggctttgcccgggcggcctcagtgagcgagcgagcgcgcag

SEQ ID NO: 1368 - DNA, 4606 bp, Artificial Sequence
  Description of Artificial Sequence: Synthetic polynucleotide
cctgcaggcagctgcgcgctcgctcgctcactgaggccgcccgggcaaagcccgggcgtcgggcgacctttggtcgcccggcctcagtgagcgagcgagcgcgcagagagggagtggccaactccatcactaggggttccttgtagttaatgattaacccgccatgctacttatctacgtagccatgcgtcgacataacgcgtatatctagacgttacataacttacggtaaatggcccgcctggctgaccgcccaacgacccccgcccattgacgtcaataatgacgtatgttcccatagtaacgccaatagggactttccattgacgtcaatgggtggagtatttacggtaaactgcccacttggcagtacatcaagtgtatcatatgccaagtacgccccctattgacgtcaatgacggtaaatggcccgcctggcattatgcccagtacatgaccttatgggactttcctacttggcagtacatctagtattagtcatcgctattaccatggtgatgcggttttggcagtacatcaatgggcgtggatagcggtttgactcacggggatttccaagtctccaccccattgacgtcaatgggagtttgttttggcaccaaaatcaacgggactttccaaaatgtcgtaacaactccgccccattgacgcaaatgggcggtaggcgtgtacggtgggaggtctatataagcagagctcgtttagtgaaccgtcagatcgcctggagacgccatccacgctgttttgacctccatagaagacaccgggaccgatccagcctccgcggattcgaatcccggccgggaacggtgcattggaacgcggattccccgtgccaagagtgacgtaagtaccgcctatagagtctataggcccacaaaaaatgctttcttcttttaatatacttttttgtttatcttatttctaatactttccctaatctctttctttcagggcaataatgatacaatgtatcatgcctctttgcaccattctaaagaataacagtgataatttctgggttaaggcaatagcaatatttctgcatataaatatttctgcatataaattgtaactgatgtaagaggtttcatattgctaatagcagctacaatccagctaccattctgcttttattttatggttgggataaggctggattattctgagtccaagctaggcccttttgctaatcatgttcatacctcttatcttcctcccacagctcctgggcaacgtgctggtctgtgtgctggcccatcactttggcaaagaattgggattcgaacatcgattgaattccccggggatccaccgtgctgggcggggggcggcgggccctcccgcagaacaccatgcgctccacggaacctgctagctccatgcttgctgtggccactgagaagtaagcatggagctagcaggttctgaggagcgccttgacagcagccatgggagggccgccccctacctcagtgactcgagagatctacgggtggcatccctgtgacccctccccagtgcctctcctggccctggaagttgccactccagtgcccaccagccttgtcctaataaaattaagttgcatcattttgtctgactaggtgtccttctataatattatggggtggaggggggtggtatggagcaaggggcaagttgggaagacaacctgtagggcctgcggggtctattgggaaccaagctggagtgcagtggcacaatcttggctcactgcaatctccgcctcctgggttcaagcgattctcctgcctcagcctcccgagttgttgggattccaggcatgcatgaccaggctcagctaatttttgtttttttggtagagacggggtttcaccatattggccaggctggtctccaactcctaatctcaggtgatctacccaccttggcctcccaaattgctgggattacaggcgtgaaccactgctcccttccctgtccttactagatttaaataattcgcccttgggcctaggcaattggatccgccggcagagaaaacatcccagggatttacagatcacatgcaggcagggaccagctcaacccttctttaatgtcatccagggagggggccagggatggaggggaggggttgaggagcgagaggcagttatttttgggtgggattcaccacttttcccatgaagaggggagacttggtattttgttcaatcattaagaagacaaagggtttgttgaacttgacctcgggggggatagacatgggtatggcctctaaaaacatggccccagcagcttcagtccctttctcgtcgatggtcagcacagccttatgcacggcctggaggggagagaagcagagacacgttgtaaggctgatcccaggcctcgagcaaggctcacgtggacacctcccaggaagcgctcactccccctggacggccctggccctgcacatcctctccctccctgtcacataggccttgctcctcctcaaggctttggctgatggggctggctcccctctgtccatcttcctgacaagcgcctctccccctgctcaggtgcacccacaactcagaacagggaagagcatcgtcactccacgtctgcctccagggctctctcctttctagtacacggcttgaagctccttgaggacacggaccctggcagtgaccttcacagtgcccagaccccaagataatgcagccattcatggaactgcaggttgttcattggtcgcctttagttttccaaaataagtgtcactttagctgaaatcattcattaattcagacaccaaatctcacagatcgaaggagtcagaaattcctttgaaacaacttagcccaaacctttctgtgtcagtatggataaatcaaggcccaatgtctagaaggtcttgggcaaagttgaaattcagggtcagtgacacaacctcaagggaggccccgaaagtgccagctgcacagcagcccctgcctggctttgctgtttgcccaccgtcccgtgtcagtgaatcacgggcatcttcaggagctcagcctgggtcttcatttgtttccctcggccccttcctcagcctcaggacagtgctgcagcccccacacattcttccctacagataccatggtgcaacaaggtcgtcagggtgatctcaccttggagagcttcaggggtgcctcctctgtgaccccggagaggtcagccccattgctgaagaccttagtgatgcccagttgacccaggacgctcttcagatcataggttccagtaatggacagtttgggtaaatgtaagctggcagacctgtcgtgcagaaaagaaattcaaggcatggcacagcattcctcttgttcttctgggacccaccacagtgcaagtgttttcttttctgattatttctgccacttactcctgtgtcctccacccacactaagatgggaactcggctttggtttgttctacttttagctcttctacattgagtcaaagaatgttaacatcgaatgaatcacaaaagcttgaaatgccacctcctctgatattctaggtgtcctggaagcctgtctcatcttgccctgtagtgttgggtcacctggcccccagcctgtaacatccccagggccctacacccagagaaacacggggctggtggcagtgcccagtgacaaccgtttagtggataagagaagagtgaccacaccaggctgagtgctcctctctggttttccatggggagacaatgccaccctgagcagggtctggtgtgagcggcagctggctctgggctctctgatccgttaccctctcagcctctttgttctttctcaacccctggagcagagacctcaggaggtgctggcatggaacagagaaattccagcctcgattcctattatgaacccgacaccttttgtattttcatcttggttttacagtgtacaaaacgaactagatcagcagggcatgggcataatcacgaatgcacacacatacactaatgtgtggctcatgtttaagtatcacttactacaggacacccaatctaacagcaccgataaagtgacagagaaacgcaagccttctgcgaacatggcctggctgttccaattccgaaccttgcttttctgggccttgccacacaggctcttcccccgtccccccagggacattctacccttgaactccacactccactgctgcctttgccaggaagcccatctgttcctttttggttctgccagaacgtgtggtggtgctgctgtccctgccttgggcactggatattgggaagggacagtgtccacactggagtgggaagttcccagggacgagacctttacctcctcaccctgggtactgttctcctcatggagcatggatttaaatatgtcgtgcatcgatgctacgtagataagtagcatggcgggttaatcattaactacagaggaacccctagtgatggagttggccactccctctctgcgcgctcgctcgctcactgaggccgggcgaccaaaggtcgcccgacgcccgggctttgcccgggcggcctcagtgagcgagcgagcgcgcagctgcctgcagg

SEQ ID NO: 1369 - DNA, 2308 bp, Artificial Sequence
  Description of Artificial Sequence: Synthetic polynucleotide
cctgcaggcagctgcgcgctcgctcgctcactgaggccgcccgggcaaagcccgggcgtcgggcgacctttggtcgcccggcctcagtgagcgagcgagcgcgcagagagggagtggccaactccatcactaggggttccttgtagttaatgattaacccgccatgctacttatctacgtagccatgcgtcgacataacgcgtatatctagacgttacataacttacggtaaatggcccgcctggctgaccgcccaacgacccccgcccattgacgtcaataatgacgtatgttcccatagtaacgccaatagggactttccattgacgtcaatgggtggagtatttacggtaaactgcccacttggcagtacatcaagtgtatcatatgccaagtacgccccctattgacgtcaatgacggtaaatggcccgcctggcattatgcccagtacatgaccttatgggactttcctacttggcagtacatctagtattagtcatcgctattaccatggtgatgcggttttggcagtacatcaatgggcgtggatagcggtttgactcacggggatttccaagtctccaccccattgacgtcaatgggagtttgttttggcaccaaaatcaacgggactttccaaaatgtcgtaacaactccgccccattgacgcaaatgggcggtaggcgtgtacggtgggaggtctatataagcagagctcgtttagtgaaccgtcagatcgcctggagacgccatccacgctgttttgacctccatagaagacaccgggaccgatccagcctccgcggattcgaatcccggccgggaacggtgcattggaacgcggattccccgtgccaagagtgacgtaagtaccgcctatagagtctataggcccacaaaaaatgctttcttcttttaatatacttttttgtttatcttatttctaatactttccctaatctctttctttcagggcaataatgatacaatgtatcatgcctctttgcaccattctaaagaataacagtgataatttctgggttaaggcaatagcaatatttctgcatataaatatttctgcatataaattgtaactgatgtaagaggtttcatattgctaatagcagctacaatccagctaccattctgcttttattttatggttgggataaggctggattattctgagtccaagctaggcccttttgctaatcatgttcatacctcttatcttcctcccacagctcctgggcaacgtgctggtctgtgtgctggcccatcactttggcaaagaattgggattcgaacatcgattgaattccccggggatccaccgtgctgggcggggggcggcgggccctcccgcagaacaccatgcgctccacggaacctgctagctccatgcttgctgtggccactgagaagtaagcatggagctagcaggttctgaggagcgccttgacagcagccatgggagggccgccccctacctcagtgactcgagagatctacgggtggcatccctgtgacccctccccagtgcctctcctggccctggaagttgccactccagtgcccaccagccttgtcctaataaaattaagttgcatcattttgtctgactaggtgtccttctataatattatggggtggaggggggtggtatggagcaaggggcaagttgggaagacaacctgtagggcctgcggggtctattgggaaccaagctggagtgcagtggcacaatcttggctcactgcaatctccgcctcctgggttcaagcgattctcctgcctcagcctcccgagttgttgggattccaggcatgcatgaccaggctcagctaatttttgtttttttggtagagacggggtttcaccatattggccaggctggtctccaactcctaatctcaggtgatctacccaccttggcctcccaaattgctgggattacaggcgtgaaccactgctcccttccctgtccttactagatttaaataattcgcccttgggcctaggcaattggatccgccggcagagaaaacatcccagggatttacagatcacatgcaggcagggaccagctcaacccttctatttaaatatgtcgtgcatcgatgctacgtagataagtagcatggcgggttaatcattaactacagaggaacccctagtgatggagttggccactccctctctgcgcgctcgctcgctcactgaggccgggcgaccaaaggtcgcccgacgcccgggctttgcccgggcggcctcagtgagcgagcgagcgcgcagctgcctgcagg

SEQ ID NO: 1370 - DNA, 4608 bp, Artificial Sequence
  Description of Artificial Sequence: Synthetic polynucleotide
cctgcaggcagctgcgcgctcgctcgctcactgaggccgcccgggcaaagcccgggcgtcgggcgacctttggtcgcccggcctcagtgagcgagcgagcgcgcagagagggagtggccaactccatcactaggggttccttgtagttaatgattaacccgccatgctacttatctacgtagccatgcgtcgacataacgcgtaattcgcccttgggcctaggcaattggatccgccggcagagaaaacatcccagggatttacagatcacatgcaggcagggaccagctcaacccttctttaatgtcatccagggagggggccagggatggaggggaggggttgaggagcgagaggcagttatttttgggtgggattcaccacttttcccatgaagaggggagacttggtattttgttcaatcattaagaagacaaagggtttgttgaacttgacctcgggggggatagacatgggtatggcctctaaaaacatggccccagcagcttcagtccctttctcgtcgatggtcagcacagccttatgcacggcctggaggggagagaagcagagacacgttgtaaggctgatcccaggcctcgagcaaggctcacgtggacacctcccaggaagcgctcactccccctggacggccctggccctgcacatcctctccctccctgtcacataggccttgctcctcctcaaggctttggctgatggggctggctcccctctgtccatcttcctgacaagcgcctctccccctgctcaggtgcacccacaactcagaacagggaagagcatcgtcactccacgtctgcctccagggctctctcctttctagtacacggcttgaagctccttgaggacacggaccctggcagtgaccttcacagtgcccagaccccaagataatgcagccattcatggaactgcagttgttcattggtcgcctttagttttccaaaataagtgtcatctttagctgaaatcattcattaattcagacaccaaatctcacagatcgaaggagtcagaaattcctttgaaacaacttagcccaaacctttctgtgtcagtatggataaatcaaggcccaatgtctagaaggtcttgggcaaagttgaaattcagggtcagtgacacaacctcaagggaggccccgaaagtgccagctgcacagcagtcccctgcctggctttgctgtttgaccacgtcccgtgtcagtgaatcacgggcatcttcaggagctcagcctgggtcttcatttgtttccctcggccccttcctcagcctcaggacagagctgcagcccccacacattcttccctacagataccagggtgcaacaaggtcgtcagggtgatctcaccttggagagcttcaggggtgcctcctctgtgaccccggagaggtcagccccattgctgaagaccttagtgatgcccagttgacccaggacgctcttcagatcataggttccagtaatggacagtttgggtaaatgtaagctggcagacctgtcgtgcagaaaagaaattcaaggcatggcacagcattcctcttgttcttctgggacccaccacagtgcaagtgttttcttttctgattatttctgccacttactcctgtgtcctccacccacactaagatgggaactcggctttggtttgttctacttttagctcttctacattgagtcaaagaatgttaacatcgaatgaatcacaaaagcttgaaatgccacctcctctgatattctaggtgtcctggaagcctgtctcatcttgccctgtagtgttgggtcacctggcccccagcctgtaacatccccagggccctacacccagagaaacacggggctggtggcagtgcccagtgacaaccgtttagtggataagagaagagtgaccacaccaggctgagtgctcctctctggttttccatgggggagacaatgccaccctgagcagggtctggtgtgagcgggcagcttggctctgggctctctgatccgttaccctctcagcctctttgttctttctcaacccctggagcagagacctcaggaggtgctggcatggaacagagaaattccagcctcgattcctattatgaacccgacaccttttgtattttcatcttggttttacagtgtacaaaacgaactagatcagcagggcatgggcataatcacgaatgcacacacatacactaatgtgtggctcatgtttaagtatcacttactacaggacacccaatctaacagcaccgataaagtgacagagaaacgcaagccttctgcgaacatggcctggctgttccaattccgaaccttgcttttctgggccttgccacacaggctcttcccccgtccccccagggacattctacccttgaactccacactccactgctgcctttgccaggaagcccatctgttcctttttggttctgccagaacgtgtggtggtgctgctgtccctgccctgggcactggatattgggaagggacagtgtccacactggagtgggaagtccccagggacgagacctttacctcctcacccctgggtactgttctcctcatggagcatggacgcgtatatctagacgttacataacttacggtaaatggcccgcctggctgaccgcccaacgacccccgcccattgacgtcaataatgacgtatgttcccatagtaacgccaatagggactttccattgacgtcaatgggtggagtatttacggtaaactgcccacttggcagtacatcaagtgtatcatatgccaagtacgccccctattgacgtcaatgacggtaaatggcccgcctggcattatgcccagtacatgaccttatgggactttcctacttggcagtacatctagtattagtcatcgctattaccatggtgatgcggttttggcagtacatcaatgggcgtggatagcggtttgactcacggggatttccaagtctccaccccattgacgtcaatgggagtttgttttggcaccaaaatcaacgggactttccaaaatgtcgtaacaactccgccccattgacgcaaatgggcggtaggcgtgtacggtgggaggtctatataagcagagctcgtttagtgaaccgtcagatcgcctggagacgccatccacgctgttttgacctccatagaagacaccgggaccgatccagcctccgcggattcgaatcccggccgggaacggtgcattggaacgcggattccccgtgccaagagtgacgtaagtaccgcctatagagtctataggcccacaaaaaatgctttcttcttttaatatacttttttgtttatcttatttctaatactttccctaatctctttctttcagggcaataatgatacaatgtatcatgcctctttgcaccattctaaagaataacagtgataatttctgggttaaggcaatagcaatatttctgcatataaatatttctgcatataaattgtaactgatgtaagaggtttcatattgctaatagcagctacaatccagctaccattctgcttttattttatggttgggataaggctggattattctgagtccaagctaggcccttttgctaatcatgttcatacctcttatcttcctcccacagctcctgggcaacgtgctggtctgtgtgctggcccatcactttggcaaagaattgggattcgaacatcgattgaattccccggggatccaccgtgctgggcggggggcggcgggccctcccgcagaacaccatgcgctccacggaacctgctagctccatgcttgctgtggccactgagaagtaagcatggagctagcaggttctgaggagcgccttgacagcagccatgggagggccgccccctacctcagtgactcgagagatctacgggtggcatccctgtgacccctccccagtgcctctcctggccctggaagttgccactccagtgcccaccagccttgtcctaataaaattaagttgcatcattttgtctgactaggtgtccttctataatattatggggtggaggggggtggtatggagcaaggggcaagttgggaagacaacctgtagggcctgcggggtctattgggaaccaagctggagtgcagtggcacaatcttggctcactgcaatctccgcctcctgggttcaagcgattctcctgcctcagcctcccgagttgttgggattccaggcatgcatgaccaggctcagctaatttttgtttttttggtagagacggggtttcaccatattggccaggctggtctccaactcctaatctcaggtgatctacccaccttggcctcccaaattgctgggattacaggcgtgaaccactgctcccttccctgtccttactagatttaaatatgtcgtgcatcgatgctacgtagataagtagcatggcgggttaatcattaactacagaggaacccctagtgatggagttggccactccctctctgcgcgctcgctcgctcactgaggccgggcgaccaaaggtcgcccgacgcccgggctttgcccgggcggcctcagtgagcgagcgagcgcgcagctgcctgcagg

SEQ ID NO: 1371 - DNA, 2306 bp, Artificial Sequence
  Description of Artificial Sequence: Synthetic polynucleotide
cctgcaggcagctgcgcgctcgctcgctcactgaggccgcccgggcaaagcccgggcgtcgggcgacctttggtcgcccggcctcagtgagcgagcgagcgcgcagagagggagtggccaactccatcactaggggttccttgtagttaatgattaacccgccatgctacttatctacgtagccatgcgtcgacataacgcgtaattcgcccttgggcctaggcaattggatccgccggcagagaaaacatcccagggatttacagatcacatgcaggcagggaccagctcaacccttctacgcgtatatctagacgttacataacttacggtaaatggcccgcctggctgaccgcccaacgacccccgcccattgacgtcaataatgacgtatgttcccatagtaacgccaatagggactttccattgacgtcaatgggtggagtatttacggtaaactgcccacttggcagtacatcaagtgtatcatatgccaagtacgccccctattgacgtcaatgacggtaaatggcccgcctggcattatgcccagtacatgaccttatgggactttcctacttggcagtacatctagtattagtcatcgctattaccatggtgatgcggttttggcagtacatcaatgggcgtggatagcggtttgactcacggggatttccaagtctccaccccattgacgtcaatgggagtttgttttggcaccaaaatcaacgggactttccaaaatgtcgtaacaactccgccccattgacgcaaatgggcggtaggcgtgtacggtgggaggtctatataagcagagctcgtttagtgaaccgtcagatcgcctggagacgccatccacgctgttttgacctccatagaagacaccgggaccgatccagcctccgcggattcgaatcccggccgggaacggtgcattggaacgcggattccccgtgccaagagtgacgtaagtaccgcctatagagtctataggcccacaaaaaatgctttcttcttttaatatacttttttgtttatcttatttctaatactttccctaatctctttctttcagggcaataatgatacaatgtatcatgcctctttgcaccattctaaagaataacagtgataatttctgggttaaggcaatagcaatatttctgcatataaatatttctgcatataaattgtaactgatgtaagaggtttcatattgctaatagcagctacaatccagctaccattctgcttttattttatggttgggataaggctggattattctgagtccaagctaggcccttttgctaatcatgttcatacctcttatcttcctcccacagctcctgggcaacgtgctggtctgtgtgctggcccatcactttggcaaagaattgggattcgaacatcgattgaattccccggggatccaccgtgctgggcggggggcggcgggccctcccgcagaacaccatgcgctccacggaacctgctagctccatgcttgctgtggccactgagaagtaagcatggagctagcaggttctgaggagcgccttgacagcagccatgggagggccgccccctacctcagtgactcgagagatctacgggtggcatccctgtgacccctccccagtgcctctcctggccctggaagttgccactccagtgcccaccagccttgtcctaataaaattaagttgcatcattttgtctgactaggtgtccttctataatattatggggtggaggggggtggtatggagcaaggggcaagttgggaagacaacctgtagggcctgcggggtctattgggaaccaagctggagtgcagtggcacaatcttggctcactgcaatctccgcctcctgggttcaagcgattctcctgcctcagcctcccgagttgttgggattccaggcatgcatgaccaggctcagctaatttttgtttttttggtagagacggggtttcaccatattggccaggctggtctccaactcctaatctcaggtgatctacccaccttggcctcccaaattgctgggattacaggcgtgaaccactgctcccttccctgtccttactagatttaaatatgtcgtgcatcgatgctacgtagataagtagcatggcgggttaatcattaactacagaggaacccctagtgatggagttggccactccctctctgcgcgctcgctcgctcactgaggccgggcgaccaaaggtcgcccgacgcccgggctttgcccgggcggcctcagtgagcgagcgagcgcgcagctgcctgcagg

SEQ ID NO: 1372 - DNA, 4598 bp, Artificial Sequence
  Description of Artificial Sequence: Synthetic polynucleotide
cctgcaggcagctgcgcgctcgctcgctcactgaggccgcccgggcaaagcccgggcgtcgggcgacctttggtcgcccggcctcagtgagcgagcgagcgcgcagagagggagtggccaactccatcactaggggttccttgtagttaatgattaacccgccatgctacttatctacgtagccatgcgtcgacataacgcgtatatctagacgttacataacttacggtaaatggcccgcctggctgaccgcccaacgacccccgcccattgacgtcaataatgacgtatgttcccatagtaacgccaatagggactttccattgacgtcaatgggtggagtatttacggtaaactgcccacttggcagtacatcaagtgtatcatatgccaagtacgccccctattgacgtcaatgacggtaaatggcccgcctggcattatgcccagtacatgaccttatgggactttcctacttggcagtacatctagtattagtcatcgctattaccatggtgatgcggttttggcagtacatcaatgggcgtggatagcggtttgactcacggggatttccaagtctccaccccattgacgtcaatgggagtttgttttggcaccaaaatcaacgggactttccaaaatgtcgtaacaactccgccccattgacgcaaatgggcggtaggcgtgtacggtgggaggtctatataagcagagctcgtttagtgaaccgtcagatcgcctggagacgccatccacgctgttttgacctccatagaagacaccgggaccgatccagcctccgcggattcgaatcccggccgggaacggtgcattggaacgcggattccccgtgccaagagtgacgtaagtaccgcctatagagtctataggcccacaattcgcccttgggcctaggcaattggatccgccggcagagaaaacatcccagggatttacagatcacatgcaggcagggaccagctcaacccttctttaatgtcatccagggagggggccagggatggaggggaggggttgaggagcgagaggcagttatttttgggtgggattcaccacttttcccatgaagaggggagacttggtattttgttcaatcattaagaagacaaagggtttgttgaacttgacctcgggggggatagacatgggtatggcctctaaaaacatggccccagcagcttcagtccctttctcgtcgatggtcagcacagccttatgcacggcctggaggggagagaagcagagacacgttgtaaggctgatcccaggcctcgagcaaggctcacgtggacacctcccaggaagcgctcactccccctggacggccctggccctgcacatcctctccctccctgtcacataggccttgctcctcctcaaggctttggctgatggggctggctcccctctgtccatcttcctgacaagcgcctctccccctgctcaggtgcacccacaactcagaacagggaagagcatcgtcactccacgtctgcctccagggctctctcctttctagtacacggcttgaagctccttgaggacacggaccctggcagtgaccttcacagtgcccagaccccaagataatgcagccattcatggaactgcaggttgttcattggtcgcctttagttttccaaaataagtgtcactttagctgaaatcattcattaattcagacaccaaatctcacagatcgaaggagtcagaaattcctttgaaacaacttagcccaaacctttctgtgtcagtatggataaatcaaggcccaatgtctagaaggtcttgggcaaagttgaaattcagggtcagtgacacaacctcaagggaggccccgaaagtgccagctgcacagcagcccctgcctggctttgctgtttgcccaccgtcccgtgtcagtgaatcacgggcatcttcaggagctcagcctgggtcttcatttgtttccctcggccccttcctcagcctcaggacagtgctgcagcccccacacattcttccctacagataccatggtgcaacaaggtcgtcagggtgatctcaccttggagagcttcaggggtgcctcctctgtgaccccggagaggtcagccccattgctgaagaccttagtgatgcccagttgacccaggacgctcttcagatcataggttccagtaatggacagtttgggtaaatgtaagctggcagacctgtcgtgcagaaaagaaattcaaggcatggcacagcattcctcttgttcttctgggacccaccacagtgcaagtgttttcttttctgattatttctgccacttactcctgtgtcctccacccacactaagatgggaactcggctttggtttgttctacttttagctcttctacattgagtcaaagaatgttaacatcgaatgaatcacaaaagcttgaaatgccacctcctctgatattctaggtgtcctggaagcctgtctcatcttgccctgtagtgttgggtcacctggcccccagcctgtaacatccccagggccctacacccagagaaacacggggctggtggcagtgcccagtgacaaccgtttagtggataagagaagagtgaccacaccaggctgagtgctcctctctggttttccatggggagacaatgccaccctgagcagggtctggtgtgagcggcagctggctctgggctctctgatccgttaccctctcagcctctttgttctttctcaacccctggagcagagacctcaggaggtgctggcatggaacagagaaattccagcctcgattcctattatgaacccgacaccttttgtattttcatcttggttttacagtgtacaaaacgaactagatcagcagggcatgggcataatcacgaatgcacacacatacactaatgtgtggctcatgtttaagtatcacttactacaggacacccaatctaacagcaccgataaagtgacagagaaacgcaagccttctgcgaacatggcctggctgttccaattccgaaccttgcttttctgggccttgccacacaggctcttcccccgtccccccagggacattctacccttgaactccacactccactgctgcctttgccaggaagcccatctgttcctttttggttctgccagaacgtgtggtggtgctgctgtccctgccttgggcactggatattgggaagggacagtgtccacactggagtgggaagttcccagggacgagacctttacctcctcaccctgggtactgttctcctcatggagcatggaaaaaatgctttcttcttttaatatacttttttgtttatcttatttctaatactttccctaatctctttctttcagggcaataatgatacaatgtatcatgcctctttgcaccattctaaagaataacagtgataatttctgggttaaggcaatagcaatatttctgcatataaatatttctgcatataaattgtaactgatgtaagaggtttcatattgctaatagcagctacaatccagctaccattctgcttttattttatggttgggataaggctggattattctgagtccaagctaggcccttttgctaatcatgttcatacctcttatcttcctcccacagctcctgggcaacgtgctggtctgtgtgctggcccatcactttggcaaagaattgggattcgaacatcgattgaattccccggggatccaccgtgctgggcggggggcggcgggccctcccgcagaacaccatgcgctccacggaacctgctagctccatgcttgctgtggccactgagaagtaagcatggagctagcaggttctgaggagcgccttgacagcagccatgggagggccgccccctacctcagtgactcgagagatctacgggtggcatccctgtgacccctccccagtgcctctcctggccctggaagttgccactccagtgcccaccagccttgtcctaataaaattaagttgcatcattttgtctgactaggtgtccttctataatattatggggtggaggggggtggtatggagcaaggggcaagttgggaagacaacctgtagggcctgcggggtctattgggaaccaagctggagtgcagtggcacaatcttggctcactgcaatctccgcctcctgggttcaagcgattctcctgcctcagcctcccgagttgttgggattccaggcatgcatgaccaggctcagctaatttttgtttttttggtagagacggggtttcaccatattggccaggctggtctccaactcctaatctcaggtgatctacccaccttggcctcccaaattgctgggattacaggcgtgaaccactgctcccttccctgtccttactagatttaaatatgtcgtgcatcgatgctacgtagataagtagcatggcgggttaatcattaactacagaggaacccctagtgatggagttggccactccctctctgcgcgctcgctcgctcactgaggccgggcgaccaaaggtcgcccgacgcccgggctttgcccgggcggcctcagtgagcgagcgagcgcgcagctgcctgcagg

SEQ ID NO: 1373 - DNA, 2300 bp, Artificial Sequence
  Description of Artificial Sequence: Synthetic polynucleotide
cctgcaggcagctgcgcgctcgctcgctcactgaggccgcccgggcaaagcccgggcgtcgggcgacctttggtcgcccggcctcagtgagcgagcgagcgcgcagagagggagtggccaactccatcactaggggttccttgtagttaatgattaacccgccatgctacttatctacgtagccatgcgtcgacataacgcgtatatctagacgttacataacttacggtaaatggcccgcctggctgaccgcccaacgacccccgcccattgacgtcaataatgacgtatgttcccatagtaacgccaatagggactttccattgacgtcaatgggtggagtatttacggtaaactgcccacttggcagtacatcaagtgtatcatatgccaagtacgccccctattgacgtcaatgacggtaaatggcccgcctggcattatgcccagtacatgaccttatgggactttcctacttggcagtacatctagtattagtcatcgctattaccatggtgatgcggttttggcagtacatcaatgggcgtggatagcggtttgactcacggggatttccaagtctccaccccattgacgtcaatgggagtttgttttggcaccaaaatcaacgggactttccaaaatgtcgtaacaactccgccccattgacgcaaatgggcggtaggcgtgtacggtgggaggtctatataagcagagctcgtttagtgaaccgtcagatcgcctggagacgccatccacgctgttttgacctccatagaagacaccgggaccgatccagcctccgcggattcgaatcccggccgggaacggtgcattggaacgcggattccccgtgccaagagtgacgtaagtaccgcctatagagtctataggcccacaattcgcccttgggcctaggcaattggatccgccggcagagaaaacatcccagggatttacagatcacatgcaggcagggaccagctcaacccttctaaaaaatgctttcttcttttaatatacttttttgtttatcttatttctaatactttccctaatctctttctttcagggcaataatgatacaatgtatcatgcctctttgcaccattctaaagaataacagtgataatttctgggttaaggcaatagcaatatttctgcatataaatatttctgcatataaattgtaactgatgtaagaggtttcatattgctaatagcagctacaatccagctaccattctgcttttattttatggttgggataaggctggattattctgagtccaagctaggcccttttgctaatcatgttcatacctcttatcttcctcccacagctcctgggcaacgtgctggtctgtgtgctggcccatcactttggcaaagaattgggattcgaacatcgattgaattccccggggatccaccgtgctgggcggggggcggcgggccctcccgcagaacaccatgcgctccacggaacctgctagctccatgcttgctgtggccactgagaagtaagcatggagctagcaggttctgaggagcgccttgacagcagccatgggagggccgccccctacctcagtgactcgagagatctacgggtggcatccctgtgacccctccccagtgcctctcctggccctggaagttgccactccagtgcccaccagccttgtcctaataaaattaagttgcatcattttgtctgactaggtgtccttctataatattatggggtggaggggggtggtatggagcaaggggcaagttgggaagacaacctgtagggcctgcggggtctattgggaaccaagctggagtgcagtggcacaatcttggctcactgcaatctccgcctcctgggttcaagcgattctcctgcctcagcctcccgagttgttgggattccaggcatgcatgaccaggctcagctaatttttgtttttttggtagagacggggtttcaccatattggccaggctggtctccaactcctaatctcaggtgatctacccaccttggcctcccaaattgctgggattacaggcgtgaaccactgctcccttccctgtccttactagatttaaatatgtcgtgcatcgatgctacgtagataagtagcatggcgggttaatcattaactacagaggaacccctagtgatggagttggccactccctctctgcgcgctcgctcgctcactgaggccgggcgaccaaaggtcgcccgacgcccgggctttgcccgggcggcctcagtgagcgagcgagcgcgcagctgcctgcagg

SEQ ID NO: 1374 - DNA, 4615 bp, Artificial Sequence
  Description of Artificial Sequence: Synthetic polynucleotide
cctgcaggcagctgcgcgctcgctcgctcactgaggccgcccgggcaaagcccgggcgtcgggcgacctttggtcgcccggcctcagtgagcgagcgagcgcgcagagagggagtggccaactccatcactaggggttccttgtagttaatgattaacccgccatgctacttatctacgtagccatgcgtcgacataacgcgtaattcgcccttgggcctaggcaattggatccgccggcagagaaaacatcccagggatttacagatcacatgcaggcagggaccagctcaacccttctttaatgtcatccagggagggggccagggatggaggggaggggttgaggagcgagaggcagttatttttgggtgggattcaccacttttcccatgaagaggggagacttggtattttgttcaatcattaagaagacaaagggtttgttgaacttgacctcgggggggatagacatgggtatggcctctaaaaacatggccccagcagcttcagtccctttctcgtcgatggtcagcacagccttatgcacggcctggaggggagagaagcagagacacgttgtaaggctgatcccaggcctcgagcaaggctcacgtggacacctcccaggaagcgctcactccccctggacggccctggccctgcacatcctctccctccctgtcacataggccttgctcctcctcaaggctttggctgatggggctggctcccctctgtccatcttcctgacaagcgcctctccccctgctcaggtgcacccacaactcagaacagggaagagcatcgtcactccacgtctgcctccagggctctctcctttctagtacacggcttgaagctccttgaggacacggaccctggcagtgaccttcacagtgcccagaccccaagataatgcagccattcatggaactgcagttgttcattggtcgcctttagttttccaaaataagtgtcatctttagctgaaatcattcattaattcagacaccaaatctcacagatcgaaggagtcagaaattcctttgaaacaacttagcccaaacctttctgtgtcagtatggataaatcaaggcccaatgtctagaaggtcttgggcaaagttgaaattcagggtcagtgacacaacctcaagggaggccccgaaagtgccagctgcacagcagtcccctgcctggctttgctgtttgaccacgtcccgtgtcagtgaatcacgggcatcttcaggagctcagcctgggtcttcatttgtttccctcggccccttcctcagcctcaggacagagctgcagcccccacacattcttccctacagataccagggtgcaacaaggtcgtcagggtgatctcaccttggagagcttcaggggtgcctccacgcgtatatctagacgttacataacttacggtaaatggcccgcctggctgaccgcccaacgacccccgcccattgacgtcaataatgacgtatgttcccatagtaacgccaatagggactttccattgacgtcaatgggtggagtatttacggtaaactgcccacttggcagtacatcaagtgtatcatatgccaagtacgccccctattgacgtcaatgacggtaaatggcccgcctggcattatgcccagtacatgaccttatgggactttcctacttggcagtacatctagtattagtcatcgctattaccatggtgatgcggttttggcagtacatcaatgggcgtggatagcggtttgactcacggggatttccaagtctccaccccattgacgtcaatgggagtttgttttggcaccaaaatcaacgggactttccaaaatgtcgtaacaactccgccccattgacgcaaatgggcggtaggcgtgtacggtgggaggtctatataagcagagctcgtttagtgaaccgtcagatcgcctggagacgccatccacgctgttttgacctccatagaagacaccgggaccgatccagcctccgcggattcgaatcccggccgggaacggtgcattggaacgcggattccccgtgccaagagtgacgtaagtaccgcctatagagtctataggcccacaaaaaatgctttcttcttttaatatacttttttgtttatcttatttctaatactttccctaatctctttctttcagggcaataatgatacaatgtatcatgcctctttgcaccattctaaagaataacagtgataatttctgggttaaggcaatagcaatatttctgcatataaatatttctgcatataaattgtaactgatgtaagaggtttcatattgctaatagcagctacaatccagctaccattctgcttttattttatggttgggataaggctggattattctgagtccaagctaggcccttttgctaatcatgttcatacctcttatcttcctcccacagctcctgggcaacgtgctggtctgtgtgctggcccatcactttggcaaagaattgggattcgaacatcgattgaattccccggggatccaccgtgctgggcggggggcggcgggccctcccgcagaacaccatgcgctccacggaacctgctagctccatgcttgctgtggccactgagaagtaagcatggagctagcaggttctgaggagcgccttgacagcagccatgggagggccgccccctacctcagtgactcgagagatctacgggtggcatccctgtgacccctccccagtgcctctcctggccctggaagttgccactccagtgcccaccagccttgtcctaataaaattaagttgcatcattttgtctgactaggtgtccttctataatattatggggtggaggggggtggtatggagcaaggggcaagttgggaagacaacctgtagggcctgcggggtctattgggaaccaagctggagtgcagtggcacaatcttggctcactgcaatctccgcctcctgggttcaagcgattctcctgcctcagcctcccgagttgttgggattccaggcatgcatgaccaggctcagctaatttttgtttttttggtagagacggggtttcaccatattggccaggctggtctccaactcctaatctcaggtgatctacccaccttggcctcccaaattgctgggattacaggcgtgaaccactgctcccttccctgtccttactagatttaaattctgtgaccccggagaggtcagccccattgctgaagaccttagtgatgcccagttgacccaggacgctcttcagatcataggttccagtaatggacagtttgggtaaatgtaagctggcagacctgtcgtgcagaaaagaaattcaaggcatggcacagcattcctcttgttcttctgggacccaccacagtgcaagtgttttcttttctgattatttctgccacttactcctgtgtcctccacccacactaagatgggaactcggctttggtttgttctacttttagctcttctacattgagtcaaagaatgttaacatcgaatgaatcacaaaagcttgaaatgccacctcctctgatattctaggtgtcctggaagcctgtctcatcttgccctgtagtgttgggtcacctggcccccagcctgtaacatccccagggccctacacccagagaaacacggggctggtggcagtgcccagtgacaaccgtttagtggataagagaagagtgaccacaccaggctgagtgctcctctctggttttccatggggagacaatgccaccctgagcagggtctggtgtgagcgggcagcttggctctgggctctctgatccgttaccctctcagcctctttgttctttctcaacccctggagcagagacctcaggaggtgctggcatggaacagagaaattccagcctcgattcctattatgaacccgacaccttttgtattttcatcttggttttacagtgtacaaaacgaactagatcagcagggcatgggcataatcacgaatgcacacacatacactaatgtgtggctcatgtttaagtatcacttactacaggacacccaatctaacagcaccgataaagtgacagagaaacgcaagccttctgcgaacatggcctggctgttccaattccgaaccttgcttttctgggccttgccacacaggctcttcccccgtccccccagggacattctacccttgaactccacactccactgctgcctttgccaggaagcccatctgttcctttttggttctgccagaacgtgtggtggtgctgctgtccctgccctgggcactggatattgggaagggacagtgtccacactggagtgggaagtccccagggacgagacctttacctcctcacccctgggtactgttctcctcatggagcatggatttaaatatgtcgtgcatcgatgctacgtagataagtagcatggcgggttaatcattaactacagaggaacccctagtgatggagttggccactccctctctgcgcgctcgctcgctcactgaggccgggcgaccaaaggtcgcccgacgcccgggctttgcccgggcggcctcagtgagcgagcgagcgcgcagctgcctgcagg

SEQ ID NO: 1375 - DNA, 2314 bp, Artificial Sequence
  Description of Artificial Sequence: Synthetic polynucleotide
cctgcaggcagctgcgcgctcgctcgctcactgaggccgcccgggcaaagcccgggcgtcgggcgacctttggtcgcccggcctcagtgagcgagcgagcgcgcagagagggagtggccaactccatcactaggggttccttgtagttaatgattaacccgccatgctacttatctacgtagccatgcgtcgacataacgcgtaattcgcccttgggcctaggcaattggatccgccggcagagaaaacatcacgcgtatatctagacgttacataacttacggtaaatggcccgcctggctgaccgcccaacgacccccgcccattgacgtcaataatgacgtatgttcccatagtaacgccaatagggactttccattgacgtcaatgggtggagtatttacggtaaactgcccacttggcagtacatcaagtgtatcatatgccaagtacgccccctattgacgtcaatgacggtaaatggcccgcctggcattatgcccagtacatgaccttatgggactttcctacttggcagtacatctagtattagtcatcgctattaccatggtgatgcggttttggcagtacatcaatgggcgtggatagcggtttgactcacggggatttccaagtctccaccccattgacgtcaatgggagtttgttttggcaccaaaatcaacgggactttccaaaatgtcgtaacaactccgccccattgacgcaaatgggcggtaggcgtgtacggtgggaggtctatataagcagagctcgtttagtgaaccgtcagatcgcctggagacgccatccacgctgttttgacctccatagaagacaccgggaccgatccagcctccgcggattcgaatcccggccgggaacggtgcattggaacgcggattccccgtgccaagagtgacgtaagtaccgcctatagagtctataggcccacaaaaaatgctttcttcttttaatatacttttttgtttatcttatttctaatactttccctaatctctttctttcagggcaataatgatacaatgtatcatgcctctttgcaccattctaaagaataacagtgataatttctgggttaaggcaatagcaatatttctgcatataaatatttctgcatataaattgtaactgatgtaagaggtttcatattgctaatagcagctacaatccagctaccattctgcttttattttatggttgggataaggctggattattctgagtccaagctaggcccttttgctaatcatgttcatacctcttatcttcctcccacagctcctgggcaacgtgctggtctgtgtgctggcccatcactttggcaaagaattgggattcgaacatcgattgaattccccggggatccaccgtgctgggcggggggcggcgggccctcccgcagaacaccatgcgctccacggaacctgctagctccatgcttgctgtggccactgagaagtaagcatggagctagcaggttctgaggagcgccttgacagcagccatgggagggccgccccctacctcagtgactcgagagatctacgggtggcatccctgtgacccctccccagtgcctctcctggccctggaagttgccactccagtgcccaccagccttgtcctaataaaattaagttgcatcattttgtctgactaggtgtccttctataatattatggggtggaggggggtggtatggagcaaggggcaagttgggaagacaacctgtagggcctgcggggtctattgggaaccaagctggagtgcagtggcacaatcttggctcactgcaatctccgcctcctgggttcaagcgattctcctgcctcagcctcccgagttgttgggattccaggcatgcatgaccaggctcagctaatttttgtttttttggtagagacggggtttcaccatattggccaggctggtctccaactcctaatctcaggtgatctacccaccttggcctcccaaattgctgggattacaggcgtgaaccactgctcccttccctgtcctgactagatttaaatccagggatttacagatcacatgcaggcagggaccagctcaactcttctatttaaatatgtcgtgcatcgatgctacgtagataagtagcatggcgggttaatcattaactacagaggaacccctagtgatggagttggccactccctctctgcgcgctcgctcgctcactgaggccgggcgaccaaaggtcgcccgacgcccgggctttgcccgggcggcctcagtgagcgagcgagcgcgcagctgcctgcagg

SEQ ID NO: 1376 - DNA, 2198 bp, Artificial Sequence
  Description of Artificial Sequence: Synthetic polynucleotide
cctgcaggcagctgcgcgctcgctcgctcactgaggccgcccgggcaaagcccgggcgtcgggcgacctttggtcgcccggcctcagtgagcgagcgagcgcgcagagagggagtggccaactccatcactaggggttccttgtagttaatgattaacccgccatgctacttatctacgtatacatgcgtcgacataacgcgtatatctagacgttacataacttacggtaaatggcccgcctggctgaccgcccaacgacccccgcccattgacgtcaataatgacgtatgttcccatagtaacgccaatagggactttccattgacgtcaatgggtggagtatttacggtaaactgcccacttggcagtacatcaagtgtatcatatgccaagtacgccccctattgacgtcaatgacggtaaatggcccgcctggcattatgcccagtacatgaccttatgggactttcctacttggcagtacatctagtattagtcatcgctattaccatggtgatgcggttttggcagtacatcaatgggcgtggatagcggtttgactcacggggatttccaagtctccaccccattgacgtcaatgggagtttgttttggcaccaaaatcaacgggactttccaaaatgtcgtaacaactccgccccattgacgcaaatgggcggtaggcgtgtacggtgggaggtctatataagcagagctcgtttagtgaaccgtcagatcgcctggagacgccatccacgctgttttgacctccatagaagacaccgggaccgatccagcctccgcggattcgaatcccggccgggaacggtgcattggaacgcggattccccgtgccaagagtgacgtaagtaccgcctatagagtctataggcccacaaaaaatgctttcttcttttaatatacttttttgtttatcttatttctaatactttccctaatctctttctttcagggcaataatgatacaatgtatcatgcctctttgcaccattctaaagaataacagtgataatttctgggttaaggcaatagcaatatttctgcatataaatatttctgcatataaattgtaactgatgtaagaggtttcatattgctaatagcagctacaatccagctaccattctgcttttattttatggttgggataaggctggattattctgagtccaagctaggcccttttgctaatcatgttcatacctcttatcttcctcccacagctcctgggcaacgtgctggtctgtgtgctggcccatcactttggcaaagaattgggattcgaacatcgattgaattccccggggatccaccgtgctgggcggggggcggcgggccctcccgcagaacaccatgcgctcttcggaagcaattcagtctcgttgtgcctgtgacctggtacaacgagactgaattgcttctgaggagcgccttgacagcagccatgggagggccgccccctacctcagtgactcgagagatctacgggtggcatccctgtgacccctccccagtgcctctcctggccctggaagttgccactccagtgcccaccagccttgtcctaataaaattaagttgcatcattttgtctgactaggtgtccttctataatattatggggtggaggggggtggtatggagcaaggggcaagttgggaagacaacctgtagggcctgcggggtctattgggaaccaagctggagtgcagtggcacaatcttggctcactgcaatctccgcctcctgggttcaagcgattctcctgcctcagcctcccgagttgttgggattccaggcatgcatgaccaggctcagctaatttttgtttttttggtagagacggggtttcaccatattggccaggctggtctccaactcctaatctcaggtgatctacccaccttggcctcccaaattgctgggattacaggcgtgaaccactgctcccttccctgtccttactagatttaaatatgtcgtgcatcgatgctacgtagataagtagcatggcgggttaatcattaactacagaggaacccctagtgatggagttggccactccctctctgcgcgctcgctcgctcactgaggccgggcgaccaaaggtcgcccgacgcccgggctttgcccgggcggcctcagtgagcgagcgagcgcgcagctgcctgcagg

SEQ ID NO: 1377 - DNA, 2203 bp, Artificial Sequence
  Description of Artificial Sequence: Synthetic polynucleotide
cctgcaggcagctgcgcgctcgctcgctcactgaggccgcccgggcaaagcccgggcgtcgggcgacctttggtcgcccggcctcagtgagcgagcgagcgcgcagagagggagtggccaactccatcactaggggttccttgtagttaatgattaacccgccatgctacttatctacgtatacatgcgtcgacataacgcgtatatctagacgttacataacttacggtaaatggcccgcctggctgaccgcccaacgacccccgcccattgacgtcaataatgacgtatgttcccatagtaacgccaatagggactttccattgacgtcaatgggtggagtatttacggtaaactgcccacttggcagtacatcaagtgtatcatatgccaagtacgccccctattgacgtcaatgacggtaaatggcccgcctggcattatgcccagtacatgaccttatgggactttcctacttggcagtacatctagtattagtcatcgctattaccatggtgatgcggttttggcagtacatcaatgggcgtggatagcggtttgactcacggggatttccaagtctccaccccattgacgtcaatgggagtttgttttggcaccaaaatcaacgggactttccaaaatgtcgtaacaactccgccccattgacgcaaatgggcggtaggcgtgtacggtgggaggtctatataagcagagctcgtttagtgaaccgtcagatcgcctggagacgccatccacgctgttttgacctccatagaagacaccgggaccgatccagcctccgcggattcgaatcccggccgggaacggtgcattggaacgcggattccccgtgccaagagtgacgtaagtaccgcctatagagtctataggcccacaaaaaatgctttcttcttttaatatacttttttgtttatcttatttctaatactttccctaatctctttctttcagggcaataatgatacaatgtatcatgcctctttgcaccattctaaagaataacagtgataatttctgggttaaggcaatagcaatatttctgcatataaatatttctgcatataaattgtaactgatgtaagaggtttcatattgctaatagcagctacaatccagctaccattctgcttttattttatggttgggataaggctggattattctgagtccaagctaggcccttttgctaatcatgttcatacctcttatcttcctcccacagctcctgggcaacgtgctggtctgtgtgctggcccatcactttggcaaagaattgggattcgaacatcgattgaattccccggggatccaccgtgctgggcggggggcggcgggccctcccgcagaacaccatgcgctccacggaacctgctagctccatgcttgctgtggccactgagaagtaagcatggagctagcaggttctgaggagcgccttgacagcagccatgggagggccgccccctacctcagtgactcgagagatctacgggtggcatccctgtgacccctccccagtgcctctcctggccctggaagttgccactccagtgcccaccagccttgtcctaataaaattaagttgcatcattttgtctgactaggtgtccttctataatattatggggtggaggggggtggtatggagcaaggggcaagttgggaagacaacctgtagggcctgcggggtctattgggaaccaagctggagtgcagtggcacaatcttggctcactgcaatctccgcctcctgggttcaagcgattctcctgcctcagcctcccgagttgttgggattccaggcatgcatgaccaggctcagctaatttttgtttttttggtagagacggggtttcaccatattggccaggctggtctccaactcctaatctcaggtgatctacccaccttggcctcccaaattgctgggattacaggcgtgaaccactgctcccttccctgtccttactagatttaaatatgtcgtgcatcgatgctacgtagataagtagcatggcgggttaatcattaactacagaggaacccctagtgatggagttggccactccctctctgcgcgctcgctcgctcactgaggccgggcgaccaaaggtcgcccgacgcccgggctttgcccgggcggcctcagtgagcgagcgagcgcgcagctgcctgcagg

SEQ ID NO: 1378 - DNA, 844 bp, Artificial Sequence
  Description of Artificial Sequence: Synthetic polynucleotide
ctgcgcgctcgctcgctcactgaggccgcccgggcaaagcccgggcgtcgggcgacctttggtcgcccggcctcagtgagcgagcgagcgcgcagagagggagtgtagccatgctctaggaagatcaattcaattcacgcgttgacgtacgaaattcgaacgctgacgtcatcaacccgctccaaggaatcgcgggcccagtgtcactaggcgggaacacccagcgcgcgtgcgccctggcaggaagatggctgtgagggacagggagtggcgccctgcaatatttgcatgtcgctatgtgttctgggaaatcaccataaacgtgaaatgtctttggatttgggaatcttataagttctgtatgagaccacaccggtgaagcaaagaaggggcagagggagcccgtgagctgagtgggccagggactgggagaaggagtgaggaggcagggccggcatgcctctgctgctggccagacctgctagctccatgcttcccgtctgcacctgtcactagtaagcatggagctagcaggtttggccgtgtagtgctacccagcgctggctgcctcctcagcattgcaattcctctcccatctgggcaccagtcagctaccctggtgggaatctgggtagccctcgagatagcggccgcccccgagatctttttatgtacatctagataagtagcatggcgggttaatcattaactacaaggaacccctagtgatggagttggccactccctctctgcgcgctcgctcgctcactgaggccgggcgaccaaaggtcgcccgacgcccgggctttgcccgggcggcctcagtgagcgagcgagcgcgcag

SEQ ID NO: 1379 - DNA, 742 bp, Artificial Sequence
  Description of Artificial Sequence: Synthetic polynucleotide
ctgcgcgctcgctcgctcactgaggccgcccgggcaaagcccgggcgtcgggcgacctttggtcgcccggcctcagtgagcgagcgagcgcgcagagagggagtgtagccatgctctaggaagatcaattcaattcacgcgttgacgtacgaaattcgaacgctgacgtcatcaacccgctccaaggaatcgcgggcccagtgtcactaggcgggaacacccagcgcgcgtgcgccctggcaggaagatggctgtgagggacagggagtggcgccctgcaatatttgcatgtcgctatgtgttctgggaaatcaccataaacgtgaaatgtctttggatttgggaatcttataagttctgtatgagaccacaccggtgtgctgggcggggggcggcgggccctcccgcagaacaccatgcgctcttcggaagcaattcagtctcgttgtgcctgtgacctggtacaacgagactgaattgcttctgaggagcgccttgacagcagccatgggagggccgccccctacctcagtgactcgagatagcggccgcccccgagatctttttatgtacatctagataagtagcatggcgggttaatcattaactacaaggaacccctagtgatggagttggccactccctctctgcgcgctcgctcgctcactgaggccgggcgaccaaaggtcgcccgacgcccgggctttgcccgggcggcctcagtgagcgagcgagcgcgcag

SEQ ID NO: 1380 - DNA, 141 bp, Artificial Sequence
  Description of Artificial Sequence: Synthetic oligonucleotide
cctgcaggcagctgcgcgctcgctcgctcactgaggccgcccgggcaaagcccgggcgtcgggcgacctttggtcgcccggcctcagtgagcgagcgagcgcgcagagagggagtggccaactccatcactaggggttcct

SEQ ID NO: 1381 - DNA, 105 bp, Artificial Sequence
  Description of Artificial Sequence: Synthetic oligonucleotide
ctgcgcgctcgctcgctcactgaggccgcccgggcaaagcccgggcgtcgggcgacctttggtcgcccggcctcagtgagcgagcgagcgcgcagagagggagtg

SEQ ID NO: 1382 - DNA, 141 bp, Artificial Sequence
  Description of Artificial Sequence: Synthetic oligonucleotide
aggaacccctagtgatggagttggccactccctctctgcgcgctcgctcgctcactgaggccgggcgaccaaaggtcgcccgacgcccgggctttgcccgggcggcctcagtgagcgagcgagcgcgcagctgcctgcagg

SEQ ID NO: 1383 - DNA, 130 bp, Artificial Sequence
  Description of Artificial Sequence: Synthetic oligonucleotide
aggaacccctagtgatggagttggccactccctctctgcgcgctcgctcgctcactgaggccgggcgaccaaaggtcgcccgacgcccgggctttgcccgggcggcctcagtgagcgagcgagcgcgcag

SEQ ID NO: 1384 - DNA, 10 bp, Artificial Sequence
  Description of Artificial Sequence: Synthetic oligonucleotide
gtcgacataa

SEQ ID NO: 1385 - DNA, 121 bp, Artificial Sequence
  Description of Artificial Sequence: Synthetic oligonucleotide
gtcgacataacgcgtaattcgcccttgggcctaggcaattggatccgccggcagagaaaacatcccagggatttacagatcacatgcaggcagggaccagctcaacccttctacgcgtata

SEQ ID NO: 1386 - DNA, 73 bp, Artificial Sequence
  Description of Artificial Sequence: Synthetic oligonucleotide
gtcgacataacgcgtaattcgcccttgggcctaggcaattggatccgccggcagagaaaacatcacgcgtata

SEQ ID NO: 1387 - DNA, 18 bp, Artificial Sequence
  Description of Artificial Sequence: Synthetic oligonucleotide
gtcgacataacgcgtata

SEQ ID NO: 1388 - DNA, 1482 bp, Artificial Sequence
  Description of Artificial Sequence: Synthetic polynucleotide
ctgcgcgctcgctcgctcactgaggccgcccgggcaaagcccgggcgtcgggcgacctttggtcgcccggcctcagtgagcgagcgagcgcgcagagagggagtgtagccatgctctaggaagatcaattcaattcacgcgtcgacattgattattgactagttattaatagtaatcaattacggggtcattagttcatagcccatatatggagttccgcgttacataacttacggtaaatggcccgcctggctgaccgcccaacgacccccgcccattgacgtcaataatgacgtatgttcccatagtaacgccaatagggactttccattgacgtcaatgggtggagtatttacggtaaactgcccacttggcagtacatcaagtgtatcatatgccaagtacgccccctattgacgtcaatgacggtaaatggcccgcctggcattatgcccagtacatgaccttatgggactttcctacttggcagtacatctacgtattagtcatcgctattaccatgtcgaggccacgttctgcttcactctccccatctcccccccctccccacccccaattttgtatttatttattttttaattattttgtgcagcgatgggggcggggggggggggcgcgcgccaggcggggcggggcggggcgaggggcggggcggggcgaggcggagaggtgcggcggcagccaatcagagcggcgcgctccgaaagtttccttttatggcgaggcggcggcggcggcggccctataaaaagcgaagcgcgcggcgggcgggagcaagcttgaactgaaaaaccagaaagttaactggtaagtttagtctttttgtcttttatttcaggtcccggatccggtggtggtgcaaatcaaagaactgctcctcagtggatgttgcctttacttctaggcctgtacggaagtgttacttctgctctaaaagctgcggaattgtacccgcggccgatccaccggtgtgctgggcggggggcggcgggccctcccgcagaacaccatgcgctcttcggaacctgctagctccatgcttgcctgtgacctggtaagcatggagctagcaggttctgaggagcgccttgacagcagccatgggagggccgccccctacctcagtgactcgaggacggggtgaactacgcctgaggatccgatctttttccctctgccaaaaattatggggacatcatgaagccccttgagcatctgacttctggctaataaaggaaatttattttcattgcaatagtgtgttggaattttttgtgtctctcactcggcctaggtagataagtagcatggcgggttaatcattaactacaaggaacccctagtgatggagttggccactccctctctgcgcgctcgctcgctcactgaggccgggcgaccaaaggtcgcccgacgcccgggctttgcccgggcggcctcagtgagcgagcgagcgcgcag

SEQ ID NO: 1389 - DNA, 14 bp, Artificial Sequence
  Description of Artificial Sequence: Synthetic oligonucleotide
ctcgagagatctac

SEQ ID NO: 1390 - DNA, 3013 bp, Artificial Sequence
  Description of Artificial Sequence: Synthetic oligonucleotide
aattcgcccttgggcctaggcaattggatccgccggcagagaaaacatcccagggatttacagatcacatgcaggcagggaccagctcaacccttctttaatgtcatccagggagggggccagggatggaggggaggggttgaggagcgagaggcagttatttttgggtgggattcaccacttttcccatgaagaggggagacttggtattttgttcaatcattaagaagacaaagggtttgttgaacttgacctcgggggggatagacatgggtatggcctctaaaaacatggccccagcagcttcagtccctttctcgtcgatggtcagcacagccttatgcacggcctggaggggagagaagcagagacacgttgtaaggctgatcccaggcctcgagcaaggctcacgtggacacctcccaggaagcgctcactccccctggacggccctggccctgcacatcctctccctccctgtcacataggccttgctcctcctcaaggctttggctgatggggctggctcccctctgtccatcttcctgacaagcgcctctccccctgctcaggtgcacccacaactcagaacagggaagagcatcgtcactccacgtctgcctccagggctctctcctttctagtacacggcttgaagctccttgaggacacggaccctggcagtgaccttcacagtgcccagaccccaagataatgcagccattcatggaactgcaggttgttcattggtcgcctttagttttccaaaataagtgtcactttagctgaaatcattcattaattcagacaccaaatctcacagatcgaaggagtcagaaattcctttgaaacaacttagcccaaacctttctgtgtcagtatggataaatcaaggcccaatgtctagaaggtcttgggcaaagttgaaattcagggtcagtgacacaacctcaagggaggccccgaaagtgccagctgcacagcagcccctgcctggctttgctgtttgcccaccgtcccgtgtcagtgaatcacgggcatcttcaggagctcagcctgggtcttcatttgtttccctcggccccttcctcagcctcaggacagtgctgcagcccccacacattcttccctacagataccatggtgcaacaaggtcgtcagggtgatctcaccttggagagcttcaggggtgcctcctctgtgaccccggagaggtcagccccattgctgaagaccttagtgatgcccagttgacccaggacgctcttcagatcataggttccagtaatggacagtttgggtaaatgtaagctggcagacctgtcgtgcagaaaagaaattcaaggcatggcacagcattcctcttgttcttctgggacccaccacagtgcaagtgttttcttttctgattatttctgccacttactcctgtgtcctccacccacactaagatgggaactcggctttggtttgttctacttttagctcttctacattgagtcaaagaatgttaacatcgaatgaatcacaaaagcttgaaatgccacctcctctgatattctaggtgtcctggaagcctgtctcatcttgccctgtagtgttgggtcacctggcccccagcctgtaacatccccagggccctacacccagagaaacacggggctggtggcagtgcccagtgacaaccgtttagtggataagagaagagtgaccacaccaggctgagtgctcctctctggttttccatggggagacaatgccaccctgagcagggtctggtgtgagcggcagctggctctgggctctctgatccgttaccctctcagcctctttgttctttctcaacccctggagcagagacctcaggaggtgctggcatggaacagagaaattccagcctcgattcctattatgaacccgacaccttttgtattttcatcttggttttacagtgtacaaaacgaactagatcagcagggcatgggcataatcacgaatgcacacacatacactaatgtgtggctcatgtttaagtatcacttactacaggacacccaatctaacagcaccgataaagtgacagagaaacgcaagccttctgcgaacatggcctggctgttccaattccgaaccttgcttttctgggccttgccacacaggctcttcccccgtccccccagggacattctacccttgaactccacactccactgctgcctttgccaggaagcccatctgttcctttttggttctgccagaacgtgtggtggtgctgctgtccctgccttgggcactggatattgggaagggacagtgtccacactggagtgggaagttcccagggacgagacctttacctcctcaccctgggtactgttctcctcatggagcatggacggcgctgcctgaactcagtggtggcctcattctggaagccaagtttatacagagtagcagtgacccagggatgtggggttcaccctcctcagccctctggccagtcctgatgggcctcagtcccaacatggctaagaggtgtgggcagcttcttggtcaccctcaggttggggaatcaccttctgtcttcattttccaggaacttggtgatgatatcgtgggtgagttcatttaccaggtgctgtagtttcccctcatcaggcaggaagaagatggcggtggcattgcccaggtatttcatcagcagcacccagctggacagcttcttacagtgctggatgttaaacatgcctaaacgcttcatcataggcaccttcacggtggtcacctggtccacgtggaagtcctcttcctcggtgtccttgacttcaaagggtctctcccatttgcctggagagaggggaaggtgggcatcaccaggggtgagtgaaggtttggaagagtgtagcagaataagaaaccatgagtcccctccctgagaagccctgagcccccttgacgacacacatccctcgaggctcagcttcatcatctgtaaaaggtgctgaaactgacc

SEQ ID NO: 1391 - DNA, 712 bp, Artificial Sequence
  Description of Artificial Sequence: Synthetic oligonucleotide
aattcgcccttgggcctaggcaattggatccgccggcagagaaaacatcccagggatttacagatcacatgcaggcagggaccagctcaacccttctttaatgtcatccagggagggggccagggatggaggggaggggttgaggagcgagaggcagttatttttgggtgggattcaccacttttcccatgaagaggggagacttggtattttgttcaatcattaagaagacaaagggtttgttgaacttgacctcgggggggatagacatgggtatggcctctaaaaacatggccccagcagcttcagtccctttctcgtcgatggtcagcacagccttatgcacggcctggaggggagagaagcagagacacgttgtaaggctgatcccaggcctcgagcaaggctcacgtggacacctcccaggaagcgctcactccccctggacggccctggccctgcacatcctctccctccctgtcacataggccttgctcctcctcaaggctttggctgatggggctggctcccctctgtccatcttcctgacaagcgcctctccccctgctcaggtgcacccacaactcagaacagggaagagcatcgtcactccacgtctgcctccagggctctctcctttctagtacacggcttgaagctccttgaggacacggaccctggcagtgaccttcacagtgcccagaccacgcgt

SEQ ID NO: 1392 - DNA, 2405 bp, Artificial Sequence
  Description of Artificial Sequence: Synthetic oligonucleotide
aattcgcccttgggcctaggcaattggatccgccggcagagaaaacatcccagggatttacagatcacatgcaggcagggaccagctcaacccttctttaatgtcatccagggagggggccagggatggaggggaggggttgaggagcgagaggcagttatttttgggtgggattcaccacttttcccatgaagaggggagacttggtattttgttcaatcattaagaagacaaagggtttgttgaacttgacctcgggggggatagacatgggtatggcctctaaaaacatggccccagcagcttcagtccctttctcgtcgatggtcagcacagccttatgcacggcctggaggggagagaagcagagacacgttgtaaggctgatcccaggcctcgagcaaggctcacgtggacacctcccaggaagcgctcactccccctggacggccctggccctgcacatcctctccctccctgtcacataggccttgctcctcctcaaggctttggctgatggggctggctcccctctgtccatcttcctgacaagcgcctctccccctgctcaggtgcacccacaactcagaacagggaagagcatcgtcactccacgtctgcctccagggctctctcctttctagtacacggcttgaagctccttgaggacacggaccctggcagtgaccttcacagtgcccagaccccaagataatgcagccattcatggaactgcagttgttcattggtcgcctttagttttccaaaataagtgtcatctttagctgaaatcattcattaattcagacaccaaatctcacagatcgaaggagtcagaaattcctttgaaacaacttagcccaaacctttctgtgtcagtatggataaatcaaggcccaatgtctagaaggtcttgggcaaagttgaaattcagggtcagtgacacaacctcaagggaggccccgaaagtgccagctgcacagcagtcccctgcctggctttgctgtttgaccacgtcccgtgtcagtgaatcacgggcatcttcaggagctcagcctgggtcttcatttgtttccctcggccccttcctcagcctcaggacagagctgcagcccccacacattcttccctacagataccagggtgcaacaaggtcgtcagggtgatctcaccttggagagcttcaggggtgcctcctctgtgaccccggagaggtcagccccattgctgaagaccttagtgatgcccagttgacccaggacgctcttcagatcataggttccagtaatggacagtttgggtaaatgtaagctggcagacctgtcgtgcagaaaagaaattcaaggcatggcacagcattcctcttgttcttctgggacccaccacagtgcaagtgttttcttttctgattatttctgccacttactcctgtgtcctccacccacactaagatgggaactcggctttggtttgttctacttttagctcttctacattgagtcaaagaatgttaacatcgaatgaatcacaaaagcttgaaatgccacctcctctgatattctaggtgtcctggaagcctgtctcatcttgccctgtagtgttgggtcacctggcccccagcctgtaacatccccagggccctacacccagagaaacacggggctggtggcagtgcccagtgacaaccgtttagtggataagagaagagtgaccacaccaggctgagtgctcctctctggttttccatgggggagacaatgccaccctgagcagggtctggtgtgagcgggcagcttggctctgggctctctgatccgttaccctctcagcctctttgttctttctcaacccctggagcagagacctcaggaggtgctggcatggaacagagaaattccagcctcgattcctattatgaacccgacaccttttgtattttcatcttggttttacagtgtacaaaacgaactagatcagcagggcatgggcataatcacgaatgcacacacatacactaatgtgtggctcatgtttaagtatcacttactacaggacacccaatctaacagcaccgataaagtgacagagaaacgcaagccttctgcgaacatggcctggctgttccaattccgaaccttgcttttctgggccttgccacacaggctcttcccccgtccccccagggacattctacccttgaactccacactccactgctgcctttgccaggaagcccatctgttcctttttggttctgccagaacgtgtggtggtgctgctgtccctgccctgggcactggatattgggaagggacagtgtccacactggagtgggaagtccccagggacgagacctttacctcctcacccctgggtactgttctcctcatggagcatggacgcgt

SEQ ID NO: 1393 - DNA, 1203 bp, Artificial Sequence
  Description of Artificial Sequence: Synthetic oligonucleotide
aattcgcccttgggcctaggcaattggatccgccggcagagaaaacatcccagggatttacagatcacatgcaggcagggaccagctcaacccttctttaatgtcatccagggagggggccagggatggaggggaggggttgaggagcgagaggcagttatttttgggtgggattcaccacttttcccatgaagaggggagacttggtattttgttcaatcattaagaagacaaagggtttgttgaacttgacctcgggggggatagacatgggtatggcctctaaaaacatggccccagcagcttcagtccctttctcgtcgatggtcagcacagccttatgcacggcctggaggggagagaagcagagacacgttgtaaggctgatcccaggcctcgagcaaggctcacgtggacacctcccaggaagcgctcactccccctggacggccctggccctgcacatcctctccctccctgtcacataggccttgctcctcctcaaggctttggctgatggggctggctcccctctgtccatcttcctgacaagcgcctctccccctgctcaggtgcacccacaactcagaacagggaagagcatcgtcactccacgtctgcctccagggctctctcctttctagtacacggcttgaagctccttgaggacacggaccctggcagtgaccttcacagtgcccagaccccaagataatgcagccattcatggaactgcagttgttcattggtcgcctttagttttccaaaataagtgtcatctttagctgaaatcattcattaattcagacaccaaatctcacagatcgaaggagtcagaaattcctttgaaacaacttagcccaaacctttctgtgtcagtatggataaatcaaggcccaatgtctagaaggtcttgggcaaagttgaaattcagggtcagtgacacaacctcaagggaggccccgaaagtgccagctgcacagcagtcccctgcctggctttgctgtttgaccacgtcccgtgtcagtgaatcacgggcatcttcaggagctcagcctgggtcttcatttgtttccctcggccccttcctcagcctcaggacagagctgcagcccccacacattcttccctacagataccagggtgcaacaaggtcgtcagggtgatctcaccttggagagcttcaggggtgcctccacgcgt

SEQ ID NO: 1394 - DNA, 103 bp, Artificial Sequence
  Description of Artificial Sequence: Synthetic oligonucleotide
aattcgcccttgggcctaggcaattggatccgccggcagagaaaacatcccagggatttacagatcacatgcaggcagggaccagctcaacccttctacgcgt

SEQ ID NO: 1395 - DNA, 55 bp, Artificial Sequence
  Description of Artificial Sequence: Synthetic oligonucleotide
aattcgcccttgggcctaggcaattggatccgccggcagagaaaacatcacgcgt

SEQ ID NO: 1396 - DNA, 1512 bp, Artificial Sequence
  Description of Artificial Sequence: Synthetic oligonucleotide
cgcgtaattcgcccttgggcctaggcaattggatccgccggcagagaaaacatcccagggatttacagatcacatgcaggcagggaccagctcaacccttctttaatgtcatccagggagggggccagggatggaggggaggggttgaggagcgagaggcagttatttttgggtgggattcaccacttttcccatgaagaggggagacttggtattttgttcaatcattaagaagacaaagggtttgttgaacttgacctcgggggggatagacatgggtatggcctctaaaaacatggccccagcagcttcagtccctttctcgtcgatggtcagcacagccttatgcacggcctggaggggagagaagcagagacacgttgtaaggctgatcccaggcctcgagcaaggctcacgtggacacctcccaggaagcgctcactccccctggacggccctggccctgcacatcctctccctccctgtcacataggccttgctcctcctcaaggctttggctgatggggctggctcccctctgtccatcttcctgacaagcgcctctccccctgctcaggtgcacccacaactcagaacagggaagagcatcgtcactccacgtctgcctccagggctctctcctttctagtacacggcttgaagctccttgaggacacggaccctggcagtgaccttcacagtgcccagaccccaagataatgcagccattcatggaactgcagttgttcattggtcgcctttagttttccaaaataagtgtcatctttagctgaaatcattcattaattcagacaccaaatctcacagatcgaaggagtcagaaattcctttgaaacaacttagcccaaacctttctgtgtcagtatggataaatcaaggcccaatgtctagaaggtcttgggcaaagttgaaattcagggtcagtgacacaacctcaagggaggccccgaaagtgccagctgcacagcagtcccctgcctggctttgctgtttgaccacgtcccgtgtcagtgaatcacgggcatcttcaggagctcagcctgggtcttcatttgtttccctcggccccttcctcagcctcaggacagagctgcagcccccacacattcttccctacagataccatggtgcaacaaggtcgtcagggtgatctcaccttggagagcttcaggggtgcctcctctgtgaccccggagaggtcagccccattgctgaagaccttagtgatgcccagttgacccaggacgctcttcagatcataggttccagtaatggacagtttgggtaaatgtaagctggcagacctgtcgtgcagaaaagaaattcaaggcatggcacagcattcctcttgttcttctgggacccaccacagtgcaagtgttttcttttctgattatttctgccacttactcctgtgtcctccacccacactaagatgggaactcggctttggtttgttctacttttagctcttctacattgagtcaaaga

SEQ ID NO: 1397 - DNA, 363 bp, Artificial Sequence
  Description of Artificial Sequence: Synthetic oligonucleotide
aattcgcccttgggcctaggcaattggatccgccggcagagaaaacatcccagggatttacagatcacatgcaggcagggaccagctcaacccttctttaatgtcatccagggagggggccagggatggaggggaggggttgaggagcgagaggcagttatttttgggtgggattcaccacttttcccatgaagaggggagacttggtattttgttcaatcattaagaagacaaagggtttgttgaacttgacctcgggggggatagacatgggtatggcctctaaaaacatggccccagcagcttcagtccctttctcgtcgatggtcagcacagccttatgcacggcctggagggacgcgt

SEQ ID NO: 1398 - DNA, 2395 bp, Artificial Sequence
  Description of Artificial Sequence: Synthetic oligonucleotide
aattcgcccttgggcctaggcaattggatccgccggcagagaaaacatcccagggatttacagatcacatgcaggcagggaccagctcaacccttctttaatgtcatccagggagggggccagggatggaggggaggggttgaggagcgagaggcagttatttttgggtgggattcaccacttttcccatgaagaggggagacttggtattttgttcaatcattaagaagacaaagggtttgttgaacttgacctcgggggggatagacatgggtatggcctctaaaaacatggccccagcagcttcagtccctttctcgtcgatggtcagcacagccttatgcacggcctggaggggagagaagcagagacacgttgtaaggctgatcccaggcctcgagcaaggctcacgtggacacctcccaggaagcgctcactccccctggacggccctggccctgcacatcctctccctccctgtcacataggccttgctcctcctcaaggctttggctgatggggctggctcccctctgtccatcttcctgacaagcgcctctccccctgctcaggtgcacccacaactcagaacagggaagagcatcgtcactccacgtctgcctccagggctctctcctttctagtacacggcttgaagctccttgaggacacggaccctggcagtgaccttcacagtgcccagaccccaagataatgcagccattcatggaactgcaggttgttcattggtcgcctttagttttccaaaataagtgtcactttagctgaaatcattcattaattcagacaccaaatctcacagatcgaaggagtcagaaattcctttgaaacaacttagcccaaacctttctgtgtcagtatggataaatcaaggcccaatgtctagaaggtcttgggcaaagttgaaattcagggtcagtgacacaacctcaagggaggccccgaaagtgccagctgcacagcagcccctgcctggctttgctgtttgcccaccgtcccgtgtcagtgaatcacgggcatcttcaggagctcagcctgggtcttcatttgtttccctcggccccttcctcagcctcaggacagtgctgcagcccccacacattcttccctacagataccatggtgcaacaaggtcgtcagggtgatctcaccttggagagcttcaggggtgcctcctctgtgaccccggagaggtcagccccattgctgaagaccttagtgatgcccagttgacccaggacgctcttcagatcataggttccagtaatggacagtttgggtaaatgtaagctggcagacctgtcgtgcagaaaagaaattcaaggcatggcacagcattcctcttgttcttctgggacccaccacagtgcaagtgttttcttttctgattatttctgccacttactcctgtgtcctccacccacactaagatgggaactcggctttggtttgttctacttttagctcttctacattgagtcaaagaatgttaacatcgaatgaatcacaaaagcttgaaatgccacctcctctgatattctaggtgtcctggaagcctgtctcatcttgccctgtagtgttgggtcacctggcccccagcctgtaacatccccagggccctacacccagagaaacacggggctggtggcagtgcccagtgacaaccgtttagtggataagagaagagtgaccacaccaggctgagtgctcctctctggttttccatggggagacaatgccaccctgagcagggtctggtgtgagcggcagctggctctgggctctctgatccgttaccctctcagcctctttgttctttctcaacccctggagcagagacctcaggaggtgctggcatggaacagagaaattccagcctcgattcctattatgaacccgacaccttttgtattttcatcttggttttacagtgtacaaaacgaactagatcagcagggcatgggcataatcacgaatgcacacacatacactaatgtgtggctcatgtttaagtatcacttactacaggacacccaatctaacagcaccgataaagtgacagagaaacgcaagccttctgcgaacatggcctggctgttccaattccgaaccttgcttttctgggccttgccacacaggctcttcccccgtccccccagggacattctacccttgaactccacactccactgctgcctttgccaggaagcccatctgttcctttttggttctgccagaacgtgtggtggtgctgctgtccctgccttgggcactggatattgggaagggacagtgtccacactggagtgggaagttcccagggacgagacctttacctcctcaccctgggtactgttctcctcatggagcatgg

SEQ ID NO: 1399 - DNA, 97 bp, Artificial Sequence
  Description of Artificial Sequence: Synthetic oligonucleotide
aattcgcccttgggcctaggcaattggatccgccggcagagaaaacatcccagggatttacagatcacatgcaggcagggaccagctcaacccttct

SEQ ID NO: 1400 - DNA, 714 bp, Artificial Sequence
  Description of Artificial Sequence: Synthetic oligonucleotide
aattcgcccttgggcctaggcaattggatccgccggcagagaaaacatcccagggatttacagatcacatgcaggcagggaccagctcaacccttctttaatgtcatccagggagggggccagggatggaggggaggggttgaggagcgagaggcagttatttttgggtgggattcaccacttttcccatgaagaggggagacttggtattttgttcaatcattaagaagacaaagggtttgttgaacttgacctcgggggggatagacatgggtatggcctctaaaaacatggccccagcagcttcagtccctttctcgtcgatggtcagcacagccttatgcacggcctggaggggagagaagcagagacacgttgtaaggctgatcccaggcctcgagcaaggctcacgtggacacctcccaggaagcgctcactccccctggacggccctggccctgcacatcctctccctccctgtcacataggccttgctcctcctcaaggctttggctgatggggctggctcccctctgtccatcttcctgacaagcgcctctccccctgctcaggtgcacccacaactcagaacagggaagagcatcgtcactccacgtctgcctccagggctctctcctttctagtacacggcttgaagctccttgaggacacggaccctggcagtgaccttcacagtgcccagaccatttaaat

SEQ ID NO: 1401 - DNA, 3021 bp, Artificial Sequence
  Description of Artificial Sequence: Synthetic oligonucleotide
aattcgcccttgggcctaggcaattggatccgccggcagagaaaacatcccagggatttacagatcacatgcaggcagggaccagctcaacccttctttaatgtcatccagggagggggccagggatggaggggaggggttgaggagcgagaggcagttatttttgggtgggattcaccacttttcccatgaagaggggagacttggtattttgttcaatcattaagaagacaaagggtttgttgaacttgacctcgggggggatagacatgggtatggcctctaaaaacatggccccagcagcttcagtccctttctcgtcgatggtcagcacagccttatgcacggcctggaggggagagaagcagagacacgttgtaaggctgatcccaggcctcgagcaaggctcacgtggacacctcccaggaagcgctcactccccctggacggccctggccctgcacatcctctccctccctgtcacataggccttgctcctcctcaaggctttggctgatggggctggctcccctctgtccatcttcctgacaagcgcctctccccctgctcaggtgcacccacaactcagaacagggaagagcatcgtcactccacgtctgcctccagggctctctcctttctagtacacggcttgaagctccttgaggacacggaccctggcagtgaccttcacagtgcccagaccccaagataatgcagccattcatggaactgcaggttgttcattggtcgcctttagttttccaaaataagtgtcactttagctgaaatcattcattaattcagacaccaaatctcacagatcgaaggagtcagaaattcctttgaaacaacttagcccaaacctttctgtgtcagtatggataaatcaaggcccaatgtctagaaggtcttgggcaaagttgaaattcagggtcagtgacacaacctcaagggaggccccgaaagtgccagctgcacagcagcccctgcctggctttgctgtttgcccaccgtcccgtgtcagtgaatcacgggcatcttcaggagctcagcctgggtcttcatttgtttccctcggccccttcctcagcctcaggacagtgctgcagcccccacacattcttccctacagataccatggtgcaacaaggtcgtcagggtgatctcaccttggagagcttcaggggtgcctcctctgtgaccccggagaggtcagccccattgctgaagaccttagtgatgcccagttgacccaggacgctcttcagatcataggttccagtaatggacagtttgggtaaatgtaagctggcagacctgtcgtgcagaaaagaaattcaaggcatggcacagcattcctcttgttcttctgggacccaccacagtgcaagtgttttcttttctgattatttctgccacttactcctgtgtcctccacccacactaagatgggaactcggctttggtttgttctacttttagctcttctacattgagtcaaagaatgttaacatcgaatgaatcacaaaagcttgaaatgccacctcctctgatattctaggtgtcctggaagcctgtctcatcttgccctgtagtgttgggtcacctggcccccagcctgtaacatccccagggccctacacccagagaaacacggggctggtggcagtgcccagtgacaaccgtttagtggataagagaagagtgaccacaccaggctgagtgctcctctctggttttccatggggagacaatgccaccctgagcagggtctggtgtgagcggcagctggctctgggctctctgatccgttaccctctcagcctctttgttctttctcaacccctggagcagagacctcaggaggtgctggcatggaacagagaaattccagcctcgattcctattatgaacccgacaccttttgtattttcatcttggttttacagtgtacaaaacgaactagatcagcagggcatgggcataatcacgaatgcacacacatacactaatgtgtggctcatgtttaagtatcacttactacaggacacccaatctaacagcaccgataaagtgacagagaaacgcaagccttctgcgaacatggcctggctgttccaattccgaaccttgcttttctgggccttgccacacaggctcttcccccgtccccccagggacattctacccttgaactccacactccactgctgcctttgccaggaagcccatctgttcctttttggttctgccagaacgtgtggtggtgctgctgtccctgccttgggcactggatattgggaagggacagtgtccacactggagtgggaagttcccagggacgagacctttacctcctcaccctgggtactgttctcctcatggagcatggacggcgctgcctgaactcagtggtggcctcattctggaagccaagtttatacagagtagcagtgacccagggatgtggggttcaccctcctcagccctctggccagtcctgatgggcctcagtcccaacatggctaagaggtgtgggcagcttcttggtcaccctcaggttggggaatcaccttctgtcttcattttccaggaacttggtgatgatatcgtgggtgagttcatttaccaggtgctgtagtttcccctcatcaggcaggaagaagatggcggtggcattgcccaggtatttcatcagcagcacccagctggacagcttcttacagtgctggatgttaaacatgcctaaacgcttcatcataggcaccttcacggtggtcacctggtccacgtggaagtcctcttcctcggtgtccttgacttcaaagggtctctcccatttgcctggagagaggggaaggtgggcatcaccaggggtgagtgaaggtttggaagagtgtagcagaataagaaaccatgagtcccctccctgagaagccctgagcccccttgacgacacacatccctcgaggctcagcttcatcatctgtaaaaggtgctgaaactgaccatttaaat

SEQ ID NO: 1402 - DNA, 1209 bp, Artificial Sequence
  Description of Artificial Sequence: Synthetic oligonucleotide
tctgtgaccccggagaggtcagccccattgctgaagaccttagtgatgcccagttgacccaggacgctcttcagatcataggttccagtaatggacagtttgggtaaatgtaagctggcagacctgtcgtgcagaaaagaaattcaaggcatggcacagcattcctcttgttcttctgggacccaccacagtgcaagtgttttcttttctgattatttctgccacttactcctgtgtcctccacccacactaagatgggaactcggctttggtttgttctacttttagctcttctacattgagtcaaagaatgttaacatcgaatgaatcacaaaagcttgaaatgccacctcctctgatattctaggtgtcctggaagcctgtctcatcttgccctgtagtgttgggtcacctggcccccagcctgtaacatccccagggccctacacccagagaaacacggggctggtggcagtgcccagtgacaaccgtttagtggataagagaagagtgaccacaccaggctgagtgctcctctctggttttccatggggagacaatgccaccctgagcagggtctggtgtgagcgggcagcttggctctgggctctctgatccgttaccctctcagcctctttgttctttctcaacccctggagcagagacctcaggaggtgctggcatggaacagagaaattccagcctcgattcctattatgaacccgacaccttttgtattttcatcttggttttacagtgtacaaaacgaactagatcagcagggcatgggcataatcacgaatgcacacacatacactaatgtgtggctcatgtttaagtatcacttactacaggacacccaatctaacagcaccgataaagtgacagagaaacgcaagccttctgcgaacatggcctggctgttccaattccgaaccttgcttttctgggccttgccacacaggctcttcccccgtccccccagggacattctacccttgaactccacactccactgctgcctttgccaggaagcccatctgttcctttttggttctgccagaacgtgtggtggtgctgctgtccctgccctgggcactggatattgggaagggacagtgtccacactggagtgggaagtccccagggacgagacctttacctcctcacccctgggtactgttctcctcatggagcatggatttaaat

SEQ ID NO: 1403 - DNA, 56 bp, Artificial Sequence
  Description of Artificial Sequence: Synthetic oligonucleotide
ccagggatttacagatcacatgcaggcagggaccagctcaactcttctatttaaat

SEQ ID NO: 1404 - DNA, 1519 bp, Artificial Sequence
  Description of Artificial Sequence: Synthetic oligonucleotide
aatgttaacatcgaatgaatcacaaaagcttgaaatgccacctcctctgatattctaggtgtcctggaagcctgtctcatcttgccctgtagtgttgggtcacctggcccccagcctgtaacatccccagggccctacacccagagaaacacggggctggtggcagtgcccagtgacaaccgtttagtggataagagaagagtgaccacaccaggctgagtgctcctctctggttttccatggggagacaatgccaccctgagcagggtctggtgtgagcgggcagcttggctctgggctctctgatccgttaccctctcagcctctttgttctttctcaacccctggagcagagacctcaggaggtgctggcatggaacagagaaattccagcctcgattcctattatgaacccgacaccttttgtattttcatcttggttttacagtgtacaaaacgaactagatcagcagggcatgggcataatcacgaatgcacacacatacactaatgtgtggctcatgtttaagtatcacttactacaggacacccaatctaacagcaccgataaagtgacagagaaacgcaagccttctgcgaacatggcctggctgttccaattccgaaccttgcttttctgggccttgccacacaggctcttcccccgtccccccagggacattctacccttgaactccacactccactgctgcctttgccaggaagcccatctgttcctttttggttctgccagaacgtgtggtggtgctgctgtccctgccctgggcactggatattgggaagggacagtgtccacactggagtgggaagtccccagggacgagacctttacctcctcacccctgggtactgtcctcctcatggagcatggatggcgctgcctgaactcagtggtggcctcattctggaagccaagtttatacagagtagcagtgacccagggatgtggggttcaccctcctcagccctctggccagtcctgatgggcctcagtcccaacatggctaagaggtgtgggcagcttcttggtcaccctcaggttggggaatcaccttctgtcttcattttccaggaacttggtgatgatatcgtgggtgagttcattttccaggtgctgtagtttcccctcatcaggcaggaagaagatggcggtggcattgcccaggtatttcatcagcagcacccagctggacagcttcttacagtgctggatgttaaacatgcctaaacgcttcatcataggcaccttcacggtggtcacctggtccacgtggaagtcctcttcctcggtgtccttgacttcaaagggtctctcccatttgcctggagagaggggaaggtgggcatcaccaggggtgagtgaaggtttggaagagtgtagcagaataaagaaaccatgagtcccctccctgagaagccctgagcccccttgacgacacacatccctcgaggctcagcttcatcatctgtaaaaggtgctgaaactgaccatttaaat

SEQ ID NO: 1405 - DNA, 357 bp, Artificial Sequence
  Description of Artificial Sequence: Synthetic oligonucleotide
gagagaagcagagacacgttgtaaggctgatcccaggcctcgagcaaggctcacgtggacacctcccaggaagcgctcactccccctggacggccctggccctgcacatcctctccctccctgtcacataggccttgctcctcctcaaggctttggctgatggggctggctcccctctgtccatcttcctgacaagcgcctctccccctgctcaggtgcacccacaactcagaacagggaagagcatcgtcactccacgtctgcctccagggctctctcctttctagtacacggcttgaagctccttgaggacacggaccctggcagtgaccttcacagtgcccagaccatttaaat

SEQ ID NO: 1406 - DNA, 2403 bp, Artificial Sequence
  Description of Artificial Sequence: Synthetic oligonucleotide
aattcgcccttgggcctaggcaattggatccgccggcagagaaaacatcccagggatttacagatcacatgcaggcagggaccagctcaacccttctttaatgtcatccagggagggggccagggatggaggggaggggttgaggagcgagaggcagttatttttgggtgggattcaccacttttcccatgaagaggggagacttggtattttgttcaatcattaagaagacaaagggtttgttgaacttgacctcgggggggatagacatgggtatggcctctaaaaacatggccccagcagcttcagtccctttctcgtcgatggtcagcacagccttatgcacggcctggaggggagagaagcagagacacgttgtaaggctgatcccaggcctcgagcaaggctcacgtggacacctcccaggaagcgctcactccccctggacggccctggccctgcacatcctctccctccctgtcacataggccttgctcctcctcaaggctttggctgatggggctggctcccctctgtccatcttcctgacaagcgcctctccccctgctcaggtgcacccacaactcagaacagggaagagcatcgtcactccacgtctgcctccagggctctctcctttctagtacacggcttgaagctccttgaggacacggaccctggcagtgaccttcacagtgcccagaccccaagataatgcagccattcatggaactgcaggttgttcattggtcgcctttagttttccaaaataagtgtcactttagctgaaatcattcattaattcagacaccaaatctcacagatcgaaggagtcagaaattcctttgaaacaacttagcccaaacctttctgtgtcagtatggataaatcaaggcccaatgtctagaaggtcttgggcaaagttgaaattcagggtcagtgacacaacctcaagggaggccccgaaagtgccagctgcacagcagcccctgcctggctttgctgtttgcccaccgtcccgtgtcagtgaatcacgggcatcttcaggagctcagcctgggtcttcatttgtttccctcggccccttcctcagcctcaggacagtgctgcagcccccacacattcttccctacagataccatggtgcaacaaggtcgtcagggtgatctcaccttggagagcttcaggggtgcctcctctgtgaccccggagaggtcagccccattgctgaagaccttagtgatgcccagttgacccaggacgctcttcagatcataggttccagtaatggacagtttgggtaaatgtaagctggcagacctgtcgtgcagaaaagaaattcaaggcatggcacagcattcctcttgttcttctgggacccaccacagtgcaagtgttttcttttctgattatttctgccacttactcctgtgtcctccacccacactaagatgggaactcggctttggtttgttctacttttagctcttctacattgagtcaaagaatgttaacatcgaatgaatcacaaaagcttgaaatgccacctcctctgatattctaggtgtcctggaagcctgtctcatcttgccctgtagtgttgggtcacctggcccccagcctgtaacatccccagggccctacacccagagaaacacggggctggtggcagtgcccagtgacaaccgtttagtggataagagaagagtgaccacaccaggctgagtgctcctctctggttttccatggggagacaatgccaccctgagcagggtctggtgtgagcggcagctggctctgggctctctgatccgttaccctctcagcctctttgttctttctcaacccctggagcagagacctcaggaggtgctggcatggaacagagaaattccagcctcgattcctattatgaacccgacaccttttgtattttcatcttggttttacagtgtacaaaacgaactagatcagcagggcatgggcataatcacgaatgcacacacatacactaatgtgtggctcatgtttaagtatcacttactacaggacacccaatctaacagcaccgataaagtgacagagaaacgcaagccttctgcgaacatggcctggctgttccaattccgaaccttgcttttctgggccttgccacacaggctcttcccccgtccccccagggacattctacccttgaactccacactccactgctgcctttgccaggaagcccatctgttcctttttggttctgccagaacgtgtggtggtgctgctgtccctgccttgggcactggatattgggaagggacagtgtccacactggagtgggaagttcccagggacgagacctttacctcctcaccctgggtactgttctcctcatggagcatggatttaaat

SEQ ID NO: 1407 - DNA, 105 bp, Artificial Sequence
  Description of Artificial Sequence: Synthetic oligonucleotide
aattcgcccttgggcctaggcaattggatccgccggcagagaaaacatcccagggatttacagatcacatgcaggcagggaccagctcaacccttctatttaaat

SEQ ID NO: 1408 - DNA, 382 bp, Artificial Sequence
  Description of Artificial Sequence: Synthetic oligonucleotide
cgcgtcgacattgattattgactagttattaatagtaatcaattacggggtcattagttcatagcccatatatggagttccgcgttacataacttacggtaaatggcccgcctggctgaccgcccaacgacccccgcccattgacgtcaataatgacgtatgttcccatagtaacgccaatagggactttccattgacgtcaatgggtggagtatttacggtaaactgcccacttggcagtacatcaagtgtatcatatgccaagtacgccccctattgacgtcaatgacggtaaatggcccgcctggcattatgcccagtacatgaccttatgggactttcctacttggcagtacatctacgtattagtcatcgctattac

SEQ ID NO: 1409 - DNA, 303 bp, Artificial Sequence
  Description of Artificial Sequence: Synthetic oligonucleotide
cgttacataacttacggtaaatggcccgcctggctgaccgcccaacgacccccgcccattgacgtcaataatgacgtatgttcccatagtaacgccaatagggactttccattgacgtcaatgggtggagtatttacggtaaactgcccacttggcagtacatcaagtgtatcatatgccaagtacgccccctattgacgtcaatgacggtaaatggcccgcctggcattatgcccagtacatgaccttatgggactttcctacttggcagtacatctagtattagtcatcgctattaccatg

SEQ ID NO: 1410 - DNA, 260 bp, Artificial Sequence
  Description of Artificial Sequence: Synthetic oligonucleotide
ccacgttctgcttcactctccccatctcccccccctccccacccccaattttgtatttatttattttttaattattttgtgcagcgatgggggcggggggggggggcgcgcgccaggcggggcggggcggggcgaggggcggggcggggcgaggcggagaggtgcggcggcagccaatcagagcggcgcgctccgaaagtttccttttatggcgaggcggcggcggcggcggccctataaaaagcgaagcgcgcggcggg

SEQ ID NO: 1411 - DNA, 588 bp, Artificial Sequence
  Description of Artificial Sequence: Synthetic oligonucleotide
gttgacattgattattgactagttattaatagtaatcaattacggggtcattagttcatagcccatatatggagttccgcgttacataacttacggtaaatggcccgcctggctgaccgcccaacgacccccgcccattgacgtcaataatgacgtatgttcccatagtaacgccaatagggactttccattgacgtcaatgggtggagtatttacggtaaactgcccacttggcagtacatcaagtgtatcatatgccaagtacgccccctattgacgtcaatgacggtaaatggcccgcctggcattatgcccagtacatgaccttatgggactttcctacttggcagtacatctacgtattagtcatcgctattaccatggtgatgcggttttggcagtacatcaatgggcgtggatagcggtttgactcacggggatttccaagtctccaccccattgacgtcaatgggagtttgttttggcaccaaaatcaacgggactttccaaaatgtcgtaacaactccgccccattgacgcaaatgggcggtaggcgtgtacggtgggaggtctatataagcagagctc

SEQ ID NO: 1412 - DNA, 204 bp, Artificial Sequence
  Description of Artificial Sequence: Synthetic oligonucleotide
gtgatgcggttttggcagtacatcaatgggcgtggatagcggtttgactcacggggatttccaagtctccaccccattgacgtcaatgggagtttgttttggcaccaaaatcaacgggactttccaaaatgtcgtaacaactccgccccattgacgcaaatgggcggtaggcgtgtacggtgggaggtctatataagcagagct

SEQ ID NO: 1413 - DNA, 219 bp, Artificial Sequence
  Description of Artificial Sequence: Synthetic oligonucleotide
aattcgaacgctgacgtcatcaacccgctccaaggaatcgcgggcccagtgtcactaggcgggaacacccagcgcgcgtgcgccctggcaggaagatggctgtgagggacagggagtggcgccctgcaatatttgcatgtcgctatgtgttctgggaaatcaccataaacgtgaaatgtctttggatttgggaatcttataagttctgtatgagaccac

SEQ ID NO: 1414 - DNA, 17 bp, Artificial Sequence
  Description of Artificial Sequence: Synthetic oligonucleotide
taatacgactcactata

SEQ ID NO: 1415 - DNA, 134 bp, Artificial Sequence
  Description of Artificial Sequence: Synthetic oligonucleotide
tcagatcgcctggagacgccatccacgctgttttgacctccatagaagacaccgggaccgatccagcctccgcggattcgaatcccggccgggaacggtgcattggaacgcggattccccgtgccaagagtgac

SEQ ID NO: 1416 - DNA, 53 bp, Artificial Sequence
  Description of Artificial Sequence: Synthetic oligonucleotide
ctcctgggcaacgtgctggtctgtgtgctggcccatcactttggcaaagaatt

SEQ ID NO: 1417 - DNA, 172 bp, Artificial Sequence
  Description of Artificial Sequence: Synthetic oligonucleotide
gaactgaaaaaccagaaagttaactggtaagtttagtctttttgtcttttatttcaggtcccggatccggtggtggtgcaaatcaaagaactgctcctcagtggatgttgcctttacttctaggcctgtacggaagtgttacttctgctctaaaagctgcggaattgtaccc

SEQ ID NO: 1418 - DNA, 32 bp, Artificial Sequence
  Description of Artificial Sequence: Synthetic oligonucleotide
gtaagtaccgcctatagagtctataggcccac

SEQ ID NO: 1419 - DNA, 347 bp, Artificial Sequence
  Description of Artificial Sequence: Synthetic oligonucleotide
aaaaaatgctttcttcttttaatatacttttttgtttatcttatttctaatactttccctaatctctttctttcagggcaataatgatacaatgtatcatgcctctttgcaccattctaaagaataacagtgataatttctgggttaaggcaatagcaatatttctgcatataaatatttctgcatataaattgtaactgatgtaagaggtttcatattgctaatagcagctacaatccagctaccattctgcttttattttatggttgggataaggctggattattctgagtccaagctaggcccttttgctaatcatgttcatacctcttatcttcctcccacag

SEQ ID NO: 1420 - DNA, 127 bp, Artificial Sequence
  Description of Artificial Sequence: Synthetic oligonucleotide
gatctttttccctctgccaaaaattatggggacatcatgaagccccttgagcatctgacttctggctaataaaggaaatttattttcattgcaatagtgtgttggaattttttgtgtctctcactcg

SEQ ID NO: 1421 - DNA, 225 bp, Artificial Sequence
  Description of Artificial Sequence: Synthetic oligonucleotide
ctgtgccttctagttgccagccatctgttgtttgcccctcccccgtgccttccttgaccctggaaggtgccactcccactgtcctttcctaataaaatgaggaaattgcatcgcattgtctgagtaggtgtcattctattctggggggtggggtggggcaggacagcaagggggaggattgggaagacaatagcaggcatgctggggatgcggtgggctctatgg

SEQ ID NO: 1422 - DNA, 477 bp, Artificial Sequence
  Description of Artificial Sequence: Synthetic oligonucleotide
gggtggcatccctgtgacccctccccagtgcctctcctggccctggaagttgccactccagtgcccaccagccttgtcctaataaaattaagttgcatcattttgtctgactaggtgtccttctataatattatggggtggaggggggtggtatggagcaaggggcaagttgggaagacaacctgtagggcctgcggggtctattgggaaccaagctggagtgcagtggcacaatcttggctcactgcaatctccgcctcctgggttcaagcgattctcctgcctcagcctcccgagttgttgggattccaggcatgcatgaccaggctcagctaatttttgtttttttggtagagacggggtttcaccatattggccaggctggtctccaactcctaatctcaggtgatctacccaccttggcctcccaaattgctgggattacaggcgtgaaccactgctcccttccctgtcctt

SEQ ID NO: 1423 - DNA, 476 bp, Artificial Sequence
  Description of Artificial Sequence: Synthetic oligonucleotide
gggtggcatccctgtgacccctccccagtgcctctcctggccctggaagttgccactccagtgcccaccagccttgtcctaataaaattaagttgcatcattttgtctgactaggtgtccttctataatattatggggtggaggggggtggtatggagcaaggggcaagttgggaagacaacctgtagggcctgcggggtctattgggaaccaagctggagtgcagtggcacaatcttggctcactgcaatctccgcctcctgggttcaagcgattctcctgcctcagcctcccgagttgttgggattccaggcatgcatgaccaggctcagctaatttttgtttttttggtagagacggggtttcaccatattggccaggctggtctccaactcctaatctcaggtgatctacccaccttggcctcccaaattgctgggattacaggcgtgaaccactgctcccttccctgtcct

SEQ ID NO: 1424 - protein, 3137 aa, Homo sapiens
MATLEKLMKAFESLKSFQQQQQQQQQQQQQQQQQQQQQQQPPPPPPPPPPPQLPQPPPQAQPLLPQPQPPPPPPPPPPGPAVAEEPLHRPKKELSATKKDRVNHCLTICENIVAQSVRNSPEFQKLLGIAMELFLLCSDDAESDVRMVADECLNKVIKALMDSNLPRLQLELYKEIKKNGAPRSLRAALWRFAELAHLVRPQKCRPYLVNLLPCLTRTSKRPEESVQETLAAAVPKIMASFGNFANDNEIKVLLKAFIANLKSSSPTIRRTAAGSAVSICQHSRRTQYFYSWLLNVLLGLLVPVEDEHSTLLILGVLLTLRYLVPLLQQQVKTSLKGSFGVTRKEMEVSPSAEQLVQVYELTLHHTQHQDHNVVTGALELLQQLFRTPPPELLQTLTAVGGIGQLTAAKEESGGRSRSGSIVELIAGGGSSCSPVLSRKQKGKVLLGEEEALEDDSESRSDVSSSALTASVKDEISGELAASSGVSTPGSAGHDIITEQPRSQHTLQADSVDLASCDLTSSATDGDEEDILSHSSSQVSAVPSDPAMDLNDGTQASSPISDSSQTTTEGPDSAVTPSDSSEIVLDGTDNQYLGLQIGQPQDEDEEATGILPDEASEAFRNSSMALQQAHLLKNMSHCRQPSDSSVDKFVLRDEATEPGDQENKPCRIKGDIGQSTDDDSAPLVHCVRLLSASFLLTGGKNVLVPDRDVRVSVKALALSCVGAAVALHPESFFSKLYKVPLTTEYPEEQYVSDILNYIDHGDPQVRGATAILCGTLICSILSRSRFHVGDWMGTIRTLTGNTFSLADCIPLLRKTLKDESSVTCKLACTAVRNCVMSLCSSSYSELGLQLIIDVLTLRNSSYWLVRTELLETLAEIDFRLVSFLEAKAENLHRGAHHYTGLLKLQERVLNNVVIHLLGDEDPRVRHVAAASLIRLVPKLFYKCDQGQADPVVAVARDQSSVYLKLLMHETQPPSHFSVSTITRIYRGYNLLPSITDVTMENNLSRVIAAVSHELITSTTRALTFGCCEALCLLSTAFPVCIWSLGWHCGVPPLSASDESRKSCTVGMATMILTLLSSAWFPLDLSAHQDALILAGNLLAASAPKSLRSSWASEEEANPAATKQEEVWPALGDRALVPMVEQLFSHLLKVINICAHVLDDVAPGPAIKAALPSLTNPPSLSPIRRKGKEKEPGEQASVPLSPKKGSEASAASRQSTSGPVTTSKSSSLGSFYHLPSYLKLHDVLKATHANYKVTLDLQNSTEKFGGFLRSALDVLSQILELATLQDIGKCVEEILGYLKSCFSREPMMATVCVQQLLKTLFGTNLASQFDGLSSNPSKSQGRAQRLGSSSVRPGLYHYCFMAPYTHFTQALADASLRNMVQAEQENTSGWFDVLQKVSTQLKTNLTSVTKNRADKNAIHNHIRLFEPLVIKALKQYTTTTCVQLQKQVLDLLAQLVQLRVNYCLLDSDQVFIGFVLKQFEYIEVGQFRESEAIIPNIFFFLVLLSYERYHSKQIIGIPKIIQLCDGIMASGRKAVTHAIPALQPIVHDLFVLRGTNKADAGKELETQKEVVVSMLLRLIQYHQVLEMFILVLQQCHKENEDKWKRLSRQIADIILPMLAKQQMHIDSHEALGVLNTLFEILAPSSLRPVDMLLRSMFVTPNTMASVSTVQLWISGILAILRVLISQSTEDIVLSRIQELSFSPYLISCTVINRLRDGDSTSTLEEHSEGKQIKNLPEETFSRFLLQLVGILLEDIVTKQLKVEMSEQQHTFYCQELGTLLMCLIHIFKSGMFRRITAAATRLFRSDGCGGSFYTLDSLNLRARSMITTHPALVLLWCQILLLVNHTDYRWWAEVQQTPKRHSLSSTKLLSPQMSGEEEDSDLAAKLGMCNREIVRRGALILFCDYVCQNLHDSEHLTWLIVNHIQDLISLSHEPPVQDFISAVHRNSAASGLFIQAIQSRCENLSTPTMLKKTLQCLEGIHLSQSGAVLTLYVDRLLCTPFRVLARMVDILACRRVEMLLAANLQSSMAQLPMEELNRIQEYLQSSGLAQRHQRLYSLLDRFRLSTMQDSLSPSPPVSSHPLDGDGHVSLETVSPDKDWYVHLVKSQCWTRSDSALLEGAELVNRIPAEDMNAFMMNSEFNLSLLAPCLSLGMSEISGGQKSALFEAAREVTLARVSGTVQQLPAVHHVFQPELPAEPAAYWSKLNDLFGDAALYQSLPTLARALAQYLVVVSKLPSHLHLPPEKEKDIVKFVVATLEALSWHLIHEQIPLSLDLQAGLDCCCLALQLPGLWSVVSSTEFVTHACSLIYCVHFILEAVAVQPGEQLLSPERRTNTPKAISEEEEEVDPNTQNPKYITAACEMVAEMVESLQSVLALGHKRNSGVPAFLTPLLRNIIISLARLPLVNSYTRVPPLVWKLGWSPKPGGDFGTAFPEIPVEFLQEKEVFKEFIYRINTLGWTSRTQFEETWATLLGVLVTQPLVMEQEESPPEETERTQINVLAVQAITSLVLSAMTVPVAGNPAVSCLEQQPRNKPLKALTRFGRKLSIIRGIVEQEIQAMVSKRENIATHHLYQAWDPVPSLSPATTGALISHEKLLLQINPERELGSMSYKLGQVSIHSVWLGNSITPLREEEWDEEEEEEADAPAPSSPPTSPVNSRKHRAGVDIHSCSQFLLELYSRWILPSSSARRTPAILISEVVRSLLVVSDLFTERNQFELMYVTLTELRRVHPSEDEILAQYLVPATCKAAAVLGMDKAVAEPVSRLLESTLRSSHLPSRVGALHGVLYVLECDLLDTAKQLIPVISDYLLSNLKGIAHCVNIHSQQHVLVMCATAFYLIENYPLDVGPEFSASIIQMCGVMLSGSEESTPSIIYHCALRGLERLLLSEQLSRLDAESLVKLSVDRVNVHSPHRAMAALGLMLTCMYTGKEKVSPGRTSDPNPAAPDSESVIVAMERVSVLFDRIRKGFPCEARVVARILPQFLDDFFPPQDIMNKVIGEFLSNQQPYPQFMATVVYKVFQTLHSTGQSSMVRDWVMLSLSNFTQRAPVAMATWSLSCFFVSASTSPWVAAILPHVISRMGKLEQVDVNLFCLVATDFYRHQIEEELDRRAFQSVLEVVAAPGSPYHRLLTCLRNVHKVTTC

SEQ ID NO: 1425 - DNA, 13669 bp, Homo sapiens
ttgctgtgtgaggcagaacctgcgggggcaggggcgggctggttccctggccagccattggcagagtccgcaggctagggctgtcaatcatgctggccggcgtggccccgcctccgccggcgcggccccgcctccgccggcgcagcgtctgggacgcaaggcgccgtgggggctgccgggacgggtccaagatggacggccgctcaggttctgcttttacctgcggcccagagccccattcattgccccggtgctgagcggcgccgcgagtcggcccgaggcctccggggactgccgtgccgggcgggagaccgccatggcgaccctggaaaagctgatgaaggccttcgagtccctcaagtccttccagcagcagcagcagcagcagcagcagcagcagcagcagcagcagcagcagcagcagcagcagcaacagccgccaccgccgccgccgccgccgccgcctcctcagcttcctcagccgccgccgcaggcacagccgctgctgcctcagccgcagccgcccccgccgccgcccccgccgccacccggcccggctgtggctgaggagccgctgcaccgaccaaagaaagaactttcagctaccaagaaagaccgtgtgaatcattgtctgacaatatgtgaaaacatagtggcacagtctgtcagaaattctccagaatttcagaaacttctgggcatcgctatggaactttttctgctgtgcagtgatgacgcagagtcagatgtcaggatggtggctgacgaatgcctcaacaaagttatcaaagctttgatggattctaatcttccaaggttacagctcgagctctataaggaaattaaaaagaatggtgcccctcggagtttgcgtgctgccctgtggaggtttgctgagctggctcacctggttcggcctcagaaatgcaggccttacctggtgaaccttctgccgtgcctgactcgaacaagcaagagacccgaagaatcagtccaggagaccttggctgcagctgttcccaaaattatggcttcttttggcaattttgcaaatgacaatgaaattaaggttttgttaaaggccttcatagcgaacctgaagtcaagctcccccaccattcggcggacagcggctggatcagcagtgagcatctgccagcactcaagaaggacacaatatttctatagttggctactaaatgtgctcttaggcttactcgttcctgtcgaggatgaacactccactctgctgattcttggcgtgctgctcaccctgaggtatttggtgcccttgctgcagcagcaggtcaaggacacaagcctgaaaggcagcttcggagtgacaaggaaagaaatggaagtctctccttctgcagagcagcttgtccaggtttatgaactgacgttacatcatacacagcaccaagaccacaatgttgtgaccggagccctggagctgttgcagcagctcttcagaacgcctccacccgagcttctgcaaaccctgaccgcagtcgggggcattgggcagctcaccgctgctaaggaggagtctggtggccgaagccgtagtgggagtattgtggaacttatagctggagggggttcctcatgcagccctgtcctttcaagaaaacaaaaaggcaaagtgctcttaggagaagaagaagccttggaggatgactctgaatcgagatcggatgtcagcagctctgccttaacagcctcagtgaaggatgagatcagtggagagctggctgcttcttcaggggtttccactccagggtcagcaggtcatgacatcatcacagaacagccacggtcacagcacacactgcaggcggactcagtggatctggccagctgtgacttgacaagctctgccactgatggggatgaggaggatatcttgagccacagctccagccaggtcagcgccgtcccatctgaccctgccatggacctgaatgatgggacccaggcctcgtcgcccatcagcgacagctcccagaccaccaccgaagggcctgattcagctgttaccccttcagacagttctgaaattgtgttagacggtaccgacaaccagtatttgggcctgcagattggacagccccaggatgaagatgaggaagccacaggtattcttcctgatgaagcctcggaggccttcaggaactcttccatggcccttcaacaggcacatttattgaaaaacatgagtcactgcaggcagccttctgacagcagtgttgataaatttgtgttgagagatgaagctactgaaccgggtgatcaagaaaacaagccttgccgcatcaaaggtgacattggacagtccactgatgatgactctgcacctcttgtccattgtgtccgccttttatctgcttcgtttttgctaacagggggaaaaaatgtgctggttccggacagggatgtgagggtcagcgtgaaggccctggccctcagctgtgtgggagcagctgtggccctccacccggaatctttcttcagcaaactctataaagttcctcttgacaccacggaataccctgaggaacagtatgtctcagacatcttgaactacatcgatcatggagacccacaggttcgaggagccactgccattctctgtgggaccctcatctgctccatcctcagcaggtcccgcttccacgtgggagattggatgggcaccattagaaccctcacaggaaatacattttctttggcggattgcattcctttgctgcggaaaacactgaaggatgagtcttctgttacttgcaagttagcttgtacagctgtgaggaactgtgtcatgagtctctgcagcagcagctacagtgagttaggactgcagctgatcatcgatgtgctgactctgaggaacagttcctattggctggtgaggacagagcttctggaaacccttgcagagattgacttcaggctggtgagctttttggaggcaaaagcagaaaacttacacagaggggctcatcattatacagggcttttaaaactgcaagaacgagtgctcaataatgttgtcatccatttgcttggagatgaagaccccagggtgcgacatgttgccgcagcatcactaattaggcttgtcccaaagctgttttataaatgtgaccaaggacaagctgatccagtagtggccgtggcaagagatcaaagcagtgtttacctgaaacttctcatgcatgagacgcagcctccatctcatttctccgtcagcacaataaccagaatatatagaggctataacctactaccaagcataacagacgtcactatggaaaataacctttcaagagttattgcagcagtttctcatgaactaatcacatcaaccaccagagcactcacatttggatgctgtgaagctttgtgtcttctttccactgccttcccagtttgcatttggagtttaggttggcactgtggagtgcctccactgagtgcctcagatgagtctaggaagagctgtaccgttgggatggccacaatgattctgaccctgctctcgtcagcttggttcccattggatctctcagcccatcaagatgctttgattttggccggaaacttgcttgcagccagtgctcccaaatctctgagaagttcatgggcctctgaagaagaagccaacccagcagccaccaagcaagaggaggtctggccagccctgggggaccgggccctggtgcccatggtggagcagctcttctctcacctgctgaaggtgattaacatttgtgcccacgtcctggatgacgtggctcctggacccgcaataaaggcagccttgccttctctaacaaaccccccttctctaagtcccatccgacgaaaggggaaggagaaagaaccaggagaacaagcatctgtaccgttgagtcccaagaaaggcagtgaggccagtgcagcttctagacaatctgatacctcaggtcctgttacaacaagtaaatcctcatcactggggagtttctatcatcttccttcatacctcaaactgcatgatgtcctgaaagctacacacgctaactacaaggtcacgctggatcttcagaacagcacggaaaagtttggagggtttctccgctcagccttggatgttctttctcagatactagagctggccacactgcaggacattgggaagtgtgttgaagagatcctaggatacctgaaatcctgctttagtcgagaaccaatgatggcaactgtttgtgttcaacaattgttgaagactctctttggcacaaacttggcctcccagtttgatggcttatcttccaaccccagcaagtcacaaggccgagcacagcgccttggctcctccagtgtgaggccaggcttgtaccactactgcttcatggccccgtacacccacttcacccaggccctcgctgacgccagcctgaggaacatggtgcaggcggagcaggagaacgacacctcgggatggtttgatgtcctccagaaagtgtctacccagttgaagacaaacctcacgagtgtcacaaagaaccgtgcagataagaatgctattcataatcacattcgtttgtttgaacctcttgttataaaagctttaaaacagtacacgactacaacatgtgtgcagttacagaagcaggttttagatttgctggcgcagctggttcagttacgggttaattactgtcttctggattcagatcaggtgtttattggctttgtattgaaacagtttgaatacattgaagtgggccagttcagggaatcagaggcaatcattccaaacatctttttcttcttggtattactatcttatgaacgctatcattcaaaacagatcattggaattcctaaaatcattcagctctgtgatggcatcatggccagtggaaggaaggctgtgacacatgccataccggctctgcagcccatagtccacgacctctttgtattaagaggaacaaataaagctgatgcaggaaaagagcttgaaacccaaaaagaggtggtggtgtcaatgttactgagactcatccagtaccatcaggtgttggagatgttcattcttgtcctgcagcagtgccacaaggagaatgaagacaagtggaagcgactgtctcgacagatagctgacatcatcctcccaatgttagccaaacagcagatgcacattgactctcatgaagcccttggagtgttaaatacattatttgagattttggccccttcctccctccgtccggtagacatgcttttacggagtatgttcgtcactccaaacacaatggcgtccgtgagcactgttcaactgtggatatcgggaattctggccattttgagggttctgatttcccagtcaactgaagatattgttctttctcgtattcaggagctctccttctctccgtatttaatctcctgtacagtaattaataggttaagagatggggacagtacttcaacgctagaagaacacagtgaagggaaacaaataaagaatttgccagaagaaacattttcaaggtttctattacaactggttggtattcttttagaagacattgttacaaaacagctgaaggtggaaatgagtgagcagcaacatactttctattgccaggaactaggcacactgctaatgtgtctgatccacatcttcaagtctggaatgttccggagaatcacagcagctgccactaggctgttccgcagtgatggctgtggcggcagtttctacaccctggacagcttgaacttgcgggctcgttccatgatcaccacccacccggccctggtgctgctctggtgtcagatactgctgcttgtcaaccacaccgactaccgctggtgggcagaagtgcagcagaccccgaaaagacacagtctgtccagcacaaagttacttagtccccagatgtctggagaagaggaggattctgacttggcagccaaacttggaatgtgcaatagagaaatagtacgaagaggggctctcattctcttctgtgattatgtctgtcagaacctccatgactccgagcacttaacgtggctcattgtaaatcacattcaagatctgatcagcctttcccacgagcctccagtacaggacttcatcagtgccgttcatcggaactctgctgccagcggcctgttcatccaggcaattcagtctcgttgtgaaaacctttcaactccaaccatgctgaagaaaactcttcagtgcttggaggggatccatctcagccagtcgggagctgtgctcacgctgtatgtggacaggcttctgtgcacccctttccgtgtgctggctcgcatggtcgacatccttgcttgtcgccgggtagaaatgcttctggctgcaaatttacagagcagcatggcccagttgccaatggaagaactcaacagaatccaggaataccttcagagcagcgggctcgctcagagacaccaaaggctctattccctgctggacaggtttcgtctctccaccatgcaagactcacttagtccctctcctccagtctcttcccacccgctggacggggatgggcacgtgtcactggaaacagtgagtccggacaaagactggtacgttcatcttgtcaaatcccagtgttggaccaggtcagattctgcactgctggaaggtgcagagctggtgaatcggattcctgctgaagatatgaatgccttcatgatgaactcggagttcaacctaagcctgctagctccatgcttaagcctagggatgagtgaaatttctggtggccagaagagtgccctttttgaagcagcccgtgaggtgactctggcccgtgtgagcggcaccgtgcagcagctccctgctgtccatcatgtcttccagcccgagctgcctgcagagccggcggcctactggagcaagttgaatgatctgtttggggatgctgcactgtatcagtccctgcccactctggcccgggccctggcacagtacctggtggtggtctccaaactgcccagtcatttgcaccttcctcctgagaaagagaaggacattgtgaaattcgtggtggcaacccttgaggccctgtcctggcatttgatccatgagcagatcccgctgagtctggatctccaggcagggctggactgctgctgcctggccctgcagctgcctggcctctggagcgtggtctcctccacagagtttgtgacccacgcctgctccctcatctactgtgtgcacttcatcctggaggccgttgcagtgcagcctggagagcagcttcttagtccagaaagaaggacaaataccccaaaagccatcagcgaggaggaggaggaagtagatccaaacacacagaatcctaagtatatcactgcagcctgtgagatggtggcagaaatggtggagtctctgcagtcggtgttggccttgggtcataaaaggaatagcggcgtgccggcgtttctcacgccattgctaaggaacatcatcatcagcctggcccgcctgccccttgtcaacagctacacacgtgtgcccccactggtgtggaagcttggatggtcacccaaaccgggaggggattttggcacagcattccctgagatccccgtggagttcctccaggaaaaggaagtctttaaggagttcatctaccgcatcaacacactaggctggaccagtcgtactcagtttgaagaaacttgggccaccctccttggtgtcctggtgacgcagcccctcgtgatggagcaggaggagagcccaccagaagaagacacagagaggacccagatcaacgtcctggccgtgcaggccatcacctcactggtgctcagtgcaatgactgtgcctgtggccggcaacccagctgtaagctgcttggagcagcagccccggaacaagcctctgaaagctctcgacaccaggtttgggaggaagctgagcattatcagagggattgtggagcaagagattcaagcaatggtttcaaagagagagaatattgccacccatcatttatatcaggcatgggatcctgtcccttctctgtctccggctactacaggtgccctcatcagccacgagaagctgctgctacagatcaaccccgagcgggagctggggagcatgagctacaaactcggccaggtgtccatacactccgtgtggctggggaacagcatcacacccctgagggaggaggaatgggacgaggaagaggaggaggaggccgacgcccctgcaccttcgtcaccacccacgtctccagtcaactccaggaaacaccgggctggagttgacatccactcctgttcgcagtttttgcttgagttgtacagccgctggatcctgccgtccagctcagccaggaggaccccggccatcctgatcagtgaggtggtcagatcccttctagtggtctcagacttgttcaccgagcgcaaccagtttgagctgatgtatgtgacgctgacagaactgcgaagggtgcacccttcagaagacgagatcctcgctcagtacctggtgcctgccacctgcaaggcagctgccgtccttgggatggacaaggccgtggcggagcctgtcagccgcctgctggagagcacgctcaggagcagccacctgcccagcagggttggagccctgcacggcgtcctctatgtgctggagtgcgacctgctggacgacactgccaagcagctcatcccggtcatcagcgactatctcctctccaacctgaaagggatcgcccactgcgtgaacattcacagccagcagcacgtactggtcatgtgtgccactgcgttttacctcattgagaactatcctctggacgtagggccggaattttcagcatcaataatacagatgtgtggggtgatgctgtctggaagtgaggagtccaccccctccatcatttaccactgtgccctcagaggcctggagcgcctcctgctctctgagcagctctcccgcctggatgcagaatcgctggtcaagctgagtgtggacagagtgaacgtgcacagcccgcaccgggccatggcggctctgggcctgatgctcacctgcatgtacacaggaaaggagaaagtcagtccgggtagaacttcagaccctaatcctgcagcccccgacagcgagtcagtgattgttgctatggagcgggtatctgttctttttgataggatcaggaaaggctttccttgtgaagccagagtggtggccaggatcctgccccagtttctagacgacttcttcccaccccaggacatcatgaacaaagtcatcggagagtttctgtccaaccagcagccatacccccagttcatggccaccgtggtgtataaggtgtttcagactctgcacagcaccgggcagtcgtccatggtccgggactgggtcatgctgtccctctccaacttcacgcagagggccccggtcgccatggccacgtggagcctctcctgcttctttgtcagcgcgtccaccagcccgtgggtcgcggcgatcctcccacatgtcatcagcaggatgggcaagctggagcaggtggacgtgaaccttttctgcctggtcgccacagacttctacagacaccagatagaggaggagctcgaccgcagggccttccagtctgtgcttgaggtggttgcagccccaggaagcccatatcaccggctgctgacttgtttacgaaatgtccacaaggtcaccacctgctgagcgccatggtgggagagactgtgaggcggcagctggggccggagcctttggaagtctgcgcccttgtgccctgcctccaccgagccagcttggtccctatgggcttccgcacatgccgcgggcggccaggcaacgtgcgtgtctctgccatgtggcagaagtgctctttgtggcagtggccaggcagggagtgtctgcagtcctggtggggctgagcctgaggccttccagaaagcaggagcagctgtgctgcaccccatgtgggtgaccaggtcctttctcctgatagtcacctgctggttgttgccaggttgcagctgctcttgcatctgggccagaagtcctccctcctgcaggctggctgttggcccctctgctgtcctgcagtagaaggtgccgtgagcaggctttgggaacactggcctgggtctccctggtggggtgtgcatgccacgccccgtgtctggatgcacagatgccatggcctgtgctgggccagtggctgggggtgctagacacccggcaccattctcccttctctcttttcttctcaggatttaaaatttaattatatcagtaaagagattaattttaacgtaactctttctatgcccgtgtaaagtatgtgaatcgcaaggcctgtgctgcatgcgacagcgtccggggtggtggacagggcccccggccacgctccctctcctgtagccactggcatagccctcctgagcacccgctgacatttccgttgtacatgttcctgtttatgcattcacaaggtgactgggatgtagagaggcgttagtgggcaggtggccacagcaggactgaggacaggcccccattatcctaggggtgcgctcacctgcagcccctcctcctcgggcacagacgactgtcgttctccacccaccagtcagggacagcagcctccctgtcactcagctgagaaggccagccctccctggctgtgagcagcctccactgtgtccagagacatgggcctcccactcctgttccttgctagccctggggtggcgtctgcctaggagctggctggcaggtgttgggacctgctgctccatggatgcatgccctaagagtgtcactgagctgtgttttgtctgagcctctctcggtcaacagcaaagcttggtgtcttggcactgttagtgacagagcccagcatcccttctgcccccgttccagctgacatcttgcacggtgaccccttttagtcaggagagtgcagatctgtgctcatcggagactgccccacggccctgtcagagccgccactcctatccccaggccaggtccctggaccagcctcctgtttgcaggcccagaggagccaagtcattaaaatggaagtggattctggatggccgggctgctgctgatgtaggagctggatttgggagctctgcttgccgactggctgtgagacgaggcaggggctctgcttcctcagccctagaggcgagccaggcaaggttggcgactgtcatgtggcttggtttggtcatgcccgtcgatgttttgggtattgaatgtggtaagtggaggaaatgttggaactctgtgcaggtgctgccttgagacccccaagcttccacctgtccctctcctatgtggcagctggggagcagctgagatgtggacttgtatgctgcccacatacgtgagggggagctgaaagggagcccctcctctgagcagcctctgccaggcctgtatgaggcttttcccaccagctcccaacagaggcctcccccagccaggaccacctcgtcctcgtggcggggcagcaggagcggtagaaaggggtccgatgtttgaggaggcccttaagggaagctactgaattataacacgtaagaaaatcaccattccgtattggttgggggctcctgtttctcatcctagctttttcctggaaagcccgctagaaggtttgggaacgaggggaaagttctcagaactgttggctgctccccacccgcctcccgcctcccccgcaggttatgtcagcagctctgagacagcagtatcacaggccagatgttgttcctggctagatgtttacatttgtaagaaataacactgtgaatgtaaaacagagccattcccttggaatgcatatcgctgggctcaacatagagtttgtcttcctcttgtttacgacgtgatctaaaccagtccttagcaaggggctcagaacaccccgctctggcagtaggtgtcccccacccccaaagacctgcctgtgtgctccggagatgaatatgagctcattagtaaaaatgacttcacccacgcatatacataaagtatccatgcatgtgcatatagacacatctataattttacacacacacctctcaagacggagatgcatggcctctaagagtgcccgtgtcggttcttcctggaagttgactttccttagacccgccaggtcaagttagccgcgtgacggacatccaggcgtgggacgtggtcagggcagggctcattcattgcccactaggatcccactggcgaagatggtctccatatcagctctctgcagaagggaggaagactttatcatgttcctaaaaatctgtggcaagcacccatcgtattatccaaattttgttgcaaatgtgattaatttggttgtcaagttttgggggtgggctgtggggagattgcttttgttttcctgctggtaatatcgggaaagattttaatgaaaccagggtagaattgtttggcaatgcactgaagcgtgtttctttcccaaaatgtgcctcccttccgctgcgggcccagctgagtctatgtaggtgatgtttccagctgccaagtgctctttgttactgtccaccctcatttctgccagcgcatgtgtcctttcaaggggaaaatgtgaagctgaaccccctccagacacccagaatgtagcatctgagaaggccctgtgccctaaaggacacccctcgcccccatcttcatggagggggtcatttcagagccctcggagccaatgaacagctcctcctcttggagctgagatgagccccacgtggagctcgggacggatagtagacagcaataactcggtgtgtggccgcctggcaggtggaacttcctcccgttgcggggtggagtgaggttagttctgtgtgtctggtgggtggagtcaggcttctcttgctacctgtgagcatccttcccagcagacatcctcatcgggctttgtccctcccccgcttcctccctctgcggggaggacccgggaccacagctgctggccagggtagacttggagctgtcctccagaggggtcacgtgtaggagtgagaagaaggaagatcttgagagctgctgagggaccttggagagctcaggatggctcagacgaggacactcgcttgccgggcctgggcctcctgggaaggagggagctgctcagaatgccgcatgacaactgaaggcaacctggaaggttcaggggccgctcttcccccatgtgcctgtcacgctctggtgcagtcaaaggaacgccttcccctcagttgtttctaagagcagagtctcccgctgcaatctgggtggtaactgccagccttggaggatcgtggccaacgtggacctgcctacggagggtgggctctgacccaagtggggcctccttgtccaggtctcactgctttgcaccgtggtcagagggactgtcagctgagcttgagctcccctggagccagcagggctgtgatgggcgagtcccggagccccacccagacctgaatgcttctgagagcaaagggaaggactgacgagagatgtatatttaattttttaactgctgcaaacattgtacatccaaattaaaggaaaaaaatggaaaccatcaaaaaaaaaaaaaaaaaa

SEQ ID NO: 1426 - DNA, 1482 bp, Artificial Sequence
  Description of Artificial Sequence: Synthetic polynucleotide
ctgcgcgctcgctcgctcactgaggccgcccgggcaaagcccgggcgtcgggcgacctttggtcgcccggcctcagtgagcgagcgagcgcgcagagagggagtgtagccatgctctaggaagatcaattcaattcacgcgtcgacattgattattgactagttattaatagtaatcaattacggggtcattagttcatagcccatatatggagttccgcgttacataacttacggtaaatggcccgcctggctgaccgcccaacgacccccgcccattgacgtcaataatgacgtatgttcccatagtaacgccaatagggactttccattgacgtcaatgggtggagtatttacggtaaactgcccacttggcagtacatcaagtgtatcatatgccaagtacgccccctattgacgtcaatgacggtaaatggcccgcctggcattatgcccagtacatgaccttatgggactttcctacttggcagtacatctacgtattagtcatcgctattaccatgtcgaggccacgttctgcttcactctccccatctcccccccctccccacccccaattttgtatttatttattttttaattattttgtgcagcgatgggggcggggggggggggcgcgcgccaggcggggcggggcggggcgaggggcggggcggggcgaggcggagaggtgcggcggcagccaatcagagcggcgcgctccgaaagtttccttttatggcgaggcggcggcggcggcggccctataaaaagcgaagcgcgcggcgggcgggagcaagcttgaactgaaaaaccagaaagttaactggtaagtttagtctttttgtcttttatttcaggtcccggatccggtggtggtgcaaatcaaagaactgctcctcagtggatgttgcctttacttctaggcctgtacggaagtgttacttctgctctaaaagctgcggaattgtacccgcggccgatccaccggtgtgctgggcggggggcggcgggccctcccgcagaacaccatgcgctcttcggaagcaattcagtctcgttgtccctgtgacctggtacaacgagactgaattgcttctgaggagcgccttgacagcagccatgggagggccgccccctacctcagtgactcgaggacggggtgaactacgcctgaggatccgatctttttccctctgccaaaaattatggggacatcatgaagccccttgagcatctgacttctggctaataaaggaaatttattttcattgcaatagtgtgttggaattttttgtgtctctcactcggcctaggtagataagtagcatggcgggttaatcattaactacaaggaacccctagtgatggagttggccactccctctctgcgcgctcgctcgctcactgaggccgggcgaccaaaggtcgcccgacgcccgggctttgcccgggcggcctcagtgagcgagcgagcgcgcag

SEQ ID NO: 1427 - DNA, 1482 bp, Artificial Sequence
  Description of Artificial Sequence: Synthetic polynucleotide
ctgcgcgctcgctcgctcactgaggccgcccgggcaaagcccgggcgtcgggcgacctttggtcgcccggcctcagtgagcgagcgagcgcgcagagagggagtgtagccatgctctaggaagatcaattcaattcacgcgtcgacattgattattgactagttattaatagtaatcaattacggggtcattagttcatagcccatatatggagttccgcgttacataacttacggtaaatggcccgcctggctgaccgcccaacgacccccgcccattgacgtcaataatgacgtatgttcccatagtaacgccaatagggactttccattgacgtcaatgggtggagtatttacggtaaactgcccacttggcagtacatcaagtgtatcatatgccaagtacgccccctattgacgtcaatgacggtaaatggcccgcctggcattatgcccagtacatgaccttatgggactttcctacttggcagtacatctacgtattagtcatcgctattaccatgtcgaggccacgttctgcttcactctccccatctcccccccctccccacccccaattttgtatttatttattttttaattattttgtgcagcgatgggggcggggggggggggcgcgcgccaggcggggcggggcggggcgaggggcggggcggggcgaggcggagaggtgcggcggcagccaatcagagcggcgcgctccgaaagtttccttttatggcgaggcggcggcggcggcggccctataaaaagcgaagcgcgcggcgggcgggagcaagcttgaactgaaaaaccagaaagttaactggtaagtttagtctttttgtcttttatttcaggtcccggatccggtggtggtgcaaatcaaagaactgctcctcagtggatgttgcctttacttctaggcctgtacggaagtgttacttctgctctaaaagctgcggaattgtacccgcggccgatccaccggtgtgctgggcggggggcggcgggccctcccgcagaacaccatgcgctcttcggaatgaacctcttgttataaagcctgtgacctggttttataacaagaggttcattctgaggagcgccttgacagcagccatgggagggccgccccctacctcagtgactcgaggacggggtgaactacgcctgaggatccgatctttttccctctgccaaaaattatggggacatcatgaagccccttgagcatctgacttctggctaataaaggaaatttattttcattgcaatagtgtgttggaattttttgtgtctctcactcggcctaggtagataagtagcatggcgggttaatcattaactacaaggaacccctagtgatggagttggccactccctctctgcgcgctcgctcgctcactgaggccgggcgaccaaaggtcgcccgacgcccgggctttgcccgggcggcctcagtgagcgagcgagcgcgcag

SEQ ID NO: 1428 - DNA, 1482 bp, Artificial Sequence
  Description of Artificial Sequence: Synthetic polynucleotide
ctgcgcgctcgctcgctcactgaggccgcccgggcaaagcccgggcgtcgggcgacctttggtcgcccggcctcagtgagcgagcgagcgcgcagagagggagtgtagccatgctctaggaagatcaattcaattcacgcgtcgacattgattattgactagttattaatagtaatcaattacggggtcattagttcatagcccatatatggagttccgcgttacataacttacggtaaatggcccgcctggctgaccgcccaacgacccccgcccattgacgtcaataatgacgtatgttcccatagtaacgccaatagggactttccattgacgtcaatgggtggagtatttacggtaaactgcccacttggcagtacatcaagtgtatcatatgccaagtacgccccctattgacgtcaatgacggtaaatggcccgcctggcattatgcccagtacatgaccttatgggactttcctacttggcagtacatctacgtattagtcatcgctattaccatgtcgaggccacgttctgcttcactctccccatctcccccccctccccacccccaattttgtatttatttattttttaattattttgtgcagcgatgggggcggggggggggggcgcgcgccaggcggggcggggcggggcgaggggcggggcggggcgaggcggagaggtgcggcggcagccaatcagagcggcgcgctccgaaagtttccttttatggcgaggcggcggcggcggcggccctataaaaagcgaagcgcgcggcgggcgggagcaagcttgaactgaaaaaccagaaagttaactggtaagtttagtctttttgtcttttatttcaggtcccggatccggtggtggtgcaaatcaaagaactgctcctcagtggatgttgcctttacttctaggcctgtacggaagtgttacttctgctctaaaagctgcggaattgtacccgcggccgatccaccggtgtgctgggcggggggcggcgggccctcccgcagaacaccatgcgctcttcggaaccgacaaccagtatttgggcctgtgacctggtccaaatactggttgtcggttctgaggagcgccttgacagcagccatgggagggccgccccctacctcagtgactcgaggacggggtgaactacgcctgaggatccgatctttttccctctgccaaaaattatggggacatcatgaagccccttgagcatctgacttctggctaataaaggaaatttattttcattgcaatagtgtgttggaattttttgtgtctctcactcggcctaggtagataagtagcatggcgggttaatcattaactacaaggaacccctagtgatggagttggccactccctctctgcgcgctcgctcgctcactgaggccgggcgaccaaaggtcgcccgacgcccgggctttgcccgggcggcctcagtgagcgagcgagcgcgcag

SEQ ID NO: 1429 - DNA, 1482 bp, Artificial Sequence
  Description of Artificial Sequence: Synthetic polynucleotide
ctgcgcgctcgctcgctcactgaggccgcccgggcaaagcccgggcgtcgggcgacctttggtcgcccggcctcagtgagcgagcgagcgcgcagagagggagtgtagccatgctctaggaagatcaattcaattcacgcgtcgacattgattattgactagttattaatagtaatcaattacggggtcattagttcatagcccatatatggagttccgcgttacataacttacggtaaatggcccgcctggctgaccgcccaacgacccccgcccattgacgtcaataatgacgtatgttcccatagtaacgccaatagggactttccattgacgtcaatgggtggagtatttacggtaaactgcccacttggcagtacatcaagtgtatcatatgccaagtacgccccctattgacgtcaatgacggtaaatggcccgcctggcattatgcccagtacatgaccttatgggactttcctacttggcagtacatctacgtattagtcatcgctattaccatgtcgaggccacgttctgcttcactctccccatctcccccccctccccacccccaattttgtatttatttattttttaattattttgtgcagcgatgggggcggggggggggggcgcgcgccaggcggggcggggcggggcgaggggcggggcggggcgaggcggagaggtgcggcggcagccaatcagagcggcgcgctccgaaagtttccttttatggcgaggcggcggcggcggcggccctataaaaagcgaagcgcgcggcgggcgggagcaagcttgaactgaaaaaccagaaagttaactggtaagtttagtctttttgtcttttatttcaggtcccggatccggtggtggtgcaaatcaaagaactgctcctcagtggatgttgcctttacttctaggcctgtacggaagtgttacttctgctctaaaagctgcggaattgtacccgcggccgatccaccggtgtgctgggcggggggcggcgggccctcccgcagaacaccatgcgctcttcggaaccacaatgttgtgactgggcctgtgacctggtccggtcacaacattgtggttctgaggagcgccttgacagcagccatgggagggccgccccctacctcagtgactcgaggacggggtgaactacgcctgaggatccgatctttttccctctgccaaaaattatggggacatcatgaagccccttgagcatctgacttctggctaataaaggaaatttattttcattgcaatagtgtgttggaattttttgtgtctctcactcggcctaggtagataagtagcatggcgggttaatcattaactacaaggaacccctagtgatggagttggccactccctctctgcgcgctcgctcgctcactgaggccgggcgaccaaaggtcgcccgacgcccgggctttgcccgggcggcctcagtgagcgagcgagcgcgcag

SEQ ID NO: 1430 - DNA, 1482 bp, Artificial Sequence
  Description of Artificial Sequence: Synthetic polynucleotide
ctgcgcgctcgctcgctcactgaggccgcccgggcaaagcccgggcgtcgggcgacctttggtcgcccggcctcagtgagcgagcgagcgcgcagagagggagtgtagccatgctctaggaagatcaattcaattcacgcgtcgacattgattattgactagttattaatagtaatcaattacggggtcattagttcatagcccatatatggagttccgcgttacataacttacggtaaatggcccgcctggctgaccgcccaacgacccccgcccattgacgtcaataatgacgtatgttcccatagtaacgccaatagggactttccattgacgtcaatgggtggagtatttacggtaaactgcccacttggcagtacatcaagtgtatcatatgccaagtacgccccctattgacgtcaatgacggtaaatggcccgcctggcattatgcccagtacatgaccttatgggactttcctacttggcagtacatctacgtattagtcatcgctattaccatgtcgaggccacgttctgcttcactctccccatctcccccccctccccacccccaattttgtatttatttattttttaattattttgtgcagcgatgggggcggggggggggggcgcgcgccaggcggggcggggcggggcgaggggcggggcggggcgaggcggagaggtgcggcggcagccaatcagagcggcgcgctccgaaagtttccttttatggcgaggcggcggcggcggcggccctataaaaagcgaagcgcgcggcgggcgggagcaagcttgaactgaaaaaccagaaagttaactggtaagtttagtctttttgtcttttatttcaggtcccggatccggtggtggtgcaaatcaaagaactgctcctcagtggatgttgcctttacttctaggcctgtacggaagtgttacttctgctctaaaagctgcggaattgtacccgcggccgatccaccggtgtgctgggcggggggcggcgggccctcccgcagaacaccatgcgctcttcggaagcaattcagtctcgttgtacctgtgatttggtacaacgagactgaattgcttctgaggagcgccttgacagcagccatgggagggccgccccctacctcagtgactcgaggacggggtgaactacgcctgaggatccgatctttttccctctgccaaaaattatggggacatcatgaagccccttgagcatctgacttctggctaataaaggaaatttattttcattgcaatagtgtgttggaattttttgtgtctctcactcggcctaggtagataagtagcatggcgggttaatcattaactacaaggaacccctagtgatggagttggccactccctctctgcgcgctcgctcgctcactgaggccgggcgaccaaaggtcgcccgacgcccgggctttgcccgggcggcctcagtgagcgagcgagcgcgcag

SEQ ID NO: 1431 - DNA, 1482 bp, Artificial Sequence
  Description of Artificial Sequence: Synthetic polynucleotide
ctgcgcgctcgctcgctcactgaggccgcccgggcaaagcccgggcgtcgggcgacctttggtcgcccggcctcagtgagcgagcgagcgcgcagagagggagtgtagccatgctctaggaagatcaattcaattcacgcgtcgacattgattattgactagttattaatagtaatcaattacggggtcattagttcatagcccatatatggagttccgcgttacataacttacggtaaatggcccgcctggctgaccgcccaacgacccccgcccattgacgtcaataatgacgtatgttcccatagtaacgccaatagggactttccattgacgtcaatgggtggagtatttacggtaaactgcccacttggcagtacatcaagtgtatcatatgccaagtacgccccctattgacgtcaatgacggtaaatggcccgcctggcattatgcccagtacatgaccttatgggactttcctacttggcagtacatctacgtattagtcatcgctattaccatgtcgaggccacgttctgcttcactctccccatctcccccccctccccacccccaattttgtatttatttattttttaattattttgtgcagcgatgggggcggggggggggggcgcgcgccaggcggggcggggcggggcgaggggcggggcggggcgaggcggagaggtgcggcggcagccaatcagagcggcgcgctccgaaagtttccttttatggcgaggcggcggcggcggcggccctataaaaagcgaagcgcgcggcgggcgggagcaagcttgaactgaaaaaccagaaagttaactggtaagtttagtctttttgtcttttatttcaggtcccggatccggtggtggtgcaaatcaaagaactgctcctcagtggatgttgcctttacttctaggcctgtacggaagtgttacttctgctctaaaagctgcggaattgtacccgcggccgatccaccggtgtgctgggcggggggcggcgggccctcccgcagaacaccatgcgctcttcggaagcaattcagactcgttgtacctgtgacctggtacaacgagactgaattgcttctgtggagcgccttgacagcagccatgggagggccgccccctacctcagtgactcgaggacggggtgaactacgcctgaggatccgatctttttccctctgccaaaaattatggggacatcatgaagccccttgagcatctgacttctggctaataaaggaaatttattttcattgcaatagtgtgttggaattttttgtgtctctcactcggcctaggtagataagtagcatggcgggttaatcattaactacaaggaacccctagtgatggagttggccactccctctctgcgcgctcgctcgctcactgaggccgggcgaccaaaggtcgcccgacgcccgggctttgcccgggcggcctcagtgagcgagcgagcgcgcag

SEQ ID NO: 1432 - DNA, 1482 bp, Artificial Sequence
  Description of Artificial Sequence: Synthetic polynucleotide
ctgcgcgctcgctcgctcactgaggccgcccgggcaaagcccgggcgtcgggcgacctttggtcgcccggcctcagtgagcgagcgagcgcgcagagagggagtgtagccatgctctaggaagatcaattcaattcacgcgtcgacattgattattgactagttattaatagtaatcaattacggggtcattagttcatagcccatatatggagttccgcgttacataacttacggtaaatggcccgcctggctgaccgcccaacgacccccgcccattgacgtcaataatgacgtatgttcccatagtaacgccaatagggactttccattgacgtcaatgggtggagtatttacggtaaactgcccacttggcagtacatcaagtgtatcatatgccaagtacgccccctattgacgtcaatgacggtaaatggcccgcctggcattatgcccagtacatgaccttatgggactttcctacttggcagtacatctacgtattagtcatcgctattaccatgtcgaggccacgttctgcttcactctccccatctcccccccctccccacccccaattttgtatttatttattttttaattattttgtgcagcgatgggggcggggggggggggcgcgcgccaggcggggcggggcggggcgaggggcggggcggggcgaggcggagaggtgcggcggcagccaatcagagcggcgcgctccgaaagtttccttttatggcgaggcggcggcggcggcggccctataaaaagcgaagcgcgcggcgggcgggagcaagcttgaactgaaaaaccagaaagttaactggtaagtttagtctttttgtcttttatttcaggtcccggatccggtggtggtgcaaatcaaagaactgctcctcagtggatgttgcctttacttctaggcctgtacggaagtgttacttctgctctaaaagctgcggaattgtacccgcggccgatccaccggtgtgctgggcggggggcggcgggccctcccgcagaacaccatgcgctcttcggaagcaattcagtctcgttgtacctgtgacctggtacaacgagactgaattgcttctgtggagcgccttgacagcagccatgggagggccgccccctacctcagtgactcgaggacggggtgaactacgcctgaggatccgatctttttccctctgccaaaaattatggggacatcatgaagccccttgagcatctgacttctggctaataaaggaaatttattttcattgcaatagtgtgttggaattttttgtgtctctcactcggcctaggtagataagtagcatggcgggttaatcattaactacaaggaacccctagtgatggagttggccactccctctctgcgcgctcgctcgctcactgaggccgggcgaccaaaggtcgcccgacgcccgggctttgcccgggcggcctcagtgagcgagcgagcgcgcag

SEQ ID NO: 1433 - DNA, 1584 bp, Artificial Sequence
  Description of Artificial Sequence: Synthetic polynucleotide
ctgcgcgctcgctcgctcactgaggccgcccgggcaaagcccgggcgtcgggcgacctttggtcgcccggcctcagtgagcgagcgagcgcgcagagagggagtgtagccatgctctaggaagatcaattcaattcacgcgtcgacattgattattgactagttattaatagtaatcaattacggggtcattagttcatagcccatatatggagttccgcgttacataacttacggtaaatggcccgcctggctgaccgcccaacgacccccgcccattgacgtcaataatgacgtatgttcccatagtaacgccaatagggactttccattgacgtcaatgggtggagtatttacggtaaactgcccacttggcagtacatcaagtgtatcatatgccaagtacgccccctattgacgtcaatgacggtaaatggcccgcctggcattatgcccagtacatgaccttatgggactttcctacttggcagtacatctacgtattagtcatcgctattaccatgtcgaggccacgttctgcttcactctccccatctcccccccctccccacccccaattttgtatttatttattttttaattattttgtgcagcgatgggggcggggggggggggcgcgcgccaggcggggcggggcggggcgaggggcggggcggggcgaggcggagaggtgcggcggcagccaatcagagcggcgcgctccgaaagtttccttttatggcgaggcggcggcggcggcggccctataaaaagcgaagcgcgcggcgggcgggagcaagcttgaactgaaaaaccagaaagttaactggtaagtttagtctttttgtcttttatttcaggtcccggatccggtggtggtgcaaatcaaagaactgctcctcagtggatgttgcctttacttctaggcctgtacggaagtgttacttctgctctaaaagctgcggaattgtacccgcggccgatccaccggtgaagcaaagaaggggcagagggagcccgtgagctgagtgggccagggactgggagaaggagtgaggaggcagggccggcatgcctctgctgctggccagagcaattcagtctcgttgtaccgtctgcacctgtcactagtacaacgagactgaattgctttggccgtgtagtgctacccagcgctggctgcctcctcagcattgcaattcctctcccatctgggcaccagtcagctaccctggtgggaatctgggtagccctcgaggacggggtgaactacgcctgaggatccgatctttttccctctgccaaaaattatggggacatcatgaagccccttgagcatctgacttctggctaataaaggaaatttattttcattgcaatagtgtgttggaattttttgtgtctctcactcggcctaggtagataagtagcatggcgggttaatcattaactacaaggaacccctagtgatggagttggccactccctctctgcgcgctcgctcgctcactgaggccgggcgaccaaaggtcgcccgacgcccgggctttgcccgggcggcctcagtgagcgagcgagcgcgcag

SEQ ID NO: 1434 - DNA, 1584 bp, Artificial Sequence
  Description of Artificial Sequence: Synthetic polynucleotide
ctgcgcgctcgctcgctcactgaggccgcccgggcaaagcccgggcgtcgggcgacctttggtcgcccggcctcagtgagcgagcgagcgcgcagagagggagtgtagccatgctctaggaagatcaattcaattcacgcgtcgacattgattattgactagttattaatagtaatcaattacggggtcattagttcatagcccatatatggagttccgcgttacataacttacggtaaatggcccgcctggctgaccgcccaacgacccccgcccattgacgtcaataatgacgtatgttcccatagtaacgccaatagggactttccattgacgtcaatgggtggagtatttacggtaaactgcccacttggcagtacatcaagtgtatcatatgccaagtacgccccctattgacgtcaatgacggtaaatggcccgcctggcattatgcccagtacatgaccttatgggactttcctacttggcagtacatctacgtattagtcatcgctattaccatgtcgaggccacgttctgcttcactctccccatctcccccccctccccacccccaattttgtatttatttattttttaattattttgtgcagcgatgggggcggggggggggggcgcgcgccaggcggggcggggcggggcgaggggcggggcggggcgaggcggagaggtgcggcggcagccaatcagagcggcgcgctccgaaagtttccttttatggcgaggcggcggcggcggcggccctataaaaagcgaagcgcgcggcgggcgggagcaagcttgaactgaaaaaccagaaagttaactggtaagtttagtctttttgtcttttatttcaggtcccggatccggtggtggtgcaaatcaaagaactgctcctcagtggatgttgcctttacttctaggcctgtacggaagtgttacttctgctctaaaagctgcggaattgtacccgcggccgatccaccggtgaagcaaagaaggggcagagggagcccgtgagctgagtgggccagggactgggagaaggagtgaggaggcagggccggcatgcctctgctgctggccagaggtttatgaactgacgttaccgtctgcacctgtcactagtaacgtcagttcataaacctttggccgtgtagtgctacccagcgctggctgcctcctcagcattgcaattcctctcccatctgggcaccagtcagctaccctggtgggaatctgggtagccctcgaggacggggtgaactacgcctgaggatccgatctttttccctctgccaaaaattatggggacatcatgaagccccttgagcatctgacttctggctaataaaggaaatttattttcattgcaatagtgtgttggaattttttgtgtctctcactcggcctaggtagataagtagcatggcgggttaatcattaactacaaggaacccctagtgatggagttggccactccctctctgcgcgctcgctcgctcactgaggccgggcgaccaaaggtcgcccgacgcccgggctttgcccgggcggcctcagtgagcgagcgagcgcgcag

SEQ ID NO: 1435 - DNA, 1584 bp, Artificial Sequence
  Description of Artificial Sequence: Synthetic polynucleotide
ctgcgcgctcgctcgctcactgaggccgcccgggcaaagcccgggcgtcgggcgacctttggtcgcccggcctcagtgagcgagcgagcgcgcagagagggagtgtagccatgctctaggaagatcaattcaattcacgcgtcgacattgattattgactagttattaatagtaatcaattacggggtcattagttcatagcccatatatggagttccgcgttacataacttacggtaaatggcccgcctggctgaccgcccaacgacccccgcccattgacgtcaataatgacgtatgttcccatagtaacgccaatagggactttccattgacgtcaatgggtggagtatttacggtaaactgcccacttggcagtacatcaagtgtatcatatgccaagtacgccccctattgacgtcaatgacggtaaatggcccgcctggcattatgcccagtacatgaccttatgggactttcctacttggcagtacatctacgtattagtcatcgctattaccatgtcgaggccacgttctgcttcactctccccatctcccccccctccccacccccaattttgtatttatttattttttaattattttgtgcagcgatgggggcggggggggggggcgcgcgccaggcggggcggggcggggcgaggggcggggcggggcgaggcggagaggtgcggcggcagccaatcagagcggcgcgctccgaaagtttccttttatggcgaggcggcggcggcggcggccctataaaaagcgaagcgcgcggcgggcgggagcaagcttgaactgaaaaaccagaaagttaactggtaagtttagtctttttgtcttttatttcaggtcccggatccggtggtggtgcaaatcaaagaactgctcctcagtggatgttgcctttacttctaggcctgtacggaagtgttacttctgctctaaaagctgcggaattgtacccgcggccgatccaccggtgaagcaaagaaggggcagagggagcccgtgagctgagtgggccagggactgggagaaggagtgaggaggcagggccggcatgcctctgctgctggccagaccgacaaccagtatttggaccgtctgcacctgtcactagtccaaatactggttgtcggtttggccgtgtagtgctacccagcgctggctgcctcctcagcattgcaattcctctcccatctgggcaccagtcagctaccctggtgggaatctgggtagccctcgaggacggggtgaactacgcctgaggatccgatctttttccctctgccaaaaattatggggacatcatgaagccccttgagcatctgacttctggctaataaaggaaatttattttcattgcaatagtgtgttggaattttttgtgtctctcactcggcctaggtagataagtagcatggcgggttaatcattaactacaaggaacccctagtgatggagttggccactccctctctgcgcgctcgctcgctcactgaggccgggcgaccaaaggtcgcccgacgcccgggctttgcccgggcggcctcagtgagcgagcgagcgcgcag

SEQ ID NO: 1436 - DNA, 1584 bp, Artificial Sequence
  Description of Artificial Sequence: Synthetic polynucleotide
ctgcgcgctcgctcgctcactgaggccgcccgggcaaagcccgggcgtcgggcgacctttggtcgcccggcctcagtgagcgagcgagcgcgcagagagggagtgtagccatgctctaggaagatcaattcaattcacgcgtcgacattgattattgactagttattaatagtaatcaattacggggtcattagttcatagcccatatatggagttccgcgttacataacttacggtaaatggcccgcctggctgaccgcccaacgacccccgcccattgacgtcaataatgacgtatgttcccatagtaacgccaatagggactttccattgacgtcaatgggtggagtatttacggtaaactgcccacttggcagtacatcaagtgtatcatatgccaagtacgccccctattgacgtcaatgacggtaaatggcccgcctggcattatgcccagtacatgaccttatgggactttcctacttggcagtacatctacgtattagtcatcgctattaccatgtcgaggccacgttctgcttcactctccccatctcccccccctccccacccccaattttgtatttatttattttttaattattttgtgcagcgatgggggcggggggggggggcgcgcgccaggcggggcggggcggggcgaggggcggggcggggcgaggcggagaggtgcggcggcagccaatcagagcggcgcgctccgaaagtttccttttatggcgaggcggcggcggcggcggccctataaaaagcgaagcgcgcggcgggcgggagcaagcttgaactgaaaaaccagaaagttaactggtaagtttagtctttttgtcttttatttcaggtcccggatccggtggtggtgcaaatcaaagaactgctcctcagtggatgttgcctttacttctaggcctgtacggaagtgttacttctgctctaaaagctgcggaattgtacccgcggccgatccaccggtgaagcaaagaaggggcagagggagcccgtgagctgagtgggccagggactgggagaaggagtgaggaggcagggccggcatgcctctgctgctggccagaccacaatgttgtgactggaccgtctgcacctgtcactagtccggtcacaacattgtggtttggccgtgtagtgctacccagcgctggctgcctcctcagcattgcaattcctctcccatctgggcaccagtcagctaccctggtgggaatctgggtagccctcgaggacggggtgaactacgcctgaggatccgatctttttccctctgccaaaaattatggggacatcatgaagccccttgagcatctgacttctggctaataaaggaaatttattttcattgcaatagtgtgttggaattttttgtgtctctcactcggcctaggtagataagtagcatggcgggttaatcattaactacaaggaacccctagtgatggagttggccactccctctctgcgcgctcgctcgctcactgaggccgggcgaccaaaggtcgcccgacgcccgggctttgcccgggcggcctcagtgagcgagcgagcgcgcag

SEQ ID NO: 1437 - DNA, 1487 bp, Artificial Sequence
  Description of Artificial Sequence: Synthetic polynucleotide
ctgcgcgctcgctcgctcactgaggccgcccgggcaaagcccgggcgtcgggcgacctttggtcgcccggcctcagtgagcgagcgagcgcgcagagagggagtgtagccatgctctaggaagatcaattcaattcacgcgtcgacattgattattgactagttattaatagtaatcaattacggggtcattagttcatagcccatatatggagttccgcgttacataacttacggtaaatggcccgcctggctgaccgcccaacgacccccgcccattgacgtcaataatgacgtatgttcccatagtaacgccaatagggactttccattgacgtcaatgggtggagtatttacggtaaactgcccacttggcagtacatcaagtgtatcatatgccaagtacgccccctattgacgtcaatgacggtaaatggcccgcctggcattatgcccagtacatgaccttatgggactttcctacttggcagtacatctacgtattagtcatcgctattaccatgtcgaggccacgttctgcttcactctccccatctcccccccctccccacccccaattttgtatttatttattttttaattattttgtgcagcgatgggggcggggggggggggcgcgcgccaggcggggcggggcggggcgaggggcggggcggggcgaggcggagaggtgcggcggcagccaatcagagcggcgcgctccgaaagtttccttttatggcgaggcggcggcggcggcggccctataaaaagcgaagcgcgcggcgggcgggagcaagcttgaactgaaaaaccagaaagttaactggtaagtttagtctttttgtcttttatttcaggtcccggatccggtggtggtgcaaatcaaagaactgctcctcagtggatgttgcctttacttctaggcctgtacggaagtgttacttctgctctaaaagctgcggaattgtacccgcggccgatccaccggtgtgctgggcggggggcggcgggccctcccgcagaacaccatgcgctccacggaacctgctagctccatgcttgctgtggccactgagaagtaagcatggagctagcaggttctgaggagcgccttgacagcagccatgggagggccgccccctacctcagtgactcgaggacggggtgaactacgcctgaggatccgatctttttccctctgccaaaaattatggggacatcatgaagccccttgagcatctgacttctggctaataaaggaaatttattttcattgcaatagtgtgttggaattttttgtgtctctcactcggcctaggtagataagtagcatggcgggttaatcattaactacaaggaacccctagtgatggagttggccactccctctctgcgcgctcgctcgctcactgaggccgggcgaccaaaggtcgcccgacgcccgggctttgcccgggcggcctcagtgagcgagcgagcgcgcag

SEQ ID NO: 1438 - DNA, 1487 bp, Artificial Sequence
  Description of Artificial Sequence: Synthetic polynucleotide
ctgcgcgctcgctcgctcactgaggccgcccgggcaaagcccgggcgtcgggcgacctttggtcgcccggcctcagtgagcgagcgagcgcgcagagagggagtgtagccatgctctaggaagatcaattcaattcacgcgtcgacattgattattgactagttattaatagtaatcaattacggggtcattagttcatagcccatatatggagttccgcgttacataacttacggtaaatggcccgcctggctgaccgcccaacgacccccgcccattgacgtcaataatgacgtatgttcccatagtaacgccaatagggactttccattgacgtcaatgggtggagtatttacggtaaactgcccacttggcagtacatcaagtgtatcatatgccaagtacgccccctattgacgtcaatgacggtaaatggcccgcctggcattatgcccagtacatgaccttatgggactttcctacttggcagtacatctacgtattagtcatcgctattaccatgtcgaggccacgttctgcttcactctccccatctcccccccctccccacccccaattttgtatttatttattttttaattattttgtgcagcgatgggggcggggggggggggcgcgcgccaggcggggcggggcggggcgaggggcggggcggggcgaggcggagaggtgcggcggcagccaatcagagcggcgcgctccgaaagtttccttttatggcgaggcggcggcggcggcggccctataaaaagcgaagcgcgcggcgggcgggagcaagcttgaactgaaaaaccagaaagttaactggtaagtttagtctttttgtcttttatttcaggtcccggatccggtggtggtgcaaatcaaagaactgctcctcagtggatgttgcctttacttctaggcctgtacggaagtgttacttctgctctaaaagctgcggaattgtacccgcggccgatccaccggtgtgctgggcggggggcggcgggccctcccgcagaacaccatgcgctcctcggaataagcatggagctagcaggttgtggccactgagaaacctgctagctccatgcttgttctgcggagcgccttgacagcagccatgggagggccgccccctacctcagtgactcgaggacggggtgaactacgcctgaggatccgatctttttccctctgccaaaaattatggggacatcatgaagccccttgagcatctgacttctggctaataaaggaaatttattttcattgcaatagtgtgttggaattttttgtgtctctcactcggcctaggtagataagtagcatggcgggttaatcattaactacaaggaacccctagtgatggagttggccactccctctctgcgcgctcgctcgctcactgaggccgggcgaccaaaggtcgcccgacgcccgggctttgcccgggcggcctcagtgagcgagcgagcgcgcag

SEQ ID NO: 1439 - protein, 743 aa, Artificial Sequence
  Description of Artificial Sequence: Synthetic polypeptide
MAADGYLPDWLEDNLSEGIREWWALKPGAPQPKANQQHQDNARGLVLPGYKYLGPGNGLDKGEPVNAADAAALEHDKAYDQQLKAGDNPYLKYNHADAEFQERLKEDTSFGGNLGRAVFQAKKRLLEPLGLVEEAAKTAPGKKRPVEQSPQEPDSSAGIGKSGAQPAKKRLNFGQTGDTESVPDPQPIGEPPAAPSGVGSLTMASGGGAPVADNNEGADGVGSSSGNWHCDSQWLGDRVITTSTRTWALPTYNNHLYKQISNSTSGGSSNDNAYFGYSTPWGYFDFNRFHCHFSPRDWQRLINNNWGFRPKRLNFKLFNIQVKEVTDNNGVKTIANNLTSTVQVFTDSDYQLPYVLGSAHEGCLPPFPADVFMIPQYGYLTLNDGSQAVGRSSFYCLEYFPSQMLRTGNNFQFSYEFENVPFHSSYAHSQSLDRLMNPLIDQYLYYLSRTINGSGQNQQTLKFSVAGPSNMAVQGRNYIPGPSYRQQRVSTTVTQNNNSEFAWPGASSWALNGRNSLMNPGPAMASHKEGEDRFFPLSGSLIFGKQGTGRDNVDADKVMITNEEEIKTTNPVATESYGQVATNHQSDGTLAVPFKAQAQTGWVQNQGILPGMVWQDRDVYLQGPIWAKIPHTDGNFHPSPLMGGFGMKHPPPQILIKNTPVPADPPTAFNKDKLNSFITQYSTGQVSVEIEWELQKENSKRWNPEIQYTSNYYKSNNVEFAVNTEGVYSEPRPIGTRYLTRNL

SEQ ID NO: 1440 - protein, 743 aa, Artificial Sequence
  Description of Artificial Sequence: Synthetic polypeptide
MAADGYLPDWLEDNLSEGIREWWALKPGAPQPKANQQHQDNARGLVLPGYKYLGPGNGLDKGEPVNAADAAALEHDKAYDQQLKAGDNPYLKYNHADAEFQERLKEDTSFGGNLGRAVFQAKKRLLEPLGLVEEAAKTAPGKKRPVEQSPQEPDSSAGIGKSGAQPAKKRLNFGQTGDTESVPDPQPIGEPPAAPSGVGSLTMASGGGAPVADNNEGADGVGSSSGNWHCDSQWLGDRVITTSTRTWALPTYNNHLYKQISNSTSGGSSNDNAYFGYSTPWGYFDFNRFHCHFSPRDWQRLINNNWGFRPKRLNFKLFNIQVKEVTDNNGVKTIANNLTSTVQVFTDSDYQLPYVLGSAHEGCLPPFPADVFMIPQYGYLTLNDGSQAVGRSSFYCLEYFPSQMLRTGNNFQFSYEFENVPFHSSYAHSQSLDRLMNPLIDQYLYYLSRTINGSGQNQQTLKFSVAGPSNMAVQGRNYIPGPSYRQQRVSTTVTQNNNSEFAWPGASSWALNGRNSLMNPGPAMASHKEGEDRFFPLSGSLIFGKQGTGRDNVDADKVMITNEEEIKTTNPVATESYGQVATNHQSAQQAVRTSLAQAQTGWVQNQGILPGMVWQDRDVYLQGPIWAKIPHTDGNFHPSPLMGGFGMKHPPPQILIKNTPVPADPPTAFNKDKLNSFITQYSTGQVSVEIEWELQKENSKRWNPEIQYTSNYYKSNNVEFAVNTEGVYSEPRPIGTRYLTRNL

SEQ ID NO: 1441 - protein, 736 aa, Artificial Sequence
  Description of Artificial Sequence: Synthetic polypeptide
MAADGYLPDWLEDNLSEGIREWWALKPGAPQPKANQQHQDNARGLVLPGYKYLGPGNGLDKGEPVNAADAAALEHDKAYDQQLKAGDNPYLKYNHADAEFQERLKEDTSFGGNLGRAVFQAKKRLLEPLGLVEEAAKTAPGKKRPVEQSPQEPDSSAGIGKSGAQPAKKRLNFGQTGDTESVPDPQPIGEPPAAPSGVGSLTMASGGGAPVADNNEGADGVGSSSGNWHCDSQWLGDRVITTSTRTWALPTYNNHLYKQISNSTSGGSSNDNAYFGYSTPWGYFDFNRFHCHFSPRDWQRLINNNWGFRPKRLNFKLFNIQVKEVTDNNGVKTIANNLTSTVQVFTDSDYQLPYVLGSAHEGCLPPFPADVFMIPQYGYLTLNDGSQAVGRSSFYCLEYFPSQMLRTGNNFQFSYEFENVPFHSSYAHSQSLDRLMNPLIDQYLYYLSRTINGSGQNQQTLKFSVAGPSNMAVQGRNYIPGPSYRQQRVSTTVTQNNNSEFAWPGASSWALNGRNSLMNPGPAMASHKEGEDRFFPLSGSLIFGKQGTGRDNVDADKVMITNEEEIKTTNPVATESYGQVATNHQSAQAQAQTGWVQNQGILPGMVWQDRDVYLQGPIWAKIPHTDGNFHPSPLMGGFGMKHPPPQILIKNTPVPADPPTAFNKDKLNSFITQYSTGQVSVEIEWELQKENSKRWNPEIQYTSNYYKSNNVEFAVNTEGVYSEPRPIGTRYLTRNL

SEQ ID NO: 1442 - protein, 11 aa, Artificial Sequence
  Description of Artificial Sequence: Synthetic polypeptide
AQTLAVPFKAQ

SEQ ID NO: 1443 - protein, 11 aa, Artificial Sequence
  Description of Artificial Sequence: Synthetic polypeptide
AQSVSKPFLAQ

SEQ ID NO: 1444 - protein, 11 aa, Artificial Sequence
  Description of Artificial Sequence: Synthetic polypeptide
AQFTLTTPKAQ

SEQ ID NO: 1445 - protein, 11 aa, Artificial Sequence
  Description of Artificial Sequence: Synthetic polypeptide
DGTLAVPFKAQ

SEQ ID NO: 1446 - protein, 11 aa, Artificial Sequence
  Description of Artificial Sequence: Synthetic polypeptide
ESTLAVPFKAQ

SEQ ID NO: 1447 - protein, 11 aa, Artificial Sequence
  Description of Artificial Sequence: Synthetic polypeptide
GGTLAVPFKAQ

SEQ ID NO: 1448 - protein, 11 aa, Artificial Sequence
  Description of Artificial Sequence: Synthetic polypeptide
AQTLATPFKAQ

SEQ ID NO: 1449 - protein, 11 aa, Artificial Sequence
  Description of Artificial Sequence: Synthetic polypeptide
ATTLATPFKAQ

SEQ ID NO: 1450 - protein, 11 aa, Artificial Sequence
  Description of Artificial Sequence: Synthetic polypeptide
DGTLATPFKAQ

SEQ ID NO: 1451 - protein, 11 aa, Artificial Sequence
  Description of Artificial Sequence: Synthetic polypeptide
GGTLATPFKAQ

SEQ ID NO: 1452 - protein, 11 aa, Artificial Sequence
  Description of Artificial Sequence: Synthetic polypeptide
SGSLAVPFKAQ

SEQ ID NO: 1453 - protein, 11 aa, Artificial Sequence
  Description of Artificial Sequence: Synthetic polypeptide
AQTLAQPFKAQ

SEQ ID NO: 1454 - protein, 11 aa, Artificial Sequence
  Description of Artificial Sequence: Synthetic polypeptide
AQTLQQPFKAQ

SEQ ID NO: 1455 - protein, 11 aa, Artificial Sequence
  Description of Artificial Sequence: Synthetic polypeptide
AQTLSNPFKAQ

SEQ ID NO: 1456 - protein, 11 aa, Artificial Sequence
  Description of Artificial Sequence: Synthetic polypeptide
AQTLAVPFSNP

SEQ ID NO: 1457 - protein, 11 aa, Artificial Sequence
  Description of Artificial Sequence: Synthetic polypeptide
QGTLAVPFKAQ

SEQ ID NO: 1458 - protein, 11 aa, Artificial Sequence
  Description of Artificial Sequence: Synthetic polypeptide
NQTLAVPFKAQ

SEQ ID NO: 1459 - protein, 11 aa, Artificial Sequence
  Description of Artificial Sequence: Synthetic polypeptide
EGSLAVPFKAQ

SEQ ID NO: 1460 - protein, 11 aa, Artificial Sequence
  Description of Artificial Sequence: Synthetic polypeptide
SGNLAVPFKAQ

SEQ ID NO: 1461 - protein, 11 aa, Artificial Sequence
  Description of Artificial Sequence: Synthetic polypeptide
EGTLAVPFKAQ

SEQ ID NO: 1462 - protein, 11 aa, Artificial Sequence
  Description of Artificial Sequence: Synthetic polypeptide
DSTLAVPFKAQ

SEQ ID NO: 1463 - protein, 11 aa, Artificial Sequence
  Description of Artificial Sequence: Synthetic polypeptide
AVTLAVPFKAQ

SEQ ID NO: 1464 - protein, 11 aa, Artificial Sequence
  Description of Artificial Sequence: Synthetic polypeptide
AQTLSTPFKAQ

SEQ ID NO: 1465 - protein, 11 aa, Artificial Sequence
  Description of Artificial Sequence: Synthetic polypeptide
AQTLPQPFKAQ

SEQ ID NO: 1466 - protein, 11 aa, Artificial Sequence
  Description of Artificial Sequence: Synthetic polypeptide
AQTLSQPFKAQ

SEQ ID NO: 1467 - protein, 11 aa, Artificial Sequence
  Description of Artificial Sequence: Synthetic polypeptide
AQTLQLPFKAQ

SEQ ID NO: 1468 - protein, 11 aa, Artificial Sequence
  Description of Artificial Sequence: Synthetic polypeptide
AQTLTMPFKAQ

SEQ ID NO: 1469 - protein, 11 aa, Artificial Sequence
  Description of Artificial Sequence: Synthetic polypeptide
AQTLTTPFKAQ

SEQ ID NO: 1470 - protein, 11 aa, Artificial Sequence
  Description of Artificial Sequence: Synthetic polypeptide
AQYTLSQGWAQ

SEQ ID NO: 1471 - protein, 11 aa, Artificial Sequence
  Description of Artificial Sequence: Synthetic polypeptide
AQMNATKNVAQ

SEQ ID NO: 1472 - protein, 11 aa, Artificial Sequence
  Description of Artificial Sequence: Synthetic polypeptide
AQVSGGHHSAQ

SEQ ID NO: 1473 - protein, 11 aa, Artificial Sequence
  Description of Artificial Sequence: Synthetic polypeptide
AQTLTAPFKAQ

SEQ ID NO: 1474 - protein, 11 aa, Artificial Sequence
  Description of Artificial Sequence: Synthetic polypeptide
AQTLSKPFKAQ

SEQ ID NO: 1475 - protein, 7 aa, Artificial Sequence
  Description of Artificial Sequence: Synthetic polypeptide
QAVRTSL

SEQ ID NO: 1476 - protein, 7 aa, Artificial Sequence
  Description of Artificial Sequence: Synthetic polypeptide
LAKERLS

SEQ ID NO: 1477 - protein, 7 aa, Artificial Sequence
  Description of Artificial Sequence: Synthetic polypeptide
MNSTKNV

SEQ ID NO: 1478 - protein, 7 aa, Artificial Sequence
  Description of Artificial Sequence: Synthetic polypeptide
VSGGHHS

SEQ ID NO: 1479 - protein, 14 aa, Artificial Sequence
  Description of Artificial Sequence: Synthetic polypeptide
SAQTLAVPFKAQAQ

SEQ ID NO: 1480 - protein, 14 aa, Artificial Sequence
  Description of Artificial Sequence: Synthetic polypeptide
  VARIANT (2)..(4): Xaa = any amino acid
SXXXLAVPFKAQAQ

SEQ ID NO: 1481 - protein, 14 aa, Artificial Sequence
  Description of Artificial Sequence: Synthetic polypeptide
  VARIANT (4)..(6): Xaa = any amino acid
SAQXXXVPFKAQAQ

SEQ ID NO: 1482 - protein, 14 aa, Artificial Sequence
  Description of Artificial Sequence: Synthetic polypeptide
  VARIANT (6)..(8): Xaa = any amino acid
SAQTLXXXFKAQAQ

SEQ ID NO: 1483 - protein, 14 aa, Artificial Sequence
  Description of Artificial Sequence: Synthetic polypeptide
  VARIANT (8)..(10): Xaa = any amino acid
SAQTLAVXXXAQAQ

SEQ ID NO: 1484 - protein, 14 aa, Artificial Sequence
  Description of Artificial Sequence: Synthetic polypeptide
  VARIANT (10)..(12): Xaa = any amino acid
SAQTLAVPFXXXAQ

SEQ ID NO: 1485 - protein, 7 aa, Artificial Sequence
  Description of Artificial Sequence: Synthetic polypeptide
TNHQSAQ

SEQ ID NO: 1486 - protein, 7 aa, Artificial Sequence
  Description of Artificial Sequence: Synthetic polypeptide
AQAQTGW

SEQ ID NO: 1487 - protein, 9 aa, Artificial Sequence
  Description of Artificial Sequence: Synthetic polypeptide
DGTLATPFK

SEQ ID NO: 1488 - protein, 11 aa, Artificial Sequence
  Description of Artificial Sequence: Synthetic polypeptide
  VARIANT (10)..(11): Xaa = any amino acid
DGTLATPFKXX

SEQ ID NO: 1489 - protein, 8 aa, Artificial Sequence
  Description of Artificial Sequence: Synthetic polypeptide
LAVPFKAQ

SEQ ID NO: 1490 - protein, 6 aa, Artificial Sequence
  Description of Artificial Sequence: Synthetic polypeptide
VPFKAQ

SEQ ID NO: 1491 - protein, 4 aa, Artificial Sequence
  Description of Artificial Sequence: Synthetic polypeptide
FKAQ

SEQ ID NO: 1492 - protein, 6 aa, Artificial Sequence
  Description of Artificial Sequence: Synthetic polypeptide
AQTLAV

SEQ ID NO: 1493 - protein, 8 aa, Artificial Sequence
  Description of Artificial Sequence: Synthetic polypeptide
AQTLAVPF

SEQ ID NO: 1494 - protein, 4 aa, Artificial Sequence
  Description of Artificial Sequence: Synthetic polypeptide
QAVR

SEQ ID NO: 1495 - protein, 4 aa, Artificial Sequence
  Description of Artificial Sequence: Synthetic polypeptide
AVRT

SEQ ID NO: 1496 - protein, 4 aa, Artificial Sequence
  Description of Artificial Sequence: Synthetic polypeptide
VRTS

SEQ ID NO: 1497 - protein, 4 aa, Artificial Sequence
  Description of Artificial Sequence: Synthetic polypeptide
RTSL

SEQ ID NO: 1498 - protein, 5 aa, Artificial Sequence
  Description of Artificial Sequence: Synthetic polypeptide
QAVRT

SEQ ID NO: 1499 - protein, 5 aa, Artificial Sequence
  Description of Artificial Sequence: Synthetic polypeptide
AVRTS

SEQ ID NO: 1500 - protein, 5 aa, Artificial Sequence
  Description of Artificial Sequence: Synthetic polypeptide
VRTSL

SEQ ID NO: 1501 - protein, 6 aa, Artificial Sequence
  Description of Artificial Sequence: Synthetic polypeptide
QAVRTS

SEQ ID NO: 1502 - protein, 6 aa, Artificial Sequence
  Description of Artificial Sequence: Synthetic polypeptide
AVRTSL

SEQ ID NO: 1503 - DNA, 33 bp, Artificial Sequence
  Description of Artificial Sequence: Synthetic polynucleotide
gatgggactttggcggtgccttttaaggcacag

SEQ ID NO: 1504 - DNA, 33 bp, Artificial Sequence
  Description of Artificial Sequence: Synthetic polynucleotide
gatgggacgttggcggtgccttttaaggcacag

SEQ ID NO: 1505 - DNA, 21 bp, Artificial Sequence
  Description of Artificial Sequence: Synthetic polynucleotide
caggcggttaggacgtctttg

SEQ ID NO: 1506 - DNA, 27 bp, Artificial Sequence
  Description of Artificial Sequence: Synthetic polynucleotide
caggtcttcacggactcagactatcag

SEQ ID NO: 1507 - DNA, 32 bp, Artificial Sequence
  Description of Artificial Sequence: Synthetic polynucleotide
caagtaaaacctctacaaatgtggtaaaatcg

SEQ ID NO: 1508 - DNA, 36 bp, Artificial Sequence
  Description of Artificial Sequence: Synthetic polynucleotide
actcatcgaccaatacttgtactatctctctagaac

SEQ ID NO: 1509 - DNA, 26 bp, Artificial Sequence
  Description of Artificial Sequence: Synthetic polynucleotide
ggaagtattccttggttttgaaccca

SEQ ID NO: 1510 - DNA, 23 bp, Artificial Sequence
  Description of Artificial Sequence: Synthetic polynucleotide
ggtcgcggttcttgtttgtggat

SEQ ID NO: 1511 - DNA, 24 bp, Artificial Sequence
  Description of Artificial Sequence: Synthetic polynucleotide
cgaccttgaagcgcatgaactcct

SEQ ID NO: 1512 - DNA, 83 bp, Artificial Sequence
  Description of Artificial Sequence: Synthetic polynucleotide
  misc_feature (42)..(43): n = a, c, t or g
  misc_feature (45)..(46): n = a, c, t or g
  misc_feature (48)..(49): n = a, c, t or g
  misc_feature (51)..(52): n = a, c, t or g
  misc_feature (54)..(55): n = a, c, t or g
  misc_feature (57)..(58): n = a, c, t or g
  misc_feature (60)..(61): n = a, c, t or g
gtattccttggttttgaacccaaccggtctgcgcctgtgcmnnmnnmnnmnnmnnmnnmnnttgggcactctggtggtttgtc

SEQ ID NO: 1513 - DNA, 64 bp, Artificial Sequence
  Description of Artificial Sequence: Synthetic polynucleotide
  misc_feature (36)..(37): n = a, c, t or g
  misc_feature (39)..(40): n = a, c, t or g
  misc_feature (42)..(43): n = a, c, t or g
gtattccttggttttgaacccaaccggtctgcgcmnnmnnmnnaaaaggcaccgccaaagtttg

SEQ ID NO: 1514 - DNA, 70 bp, Artificial Sequence
  Description of Artificial Sequence: Synthetic polynucleotide
  misc_feature (42)..(43): n = a, c, t or g
  misc_feature (45)..(46): n = a, c, t or g
  misc_feature (48)..(49): n = a, c, t or g
gtattccttggttttgaacccaaccggtctgcgcctgtgcmnnmnnmnncaccgccaaagtttgggcact

SEQ ID NO: 1515 - DNA, 77 bp, Artificial Sequence
  Description of Artificial Sequence: Synthetic polynucleotide
  misc_feature (48)..(49): n = a, c, t or g
  misc_feature (51)..(52): n = a, c, t or g
  misc_feature (54)..(55): n is a, c, g, or t
  misc_feature (60)..(61): n = a, c, t or g
gtattccttggttttgaacccaaccggtctgcgcctgtgccttaaamnnmnnmnncaaagtttgggcactctggtgg

SEQ ID NO: 1516 - DNA, 83 bp, Artificial Sequence
  Description of Artificial Sequence: Synthetic polynucleotide
  misc_feature (54)..(55): n = a, c, t or g
  misc_feature (57)..(58): n = a, c, t or g
  misc_feature (60)..(61): n = a, c, t or g
gtattccttggttttgaacccaaccggtctgcgcctgtgccttaaaaggcacmnnmnnmnnttgggcactctggtggtttgtg

SEQ ID NO: 1517 - DNA, 21 bp, Artificial Sequence
  Description of Artificial Sequence: Synthetic polynucleotide
cttgcgaaggagcggctttcg

SEQ ID NO: 1518 - protein, 534 aa, Artificial Sequence
  Description of Artificial Sequence: Synthetic polypeptide
MAEGGGGAMGDSSGGADGVGNASGNWHCDSQWMGNTVITKTTRTWVLPSYNNHIYKAITSGTSQDANVQYAGYSTPWGYFDFNRFHCHFSPRDWQRLINNHWGIRPKSLKFKIFNVQVKEVTTQDQTKTIANNLTSTIQVFTDDEHQLPYVLGSATEGTMPPFPSDVYALPQYGYCTMHTNQNGARFNDRSAFYCLEYFPSQMLRTGNNFEFTFDFEEVPFHSMFAHSQDLDRLMNPLVDQYLWNFNEVDSSRNAQFKKAVKGAYGTMGRNWLPGPKFLDQRVRAYTGGTDNYANWNIWSNGNKVNLKDRQYLLQPGPVSATYTEGEASSLPAQNILGIAKDPYRSGSTTAGISDIMVTEEQEVAPTNGVGWKPYGRTVTNEQNTTTAPTSSDLDVLGALPGMVWQNRDIYLQGPIGAKIPKTDGKFHPSPNLGGFGLHNPPPQVFIKNTPVPADPPVEYVHQKWNSYITQYSTGQCTVEMVWELRKENSKRWNPEIQFTSNFSNRTSIMFAPNETGGYVEDRLIGTRYLTQNL

SEQ ID NO: 1519 - protein, 554 aa, Artificial Sequence
  Description of Artificial Sequence: Synthetic polypeptide
MTSVNSAEASTGAGGGGSNPVKSMWSEGATFSANSVTCTFSRQFLIPYDPEHHYKVFSPAASSCHNASGKEAKVCTISPIMGYSTPWRYLDFNALNLFFSPLEFQHLIENYGSIAPDALTVTISEIAVKDVTDKTGGGVQVTDSTTGRLCMLVDHEYKYPYVLGQGQDTLAPELPIWVYFPPQYAYLTVGDVNTQGISGDSKKLASEESAFYVLEHSSFQLLGTGGTATMSYKFPPVPPENLEGCSQHFYEMYNPLYGSRLGVPDTLGGDPKFRSLTHEDHAIQPQNFMPGPLVNSVSTKEGDSFNTGAGKALTGLSTGTSQNTRISLRPGPVSQPYHHWDTDKYVTGINAISHGQTTYGNAEDKEYQQGVGRFPNEKEQLKQLQGLNMHTYFPNKGTQQYTDQIERPLMVGSVWNRRALHYESQLWSKIPNLDDSFKTQFAALGGWGLHQPPPQIFLKILPQSGPIGGIKSMGITTLVQYAVGIMTVTMTFKLGPRKATGRWNPQPGVYPPHAAGHLPYVLYDPTATDAKQHHRHGYEKPEELWTAKSRVHPL

SEQ ID NO: 1520 - protein, 587 aa, Artificial Sequence
  Description of Artificial Sequence: Synthetic polypeptide
MSDGTSQPDGGNAVHSAARVERAADGPGGSGGGGSGGGGVGVSTGSYDNQTHYRFLGDGWVEITALATRLVHLNMPKSENYCRIRVHNTTDTSVKGNMAKDDAHEQIWTPWSLVDANAWGVWLQPSDWQYICNTMSQLNLVSLDQEIFNVVLKTVTEQDSGGQAIKIYNNDLTACMMVAVDSNNILPYTPAANSMETLGFYPWKPTIASPYRYYFCVDRDLSVTYENQEGTIEHNVMGTPKGMNSQFFTIENTQQITLLRTGDEFATGTYYFDTNPVKLTHTWQTNRQLGQPPLLSTFPEADTDAGTLTAQGSRHGATQMEVNWVSEAIRTRPAQVGFCQPHNDFEASRAGPFAAPKVPADVTQGMDREANGSVRYSYGKQHGENWAAHGPAPERYTWDETNFGSGRDTRDGFIQSAPLVVPPPLNGILTNANPIGTKNDIHFSNVFNSYGPLTTFSHPSPVYPQGQIWDKELDLEHKPRLHITAPFVCKNNAPGQMLVRLGPNLTDQYDPNGATLSRIVTYGTFFWKGKLTMRAKLRANTTWNPVYQVSVEDNGNSYMSVTKWLPTATGNMQSVPLITRPVARNTY

SEQ ID NO: 1521 - protein, 584 aa, Artificial Sequence
  Description of Artificial Sequence: Synthetic polypeptide
MSDGAVQPDGGQPAVRNERATGSGNGSGGGGGGGSGGVGISTGTFNNQTEFKFLENGWVEITANSSRLVHLNMPESENYKRVVVNNMDKTAVKGNMALDDIHVEIVTPWSLVDANAWGVWFNPGDWQLIVNTMSELHLVSFEQEIFNVVLKTVSESATQPPTKVYNNDLTASLMVALDSNNTMPFTPAAMRSETLGFYPWKPTIPTPWRYYFQWDRTLIPSHTGTSGTPTNVYHGTDPDDVQFYTIENSVPVHLLRTGDEFATGTFFFDCKPCRLTHTWQTNRALGLPPFLNSLPQSEGATNFGDIGVQQDKRRGVTQMGNTDYITEATIMRPAEVGYSAPYYSFEASTQGPFKTPIAAGRGGAQTDENQAADGDPRYAFGRQHGQKTTTTGETPERFTYIAHQDTGRYPEGDWIQNINFNLPVTNDNVLLPTDPIGGKTGINYTNIFNTYGPLTALNNVPPVYPNGQIWDKEFDTDLKPRLHINAPFVCQNNCPGQLFVKVAPNLTNQYDPDASANMSRIVTYSDFWWKGKLVFKAKLRASHTWNPIQQMSINVDNQFNYVPNNIGAMKIVYEKSQLAPRKLY

SEQ ID NO: 1522 - protein, 548 aa, Artificial Sequence
  Description of Artificial Sequence: Synthetic polypeptide
GVGISTGTFNNQTEFKFLENGWVEITANSSRLVHLNMPESENYRRVVVNNMDKTAVNGNMALDDIHAQIVTPWSLVDANAWGVWFNPGDWQLIVNTMSELHLVSFEQEIFNVVLKTVSESATQPPTKVYNNDLTASLMVALDSNNTMPFTPAAMRSETLGFYPWKPTIPTPWRYYFQWDRTLIPSHTGTSGTPTNIYHGTDPDDVQFYTIENSVPVHLLRTGDEFATGTFFFDCKPCRLTHTWQTNRALGLPPFLNSLPQSEGATNFGDIGVQQDKRRGVTQMGNTNYITEATIMRPAEVGYSAPYYSFEASTQGPFKTPIAAGRGGAQTDENQAADGNPRYAFGRQHGQKTTTTGETPERFTYIAHQDTGRYPEGDWIQNINFNLPVTNDNVLLPTDPIGGKTGINYTNIFNTYGPLTALNNVPPVYPNGQIWDKEFDTDLKPRLHVNAPFVCQNNCPGQLFVKVAPNLTNEYDPDASANMSRIVTYSDFWWKGKLVFKAKLRASHTWNPIQQMSINVDNQFNYVPSNIGGMKIVYEKSQLAPRKLY

SEQ ID NO: 1523 - protein, 736 aa, Artificial Sequence; identical to SEQ ID NO: 101
  Description of Artificial Sequence: Synthetic polypeptide

SEQ ID NO: 1524 - protein, 736 aa, Artificial Sequence; identical to SEQ ID NO: 96
  Description of Artificial Sequence: Synthetic polypeptide

SEQ ID NO: 1525 - protein, 736 aa, Artificial Sequence
  Description of Artificial Sequence: Synthetic polypeptide
MAADGYLPDWLEDTLSEGIRQWWKLKPGPPPPKPAERHKDDSRGLVLPGYKYLGPFNGLDKGEPVNEADAAALEHDKAYDRQLDSGDNPYLKYNHADAEFQERLKEDTSFGGNLGRAVFQAKKRVLEPLGLVEEPVKTAPGKKRPVEHSPVEEPDSSSGTGKAGQQPARKRLNFGQTGDADSVPDPQPLGQPPAAPSGLGTNTMATGSGAPMADNNEGADGVGNSSGNWHCDSTWMGDRVITTSTRTWALPTYNNHLYKQISSQSGASNDNHYFGYSTPWGYFDFNRFHCHFSPRDWQRLINNNWGFRPKRLNFKLFNIQVKEVTQNDGTTTIANNLTSTVQVFTDSEYQLPYVLGSAHQGCLPPFPADVFMVPQYGYLTLNNGSQAVGRSSFYCLEYFPSQMLRTGNNFTFSYTFEDVPFHSSYAHSQSLDRLMNPLIDQYLYYLSRTNTPSGTTTQSRLQFSQAGASDIRDQSRNWLPGPCYRQQRVSKTSADNNNSEYSWTGATKYHLNGRDSLVNPGPAMASHKDDEEKFFPQSGVLIFGKQGSEKTNVDIEKVMITDEEEIRTTNPVATEQYGSVSTNLQRGNRQAATADVNTQGVLPGMVWQDRDVYLQGPIWAKIPHTDGHFHPSPLMGGFGLKHPPPQILIKNTPVPANPSTTFSAAKFASFITQYSTGQVSVEIEWELQKENSKRWNPEIQYTSNYNKSVNVDFTVDTNGVYSEPRPIGTRYLTRNL

SEQ ID NO: 1526 - protein, 736 aa, Artificial Sequence
  Description of Artificial Sequence: Synthetic polypeptide
MAADGYLPDWLEDNLSEGIREWWDLKPGAPKPKANQQKQDDGRGLVLPGYKYLGPFNGLDKGEPVNAADAAALEHDKAYDQQLKAGDNPYLRYNHADAEFQERLQEDTSFGGNLGRAVFQAKKRVLEPFGLVEEGAKTAPGKKRPVEQSPQEPDSSSGIGKTGQQPAKKRLNFGQTGDSESVPDPQPLGEPPATPAAVGPTTMASGGGAPMADNNEGADGVGNASGNWHCDSTWLGDRVITTSTRTWALPTYNNHLYKQISSASTGASNDNHYFGYSTPWGYFDFNRFHCHFSPRDWQRLINNNWGFRPKRLNFKLFNVQVKEVTTNDGVTTIANNLTSTVQVFSDSEYQLPYVLGSAHQGCLPPFPADVFMIPQYGYLTLNNGSQAVGRSSFYCLEYFPSQMLRTGNNFTFSYTFEDVPFHSSYAHSQSLDRLMNPLIDQYLYYLNRTQDQSGSAQNKDLLFSRGSPAGMSVQPKNWLPGPCYRQQRVSKTKTDNNNSNFTWTGASKYNLNGRESIINPGTAMASHKDDKNKFFPMSGVMIFGKESAGASNTALDNVMITDEEEIKATNPVATERFGTVAVNLQSSSTDPATGDVHVMGALPGMVWQDRDVYLQGPIWAKIPHTDGHFHPSPLMGGFGLKNPPPQILIKNTPVPANPPAEFSATKFASFITQYSTGQVSVEIEWELQKENSKRWNPEVQYTSNYAKSANVDFTVDNNGLYTEPRPIGTRYLTRPL

SEQ ID NO: 1527 - protein, 737 aa, Artificial Sequence
  Description of Artificial Sequence: Synthetic polypeptide
MAADGYLPDWLEDTLSEGIRQWWKLKPGPPPPKPAERHKDDSRGLVLPGYKYLGPGNGLDKGEPVNAADAAALEHDKAYDQQLKAGDNPYLKYNHADAEFQERLKEDTSFGGNLGRAVFQAKKRVLEPLGLVEEGAKTAPGKKRPVEPSPQRSPDSSTGIGKKGQQPARKRLNFGQTGDSESVPDPQPLGEPPATPAAVGPTTMASGGGAPMADNNEGADGVGNASGNWHCDSTWLGDRVITTSTRTWALPTYNNHLYKQISSASTGASNDNHYFGYSTPWGYFDFNRFHCHFSPRDWQRLINNNWGFRPKRLNFKLFNIQVKEVTTNDGVTTIANNLTSTVQVFSDSEYQLPYVLGSAHQGCLPPFPADVFMIPQYGYLTLNNGSQAVGRSSFYCLEYFPSQMLRTGNNFTFSYTFEDVPFHSSYAHSQSLDRLMNPLIDQYLYYLNRTQNQSGSAQNKDLLFSRGSPAGMSVQPKNWLPGPCYRQQRVSKTKTDNNNSNFTWTGASKYNLNGRESIINPGTAMASHKDDKDKFFPMSGVMIFGKESAGASNTALDNVMITDEEEIKATNPVATERFGTVAVNLQSSSTDPATEDVHVMGALPGMVWQDRDVYLQGPIWAKIPHTDGHFHPSPLMGGFGLKNPPPQILIKNTPVPANPPAEFSATKFASFITQYSTGQVSVEIEWELQKENSKRWNPEVQYTSNYAKSANVDFTVDNNGLYTEPRPIGTRYLTRNL

SEQ ID NO: 1528 - protein, 736 aa, Artificial Sequence
  Description of Artificial Sequence: Synthetic polypeptide
MAADGYLPDWLEDNLSEGIREWWDLKPGAPKPKANQQKQDDGRGLVLPGYKYLGPFNGLDKGEPVNAADAAALEHDKAYDQQLKAGDNPYLRYNHADAEFQERLQEDTSFGGNLGRAVFQAKKRVLEPFGLVEEGAKTAPGKKRPVEQSPQEPDSSSGIGKTGQQPAKKRLNFGQTGDSESVPDPQPLGEPPATPAAVGPTTMASGGGAPMADNNEGADGVGNASGNWHCDSTWLGDRVITTSTRTWALPTYNNHLYKQISSASTGASNDNHYFGYSTPWGYFDFNRFHCHFSPRDWQRLINNNWGFRPKRLNFKLFNVQVKEVTTNDGVTTIANNLTSTVQVFSDSEYQLPYVLGSAHQGCLPPFPADVFMIPQYGYLTLNNGSQAVGRSSFYCLEYFPSQMLRTGNNFTFSYTFEDVPFHSSYAHSQSLDRLMNPLIDQYLYYLNRTQDQSGSAQNKDLLFSRGSPAGMSVQPKNWLPGPCYRQQRVSKTKTDNNNSNFTWTGASKYNLNGRESIINPGTAMASHKDDKNKFFPMSGVMIFGKESAGASNTALDNVMITDEEEIKATNPVATERFGTVAVNLQSSSTDPATGDVHVMGALPGMVWQDRDVYLQGPIWAKIPHTDGHFHPSPLMGGFGLKHPPPQILIKNTPVPANPPAEFSATKFASFITQYSTGQVSVEIEWELQKENSKRWNPEVQYTSNYAKSANVDFTVDNNGLYTEPRPIGTRYLTRPL

SEQ ID NO: 1529 - protein, 736 aa, Artificial Sequence
  Description of Artificial Sequence: Synthetic polypeptide
MAADGYLPDWLEDNLSEGIREWWDLKPGAPKPKANQQKQDDGRGLVLPGYKYLGPFNGLDKGEPVNAADAAALEHDKAYDQQLKAGDNPYLRYNHADAEFQERLQEDTSFGGNLGRAVFQAKKRVLEPFGLVEEGAKTAPGKKRPVEQSPQEPDSSSGIGKTGQQPAKKRLNFGQTGDSESVPDPQPLGEPPATPAAVGPTTMASGGGAPMADNNEGADGVGNASGNWHCDSTWLGDRVITTSTRTWALPTYNNHLYKQISSASTGASNDNHYFGYSTPWGYFDFNRFHCHFSPRDWQRLINNNWGFRPKRLNFKLFNVQVKEVTTNDGVTTIANNLTSTVQVFSDSEYQLPYVLGSAHQGCLPPFPADVFMIPQYGYLTLNNGSQAVGRSSFYCLEYFPSQMLRTGNNFTFSYTFEDVPFHSSYAHSQSLDRLMNPLIDQYLYYLNRTQDQSGSAQNKDLLFSRGSPAGMSVQPKNWLPGPCYRQQRVSKTKTDNNNSNFTWTGASKYNLNGRESIINPGTAMASHKDDKDKFFPMSGVMIFGKESAGASNTALDNVMITDEEEIKATNPVATERFGTVAVNLQSSSTDPATGDVHVMGALPGMVWQDRDVYLQGPIWAKIPHTDGHFHPSPLMGGFGLKHPPPQILIKNTPVPANPPAEFSATKFASFITQYSTGQVSVEIEWELQKENSKRWNPEVQYTSNYAKSANVDFTVDNNGLYTEPRPIGTRYLTRPL

SEQ ID NO: 1530 - protein, 736 aa, Artificial Sequence
  Description of Artificial Sequence: Synthetic polypeptide
MAADGYLPDWLEDNLSEGIREWWDLKPGAPKPKANQQKQDDGRGLVLPGYKYLGPFNGLDKGEPVNAADAAALEHDKAYDQQLKAGDNPYLRYNHADAEFQERLQEDTSFGGNLGRAVFQAKKRVLEPFGLVEEGAKTAPGKKRPVEQSPQEPDSSSGIGKTGQQPAKKRLNFGQTGDSESVPDPQPLGEPPATPAAVGPTTMASGGGAPMADNNEGADGVGNASGNWHCDSTWLGDRVITTSTRTWALPTYNNHLYKQISSASTGASNDNHYFGYSTPWGYFDFNRFHCHFSPRDWQRLINNNWGFRPKRLNFKLFNIQVKEVTTNDGVTTIANNLTSTVQVFSDSEYQLPYVLGSAHQGCLPPFPADVFMIPQYGYLTLNNGSQAVGRSSFYCLEYFPSQMLRTGNNFTFSYTFEDVPFHSSYAHSQSLDRLMNPLIDQYLYYLNRTQDQSGSAQNKDLLFSRGSPAGMSVQPKNWLPGPCYRQQRVSKTKTDNNNSNFTWTGASKYNLNGRESIINPGTAMASHKDDKNKFFPMSGVMIFGKESAGASNTALDNVMITDEEEIKATNPVATERFGTVAVNLQSSSTDPATGDVHVMGALPGMVWQDRDVYLQGPIWAKIPHTDGHFHPSPLMGGFGLKHPPPQILIKNTPVPANPPAEFSATKFASFITQYSTGQVSVEIEWELQKENSKRWNPEVQYTSNYAKSANVDFTVDNNGLYTEPRPIGTRYLTRPL

SEQ ID NO: 1531 - protein, 736 aa, Artificial Sequence
  Description of Artificial Sequence: Synthetic polypeptide
MAADGYLPDWLEDNLSEGIREWWDLKPGAPKPKANQQKQDDGRGLVLPGYKYLGPFNGLDKGEPVNAADAAALEHDKAYDQQLKAGDNPYLRYNHADAEFQERLQEDTSFGGNLGRAVFQAKKRVLEPFGLVEEGAKTAPGKKRPVEQSPQEPDSSSGIGKTGQQPAKKRLNFGQTGDSESVPDPQPLGEPPATPAAVGPTTMASGGGAPMADNNEGADGVGNASGNWHCDSTWLGDRVITTSTRTWALPTYNNHLYKQISSASTGASNDNHYFGYSTPWGYFDFNRFHCHFSPRDWQRLINNNWGFRPKRLNFKLFNVQVKEVTTNDGVTTIANNLTSTVQVFSDSEYQLPYVLGSAHQGCLPPFPADVFMIPQYGYLTLNNGSQAVGRSSFYCLEYFPSQMLRTGNNFTFSYTFEDVPFHSSYAHSQSLDRLMNPLIDQYLYYLNRTQNQSGSAQNKDLLFSRGSPAGMSVQPKNWLPGPCYRQQRVSKTKTDNNNSNFTWTGASKYNLNGRESIINPGTAMASHKDDKDKFFPMSGVMIFGKESAGASNTALDNVMITDEEEIKATNPVATERFGTVAVNLQSSSTDPATGDVHVMGALPGMVWQDRDVYLQGPIWAKIPHTDGHFHPSPLMGGFGLKHPPPQILIKNTPVPANPPAEFSATKFASFITQYSTGQVSVEIEWELQKENSKRWNPEVQYTSNYAKSANVDFTVDNNGLYTEPRPIGTRYLTRPL

SEQ ID NO: 1532 - protein, 736 aa, Artificial Sequence
  Description of Artificial Sequence: Synthetic polypeptide
MAADGYLPDWLEDNLSEGIREWWDLKPGAPKPKANQQKQDDGRGLVLPGYKYLGPFNGLDKGEPVNAADAAALEHDKAYDQQLKAGDNPYLRYNHADAEFQERLQEDTSFGGNLGRAVFQAKKRVLEPFGLVEEGAKTAPGKKRPVEQSPQEPDSSSGIGKTGQQPAKKRLNFGQTGDSESVPDPQPLGEPPATPAAVGPTTMASGGGAPMADNNEGADGVGNASGNWHCDSTWLGDRVITTSTRTWALPTYNNHLYKQISSASTGASNDNHYFGYSTPWGYFDFNRFHCHFSPRDWQRLINNNWGFRPKRLNFKLFNVQVKEVTTNDGVTTIANNLTSTVQVFSDSEYQLPYVLGSAHQGCLPPFPADVFMIPQYGYLTLNNGSQAVGRSSFYCLEYFPSQMLRTGNNFTFSYTFEDVPFHSSYAHSQSLDRLMNPLIDQYLYYLNRTQNQSGSAQNKDLLFSRGSPAGMSVQPKNWLPGPCYRQQRVSKTKTDNNNSNFTWTGASKYNLNGRESIINPGTAMASHKDDKNKFFPMSGVMIFGKESAGASNTALDNVMITDEEEIKATNPVATERFGTVAVNLQSSSTDPATGDVHVMGALPGMVWQDRDVYLQGPIWAKIPHTDGHFHPSPLMGGFGLKHPPPQILIKNTPVPANPPAEFSATKFASFITQYSTGQVSVEIEWELQKENSKRWNPEVQYTSNYAKSANVDFTVDNNGLYTEPRPIGTRYLTRPL

SEQ ID NO: 1533 - DNA, 2217 bp, Artificial Sequence
  Description of Artificial Sequence: Synthetic polynucleotide
atggctgccgatggttatcttccagattggctcgaggacaacctctctgagggcattcgcgagtggtgggacctgaaacctggagccccgaaacccaaagccaaccagcaaaagcaggacaacggccggggtctggtgcttcctggctacaagtacctcggacccttcaacggactcgacaagggggagcccgtcaacgcggcggacgcagcggccctcgagcacgacaaggcctacgaccagcagctccaagcgggtgacaatccgtacctgcggtataatcacgccgacgccgagtttcaggagcgtctgcaagaagatacgtcttttgggggcaacctcgggcgcgcagtcttccaggccaaaaagcgggttctcgaacctctgggcctggttgaatcgccggttaagacggctcctggaaagaagagaccggtagagccatcaccccagcgctctccagactcctctacgggcatcggcaagaaaggccagcagcccgcaaaaaagagactcaattttgggcagactggcgactcagagtcagtccccgaccctcaaccaatcggagaaccaccagcaggcccctctggtctgggatctggtacaatggctgcaggcggtggcgctccaatggcagacaataacgaaggcgccgacggagtgggtagttcctcaggaaattggcattgcgattccacatggctgggcgacagagtcatcaccaccagcacccgcacctgggccctgcccacctacaacaaccacctctacaagcaaatctccaacgggacctcgggaggaagcaccaacgacaacacctacttcggctacagcaccccctgggggtattttgacttcaacagattccactgccacttttcaccacgtgactggcagcgactcatcaacaacaactggggattccggcccaagaggctcaacttcaagctcttcaacatccaagtcaaggaggtcacgcagaatgaaggcaccaagaccatcgccaataaccttaccagcacgattcaggtctttacggactcggaataccagctcccgtacgtgctcggctcggcgcaccagggctgcctgcctccgttcccggcggacgtcttcatgattcctcagtacgggtacctgactctgaacaatggcagtcaggctgtgggccggtcgtccttctactgcctggagtactttccttctcaaatgctgagaacgggcaacaactttgaattcagctacaacttcgaggacgtgcccttccacagcagctacgcgcacagccagagcctggaccggctgatgaaccctctcatcgaccagtacttgtactacctgtcccggactcaaagcacgggcggtactgcaggaactcagcagttgctattttctcaggccgggcctaacaacatgtcggctcaggccaagaactggctacccggtccctgctaccggcagcaacgcgtctccacgacactgtcgcagaacaacaacagcaactttgcctggacgggtgccaccaagtatcatctgaatggcagagactctctggtgaatcctggcgttgccatggctacccacaaggacgacgaagagcgattttttccatccagcggagtcttaatgtttgggaaacagggagctggaaaagacaacgtggactatagcagcgtgatgctaaccagcgaggaagaaataaagaccaccaacccagtggccacagaacagtacggcgtggtggccgataacctgcaacagcaaaacgccgctcctattgtaggggccgtcaatagtcaaggagccttacctggcatggtgtggcagaaccgggacgtgtacctgcagggtcccatctgggccaagattcctcatacggacggcaactttcatccctcgccgctgatgggaggctttggactgaagcatccgcctcctcagatcctgattaaaaacacacctgttcccgcggatcctccgaccaccttcaatcaggccaagctggcttctttcatcacgcagtacagtaccggccaggtcagcgtggagatcgagtgggagctgcagaaggagaacagcaaacgctggaacccagagattcagtacacttccaactactacaaatctacaaatgtggactttgctgtcaatactgagggtacttattccgagcctcgccccattggcacccgttacctcacccgtaatctgtaa

SEQ ID NO: 1534 - protein, 738 aa, Artificial Sequence
  Description of Artificial Sequence: Synthetic polypeptide
MAADGYLPDWLEDNLSEGIREWWDLKPGAPKPKANQQKQDNGRGLVLPGYKYLGPFNGLDKGEPVNAADAAALEHDKAYDQQLQAGDNPYLRYNHADAEFQERLQEDTSFGGNLGRAVFQAKKRVLEPLGLVESPVKTAPGKKRPVEPSPQRSPDSSTGIGKKGQQPAKKRLNFGQTGDSESVPDPQPIGEPPAGPSGLGSGTMAAGGGAPMADNNEGADGVGSSSGNWHCDSTWLGDRVITTSTRTWALPTYNNHLYKQISNGTSGGSTNDNTYFGYSTPWGYFDFNRFHCHFSPRDWQRLINNNWGFRPKRLNFKLFNIQVKEVTQNEGTKTIANNLTSTIQVFTDSEYQLPYVLGSAHQGCLPPFPADVFMIPQYGYLTLNNGSQAVGRSSFYCLEYFPSQMLRTGNNFEFSYNFEDVPFHSSYAHSQSLDRLMNPLIDQYLYYLSRTQSTGGTAGTQQLLFSQAGPNNMSAQAKNWLPGPCYRQQRVSTTLSQNNNSNFAWTGATKYHLNGRDSLVNPGVAMATHKDDEERFFPSSGVLMFGKQGAGKDNVDYSSVMLTSEEEIKTTNPVATEQYGVVADNLQQQNAAPIVGAVNSQGALPGMVWQNRDVYLQGPIWAKIPHTDGNFHPSPLMGGFGLKHPPPQILIKNTPVPADPPTTFNQAKLASFITQYSTGQVSVEIEWELQKENSKRWNPEIQYTSNYYKSTNVDFAVNTEGTYSEPRPIGTRYLTRNL

SEQ ID NO: 1535 - protein, 738 aa, Artificial Sequence; identical to SEQ ID NO: 1534
  Description of Artificial Sequence: Synthetic polypeptide

SEQ ID NO: 1536 - DNA, 4472 bp, Artificial Sequence
  Description of Artificial Sequence: Synthetic polynucleotide
ctccatcactaggggtaaccgcgaagcgcctcccacgctgccgcgtcagcgctgacgtaaattacgtcataggggagtggtcctgtattagctgtcacgtgagtgcttttgcgacattttgcgacaccacgtggccattcatggtatatatggccgagtgagcgagcaggatctccattttgaccgcgaaatttgaacgagcagcagccatgccgggcttctacgagatcgtgcttaaggtgccgagcgacctggacgagcacctgccgggcatttctgactcgtttgtgaactgggtggcagagaaggaatgggagctgcccccggattctgacatggatcggaatctgattgagcaggcacccctgaccgtggccgagaagctacagcgcgacttcctggtccaatggcgccgcgtgagtaaggccccggaggccctcttctttgttcagttcgagaagggcgagtcctacttccacctccatattctggtagagaccacgggggtcaaatccatggtgctgggccgcttcctgagtcagattcgggacaagctggtgcagaccatctaccgcgggatcgagccgaccctgcccaactggttcgcggtgacaaagacgcgtaatggcgccggaggggggaacaaggtggtggacgagtgctacatccccaactacctgctgcccaagactcagcccgagctgcagtgggcgtggactaacatggaggagtatataagcgcgtgcttgaacctggccgagcgcaaacggctcgtggcgcagcacctgacccacgtcagccagacccaggagcagaacaaggagaatctgaacccgaattctgacgcgcctgtcatccggtcaaaaacctccgcgcgctacatggagctggtcgggtggctggtggaccggggcatcacctccgagaagcagtggatccaggaggaccaggcctcgtacatctccttcaacgccgcctccaactcgcggtctcagatcaaggccgcgctggacaatgccggcaagatcatggcgctgaccaaatccgcgcccgactacctggtaggccccgctctgcccgcggacattaaatccaaccgcatctaccgcatcctggagctgaatggctacgaccctgcctacgccggttccgtctttctcggctgggcccagaaaaagtttggcaaaaggaacaccatctggctgtttgggccggccaccacgggcaagaccaacatcgcggaagccatcgcccacgccgtgcccttctacggctgcgtcaactggaccaatgagaactttcccttcaacgattgcgtcgacaagatggtgatctggtgggaggagggcaagatgacggccaaggtcgtggagtccgccaaggccattctcggcggcagcaaggtgcgcgtggaccaaaagtgcaagtcgtccgcccagatcgatcccacccccgtgatcgtcacctccaacaccaacatgtgcgccgtgattgacgggaacagcaccaccttcgagcaccagcagccgttgcaggaccggatgttcaaatttgaacttacccgccgtctggagcacgactttggcaaggtgacaaagcaggaagtcaaagagttcttccgctgggcgcaggatcacgtgaccgaggtggcgcatgagttctacgtcagaaagggtggagctaacaaaagacccgcccccgatgacgcggatataagcgagcccaagcgggcctgcccctcagtcgcggatccatcgacgtcagacgcggaaggagctccggtggactttgccgacaggtaccaaaacaaatgttctcgtcacgcgggcatgcttcagatgctgtttccctgcaaaacatgcgagagaatgaatcagaatttcaacatttgcttcacgcacgggaccagagactgttcagaatgtttccctggcgtgtcagaatctcaaccggtcgtcagaaaaaagacgtatcggaaactctgtgcgattcatcatctgctggggcgggcacccgagattgcttgctcggcctgcgacctggtcaacgtggacctggatgactgtgtttctgagcaataaatgacttaaaccaggtatggctgccgatggttatcttccagattggctcgaggacaacctctctgagggcattcgcgagtggtgggacctgaaacctggagccccgaaacccaaagccaaccagcaaaagcaggacaacggccggggtctggtgcttcctggctacaagtacctcggacccttcaacggactcgacaagggggagcccgtcaacgcggcggacgcagcggccctcgagcacgacaaggcctacgaccagcagctccaagcgggtgacaatccgtacctgcggtataatcacgccgacgccgagtttcaggagcgtctgcaagaagatacgtcttttgggggcaacctcgggcgcgcagtcttccaggccaaaaagcgggttctcgaacctctgggcctggttgaatcgccggttaagacggctcctggaaagaagagaccggtagagccatcaccccagcgctctccagactcctctacgggcatcggcaagaaaggccagcagcccgcaaaaaagagactcaattttgggcagactggcgactcagagtcagtccccgaccctcaaccaatcggagaaccaccagcaggcccctctggtctgggatctggtacaatggctgcaggcggtggcgctccaatggcagacaataacgaaggcgccgacggagtgggtagttcctcaggaaattggcattgcgattccacatggctgggcgacagagtcatcaccaccagcacccgcacctgggccctgcccacctacaacaaccacctctacaagcaaatctccaacgggacctcgggaggaagcaccaacgacaacacctacttcggctacagcaccccctgggggtattttgacttcaacagattccactgccacttttcaccacgtgactggcagcgactcatcaacaacaactggggattccggcccaagaggctcaacttcaagctcttcaacatccaagtcaaggaggtcacgcagaatgaaggcaccaagaccatcgccaataaccttaccagcacgattcaggtctttacggactcggaataccagctcccgtacgtgctcggctcggcgcaccagggctgcctgcctccgttcccggcggacgtcttcatgattcctcagtacgggtacctgactctgaacaatggcagtcaggctgtgggccggtcgtccttctactgcctggagtactttccttctcaaatgctgagaacgggcaacaactttgaattcagctacaacttcgaggacgtgcccttccacagcagctacgcgcacagccagagcctggaccggctgatgaaccctctcatcgaccagtacttgtactacctgtcccggactcaaagcacgggcggtactgcaggaactcagcagttgctattttctcaggccgggcctaacaacatgtcggctcaggccaagaactggctacccggtccctgctaccggcagcaacgcgtctccacgacactgtcgcagaacaacaacagcaactttgcctggacgggtgccaccaagtatcatctgaatggcagagactctctggtgaatcctggcgttgccatggctacccacaaggacgacgaagagcgattttttccatccagcggagtcttaatgtttgggaaacagggagctggaaaagacaacgtggactatagcagcgtgatgctaaccagcgaggaagaaataaagaccaccaacccagtggccacagaacagtacggcgtggtggccgataacctgcaacagcaaaacgccgctcctattgtaggggccgtcaatagtcaaggagccttacctggcatggtgtggcagaaccgggacgtgtacctgcagggtcccatctgggccaagattcctcatacggacggcaactttcatccctcgccgctgatgggaggctttggactgaagcatccgcctcctcagatcctgattaaaaacacacctgttcccgcggatcctccgaccaccttcaatcaggccaagctggcttctttcatcacgcagtacagtaccggccaggtcagcgtggagatcgagtgggagctgcagaaggagaacagcaaacgctggaacccagagattcagtacacttccaactactacaaatctacaaatgtggactttgctgtcaatactgagggtacttattccgagcctcgccccattggcacccgttacctcacccgtaatctgtaattacatgttaatcaataaaccggttaattcgtttcagttgaactttggtctcctgtccttcttatcttatcggttaccatagaaactggttacttattaactgcttggtgcgcttcgcgataaaagacttacgtcatcgggttacccctagtgatgga

SEQ ID NO: 1537 - protein, 738 aa, Artificial Sequence
  Description of Artificial Sequence: Synthetic polypeptide
MAADGYLPDWLEDNLSEGIREWWDLKPGAPKPKANQQKQDNGRGLVLPGYKYLGPFNGLDKGEPVNAADAAALEHDKAYDQQLQAGDNPYLRYNHADAEFQERLQEDTSFGGNLGRAVFQAKKRVLEPLGLVESPVKTAPGKKRPVEPSPQRSPDSSTGIGKKGQQPAKKRLNFGQTGDSESVPDPQPIGEPPAAPSGVGPNTMAAGGGAPMADNNEGADGVGSSSGNWHCDSTWLGDRVITTSTRTWALPTYNNHLYKQISNGTSGGSTNDNTYFGYSTPWGYFDFNRFHCHFSPRDWQRLINNNWGFRPKRLNFKLFNIQVKEVTQNEGTKTIANNLTSTIQVFTDSEYQLPYVLGSAHQGCLPPFPADVFMIPQYGYLTLNNGSQAVGRSSFYCLEYFPSQMLRTGNNFEFSYNFEDVPFHSSYAHSQSLDRLMNPLIDQYLYYLSRTQSTGGTAGTQQLLFSQAGPNNMSAQAKNWLPGPCYRQQRVSTTLSQNNNSNFAWTGATKYHLNGRDSLVNPGVAMATHKDDEERFFPSSGVLMFGKQGAGKDNVDYSSVMLTSEEEIKTTNPVATEQYGVVADNLQQQNAAPIVGAVNSQGALPGMVWQNRDVYLQGPIWAKIPHTDGNFHPSPLMGGFGLKHPPPQILIKNTPVPADPPTTFNQAKLASFITQYSTGQVSVEIEWELQKENSKRWNPEIQYTSNYYKSTNVDFAVNTEGTYSEPRPIGTRYLTRNL

SEQ ID NO: 1538 - protein, 738 aa, Artificial Sequence
  Description of Artificial Sequence: Synthetic polypeptide
MAADGYLPDWLEDNLSEGIREWWDLKPGAPKPKANQQRQDNGRGLVLPGYRYLGPFNGLDKGEPVNAADAAALEHDRAYDQQLQAGDNPYLRYNHADAEFQERLQEDTSFGGNLGRAVFQAKKRVLEPLGLVESPVRTAPGKKRPVEPSPQRSPDSSTGIGKKGQQPARKRLNFGQTGDSESVPDPQPIGEPPAAPSGVGPNTMAAGGGAPMADNNEGADGVGSSSGNWHCDSTWLGDRVITTSTRTWALPTYNNHLYRQISNGTSGGSTNDNTYFGYSTPWGYFDFNRFHCHFSPRDWQRLINNNWGFRPKRLNFKLFNIQVKEVTQNEGTRTIANNLTSTIQVFTDSEYQLPYVLGSAHQGCLPPFPADVFMIPQYGYLTLNNGSQAVGRSSFYCLEYFPSQMLRTGNNFEFSYNFEDVPFHSSYAHSQSLDRLMNPLIDQYLYYLSRTQSTGGTAGTQQLLFSQAGPNNMSAQAKNWLPGPCYRQQRVSTTLSQNNNSNFAWTGATKYHLNGRDSLVNPGVAMATHRDDEERFFPSSGVLMFGRQGAGRDNVDYSSVMLTSEEEIRTTNPVATEQYGVVADNLQQQNAAPIVGAVNSQGALPGMVWQNRDVYLQGPIWAKIPHTDGNFHPSPLMGGFGLKHPPPQILIKNTPVPADPPTTFNQAKLASFITQYSTGQVSVEIEWELQKENSKRWNPEIQYTSNYYKSTNVDFAVNTEGTYSEPRPIGTRYLTRNL

SEQ ID NO: 1539 - protein, 738 aa, Artificial Sequence
  Description of Artificial Sequence: Synthetic polypeptide
MAADGYLPDWLEDNLSEGIREWWDLKPGAPKPKANQQRQDNGRGLVLPGYRYLGPFNGLDKGEPVNAADAAALEHDRAYDQQLQAGDNPYLRYNHADAEFQERLQEDTSFGGNLGRAVFQAKKRVLEPLGLVESPVRTAPGKKRPVEPSPQRSPDSSTGIGKRGQQPARKRLNFGQTGDSESVPDPQPIGEPPAAPSGVGPNTMAAGGGAPMADNNEGADGVGSSSGNWHCDSTWLGDRVITTSTRTWALPTYNNHLYRQISNGTSGGSTNDNTYFGYSTPWGYFDFNRFHCHFSPRDWQRLINNNWGFRPKRLNFKLFNIQVKEVTQNEGTRTIANNLTSTIQVFTDSEYQLPYVLGSAHQGCLPPFPADVFMIPQYGYLTLNNGSQAVGRSSFYCLEYFPSQMLRTGNNFEFSYNFEDVPFHSSYAHSQSLDRLMNPLIDQYLYYLSRTQSTGGTAGTQQLLFSQAGPNNMSAQAKNWLPGPCYRQQRVSTTLSQNNNSNFAWTGATKYHLNGRDSLVNPGVAMATHRDDEERFFPSSGVLMFGKQGAGRDNVDYSSVMLTSEEEIRTTNPVATEQYGVVADNLQQQNAAPIVGAVNSQGALPGMVWQNRDVYLQGPIWAKIPHTDGNFHPSPLMGGFGLKHPPPQILIKNTPVPADPPTTFNQAKLASFITQYSTGQVSVEIEWELQKENSKRWNPEIQYTSNYYKSTNVDFAVNTEGTYSEPRPIGTRYLTRNL

SEQ ID NO: 1540 - protein, 738 aa, Artificial Sequence
  Description of Artificial Sequence: Synthetic polypeptide
MAADGYLPDWLEDNLSEGIREWWDLKPGAPKPKANQQRQDNGRGLVLPGYRYLGPFNGLDKGEPVNAADAAALEHDRAYDQQLQAGDNPYLRYNHADAEFQERLQEDTSFGGNLGRAVFQAKKRVLEPLGLVESPVRTAPGKKRPVEPSPQRSPDSSTGIGKRGQQPAKKRLNFGQTGDSESVPDPQPIGEPPAAPSGVGPNTMAAGGGAPMADNNEGADGVGSSSGNWHCDSTWLGDRVITTSTRTWALPTYNNHLYRQISNGTSGGSTNDNTYFGYSTPWGYFDFNRFHCHFSPRDWQRLINNNWGFRPKRLNFKLFNIQVKEVTQNEGTRTIANNLTSTIQVFTDSEYQLPYVLGSAHQGCLPPFPADVFMIPQYGYLTLNNGSQAVGRSSFYCLEYFPSQMLRTGNNFEFSYNFEDVPFHSSYAHSQSLDRLMNPLIDQYLYYLSRTQSTGGTAGTQQLLFSQAGPNNMSAQAKNWLPGPCYRQQRVSTTLSQNNNSNFAWTGATKYHLNGRDSLVNPGVAMATHRDDEERFFPSSGVLMFGRQGAGRDNVDYSSVMLTSEEEIRTTNPVATEQYGVVADNLQQQNAAPIVGAVNSQGALPGMVWQNRDVYLQGPIWAKIPHTDGNFHPSPLMGGFGLKHPPPQILIKNTPVPADPPTTFNQAKLASFITQYSTGQVSVEIEWELQKENSKRWNPEIQYTSNYYKSTNVDFAVNTEGTYSEPRPIGTRYLTRNL

SEQ ID NO: 1541 - protein, 738 aa, Artificial Sequence
  Description of Artificial Sequence: Synthetic polypeptide
MAADGYLPDWLEDNLSEGIREWWDLKPGAPKPKANQQRQDNGRGLVLPGYRYLGPFNGLDKGEPVNAADAAALEHDRAYDQQLQAGDNPYLRYNHADAEFQERLQEDTSFGGNLGRAVFQAKKRVLEPLGLVESPVRTAPGKKRPVEPSPQRSPDSSTGIGKRGQQPAKKRLNFGQTGDSESVPDPQPIGEPPAAPSGVGPNTMAAGGGAPMADNNEGADGVGSSSGNWHCDSTWLGDRVITTSTRTWALPTYNNHLYRQISNGTSGGSTNDNTYFGYSTPWGYFDFNRFHCHFSPRDWQRLINNNWGFRPKRLNFKLFNIQVKEVTQNEGTRTIANNLTSTIQVFTDSEYQLPYVLGSAHQGCLPPFPADVFMIPQYGYLTLNNGSQAVGRSSFYCLEYFPSQMLRTGNNFEFSYNFEDVPFHSSYAHSQSLDRLMNPLIDQYLYYLSRTQSTGGTAGTQQLLFSQAGPNNMSAQAKNWLPGPCYRQQRVSTTLSQNNNSNFAWTGATKYHLNGRDSLVNPGVAMATHRDDEERFFPSSGVLMFGKQGAGRDNVDYSSVMLTSEEEIRTTNPVATEQYGVVADNLQQQNAAPIVGAVNSQGALPGMVWQNRDVYLQGPIWAKIPHTDGNFHPSPLMGGFGLKHPPPQILIKNTPVPADPPTTFNQARLASFITQYSTGQVSVEIEWELQKENSKRWNPEIQYTSNYYKSTNVDFAVNTEGTYSEPRPIGTRYLTRNL

SEQ ID NO: 1542 - protein, 738 aa, Artificial Sequence
  Description of Artificial Sequence: Synthetic polypeptide
MAADGYLPDWLEDNLSEGIREWWDLKPGAPKPKANQQRQDNGRGLVLPGYRYLGPFNGLDKGEPVNAADAAALEHDRAYDQQLQAGDNPYLRYNHADAEFQERLQEDTSFGGNLGRAVFQAKKRVLEPLGLVESPVRTAPGKKRPVEPSPQRSPDSSTGIGKKGQQPAKKRLNFGQTGDSESVPDPQPIGEPPAAPSGVGPNTMAAGGGAPMADNNEGADGVGSSSGNWHCDSTWLGDRVITTSTRTWALPTYNNHLYRQISNGTSGGSTNDNTYFGYSTPWGYFDFNRFHCHFSPRDWQRLINNNWGFRPKRLNFKLFNIQVKEVTQNEGTRTIANNLTSTIQVFTDSEYQLPYVLGSAHQGCLPPFPADVFMIPQYGYLTLNNGSQAVGRSSFYCLEYFPSQMLRTGNNFEFSYNFEDVPFHSSYAHSQSLDRLMNPLIDQYLYYLSRTQSTGGTAGTQQLLFSQAGPNNMSAQAKNWLPGPCYRQQRVSTTLSQNNNSNFAWTGATKYHLNGRDSLVNPGVAMATHRDDEERFFPSSGVLMFGRQGAGRDNVDYSSVMLTSEEEIRTTNPVATEQYGVVADNLQQQNAAPIVGAVNSQGALPGMVWQNRDVYLQGPIWAKIPHTDGNFHPSPLMGGFGLKHPPPQILIKNTPVPADPPTTFNQARLASFITQYSTGQVSVEIEWELQKENSKRWNPEIQYTSNYYKSTNVDFAVNTEGTYSEPRPIGTRYLTRNL

SEQ ID NO: 1543 - DNA, 2214 bp, Artificial Sequence
  Description of Artificial Sequence: Synthetic polynucleotide
atggctgccgatggttatcttccagattggctcgaggacaacctctctgagggcattcgcgagtggtgggacctgaaacctggagccccgaaacccaaagccaaccagcaaaagcaggacaacggccggggtctggtgcttcctggctacaagtacctcggacccttcaacggactcgacaagggggagcccgtcaacgcggcggacgcagcggccctcgagcacgacaaggcctacgaccagcagctccaagcgggtgacaatccgtacctgcggtataatcacgccgacgccgagtttcaggagcgtctgcaagaagatacgtcttttgggggcaacctcgggcgcgcagtcttccaggccaaaaagcgggttctcgaacctctgggcctggttgaatcgccggttaagacggctcctggaaagaagagaccggtagagccatcaccccagcgctctccagactcctctacgggcatcggcaagaaaggccagcagcccgcaaaaaagagactcaattttgggcagactggcgactcagagtcagtccccgaccctcaaccaatcggagaaccaccagcagccccctctggtgtgggacctaatacaatggctgcaggcggtggcgctccaatggcagacaataacgaaggcgccgacggagtgggtagttcctcaggaaattggcattgcgattccacatggctgggcgacagagtcatcaccaccagcacccgcacctgggccctgcccacctacaacaaccacctctacaagcaaatctccaacgggacctcgggaggaagcaccaacgacaacacctacttcggctacagcaccccctgggggtattttgacttcaacagattccactgccacttttcaccacgtgactggcagcgactcatcaacaacaactggggattccggcccaagaggctcaacttcaagctcttcaacatccaagtcaaggaggtcacgcagaatgaaggcaccaagaccatcgccaataaccttaccagcacgattcaggtctttacggactcggaataccagctcccgtacgtgctcggctcggcgcaccagggctgcctgcctccgttcccggcggacgtcttcatgattcctcagtacgggtacctgactctgaacaatggcagtcaggctgtgggccggtcgtccttctactgcctggagtactttccttctcaaatgctgagaacgggcaacaactttgaattcagctacaacttcgaggacgtgcccttccacagcagctacgcgcacagccagagcctggaccggctgatgaaccctctcatcgaccagtacttgtactacctgtcccggactcaaagcacgggcggtactgcaggaactcagcagttgctattttctcaggccgggcctaacaacatgtcggctcaggccaagaactggctacccggtccctgctaccggcagcaacgcgtctccacgacactgtcgcagaacaacaacagcaactttgcctggacgggtgccaccaagtatcatctgaatggcagagactctctggtgaatcctggcgttgccatggctacccacaaggacgacgaagagcgattttttccatccagcggagtcttaatgtttgggaaacagggagctggaaaagacaacgtggactatagcagcgtgatgctaaccagcgaggaagaaataaagaccaccaacccagtggccacagaacagtacggcgtggtggccgataacctgcaacagcaaaacgccgctcctattgtaggggccgtcaatagtcaaggagccttacctggcatggtgtggcagaaccgggacgtgtacctgcagggtcccatctgggccaagattcctcatacggacggcaactttcatccctcgccgctgatgggaggctttggactgaagcatccgcctcctcagatcctgattaaaaacacacctgttcccgcggatcctccgaccaccttcaatcaggccaagctggcttctttcatcacgcagtacagtaccggccaggtcagcgtggagatcgagtgggagctgcagaaggagaacagcaaacgctggaacccagagattcagtacacttccaactactacaaatctacaaatgtggactttgctgtcaatactgagggtacttattccgagcctcgccccattggcacccgttacctcacccgtaatctg

SEQ ID NO: 1544 - DNA, 2217 bp, Artificial Sequence
  Description of Artificial Sequence: Synthetic polynucleotide
atggctgccgatggttatcttccagattggctcgaggacaacctctctgagggcattcgcgagtggtgggacctgaaacctggagccccgaaacccaaagccaaccagcaaaggcaggacaacggccggggtctggtgcttcctggctacaggtacctcggacccttcaacggactcgacaagggggagcccgtcaacgcggcggacgcagcggccctcgagcacgacagggcctacgaccagcagctccaagcgggtgacaatccgtacctgcggtataatcacgccgacgccgagtttcaggagcgtctgcaagaagatacgtcttttgggggcaacctcgggcgcgcagtcttccaggccaaaaagcgggttctcgaacctctgggcctggttgaatcgccggttaggacggctcctggaaagaagagaccggtagagccatcaccccagcgctctccagactcctctacgggcatcggcaagaaaggccagcagcccgcaagaaagagactcaattttgggcagactggcgactcagagtcagtccccgaccctcaaccaatcggagaaccaccagcagccccctctggtgtgggacctaatacaatggctgcaggcggtggcgctccaatggcagacaataacgaaggcgccgacggagtgggtagttcctcaggaaattggcattgcgattccacatggctgggcgacagagtcatcaccaccagcacccgcacctgggccctgcccacctacaacaaccacctctacaggcaaatctccaacgggacctcgggaggaagcaccaacgacaacacctacttcggctacagcaccccctgggggtattttgacttcaacagattccactgccacttttcaccacgtgactggcagcgactcatcaacaacaactggggattccggcccaagaggctcaacttcaagctcttcaacatccaagtcaaggaggtcacgcagaatgaaggcaccaggaccatcgccaataaccttaccagcacgattcaggtctttacggactcggaataccagctcccgtacgtgctcggctcggcgcaccagggctgcctgcctccgttcccggcggacgtcttcatgattcctcagtacgggtacctgactctgaacaatggcagtcaggctgtgggccggtcgtccttctactgcctggagtactttccttctcaaatgctgagaacgggcaacaactttgaattcagctacaacttcgaggacgtgcccttccacagcagctacgcgcacagccagagcctggaccggctgatgaaccctctcatcgaccagtacttgtactacctgtcccggactcaaagcacgggcggtactgcaggaactcagcagttgctattttctcaggccgggcctaacaacatgtcggctcaggccaagaactggctacccggtccctgctaccggcagcaacgcgtctccacgacactgtcgcagaacaacaacagcaactttgcctggacgggtgccaccaagtatcatctgaatggcagagactctctggtgaatcctggcgttgccatggctacccacagggacgacgaagagcgattttttccatccagcggagtcttaatgtttgggagacagggagctggaagagacaacgtggactatagcagcgtgatgctaaccagcgaggaagaaataaggaccaccaacccagtggccacagaacagtacggcgtggtggccgataacctgcaacagcaaaacgccgctcctattgtaggggccgtcaatagtcaaggagccttacctggcatggtgtggcagaaccgggacgtgtacctgcagggtcccatctgggccaagattcctcatacggacggcaactttcatccctcgccgctgatgggaggctttggactgaagcatccgcctcctcagatcctgattaaaaacacacctgttcccgcggatcctccgaccaccttcaatcaggccaagctggcttctttcatcacgcagtacagtaccggccaggtcagcgtggagatcgagtgggagctgcagaaggagaacagcaaacgctggaacccagagattcagtacacttccaactactacaaatctacaaatgtggactttgctgtcaatactgagggtacttattccgagcctcgccccattggcacccgttacctcacccgtaatctgtaa

SEQ ID NO: 1545 - DNA, 2217 bp, Artificial Sequence
  Description of Artificial Sequence: Synthetic polynucleotide
atggctgccgatggttatcttccagattggctcgaggacaacctctctgagggcattcgcgagtggtgggacctgaaacctggagccccgaaacccaaagccaaccagcaaaggcaggacaacggccggggtctggtgcttcctggctacaggtacctcggacccttcaacggactcgacaagggggagcccgtcaacgcggcggacgcagcggccctcgagcacgacagggcctacgaccagcagctccaagcgggtgacaatccgtacctgcggtataatcacgccgacgccgagtttcaggagcgtctgcaagaagatacgtcttttgggggcaacctcgggcgcgcagtcttccaggccaaaaagcgggttctcgaacctctgggcctggttgaatcgccggttaggacggctcctggaaagaagagaccggtagagccatcaccccagcgctctccagactcctctacgggcatcggcaagagaggccagcagcccgcaagaaagagactcaattttgggcagactggcgactcagagtcagtccccgaccctcaaccaatcggagaaccaccagcagccccctctggtgtgggacctaatacaatggctgcaggcggtggcgctccaatggcagacaataacgaaggcgccgacggagtgggtagttcctcaggaaattggcattgcgattccacatggctgggcgacagagtcatcaccaccagcacccgcacctgggccctgcccacctacaacaaccacctctacaggcaaatctccaacgggacctcgggaggaagcaccaacgacaacacctacttcggctacagcaccccctgggggtattttgacttcaacagattccactgccacttttcaccacgtgactggcagcgactcatcaacaacaactggggattccggcccaagaggctcaacttcaagctcttcaacatccaagtcaaggaggtcacgcagaatgaaggcaccaggaccatcgccaataaccttaccagcacgattcaggtctttacggactcggaataccagctcccgtacgtgctcggctcggcgcaccagggctgcctgcctccgttcccggcggacgtcttcatgattcctcagtacgggtacctgactctgaacaatggcagtcaggctgtgggccggtcgtccttctactgcctggagtactttccttctcaaatgctgagaacgggcaacaactttgaattcagctacaacttcgaggacgtgcccttccacagcagctacgcgcacagccagagcctggaccggctgatgaaccctctcatcgaccagtacttgtactacctgtcccggactcaaagcacgggcggtactgcaggaactcagcagttgctattttctcaggccgggcctaacaacatgtcggctcaggccaagaactggctacccggtccctgctaccggcagcaacgcgtctccacgacactgtcgcagaacaacaacagcaactttgcctggacgggtgccaccaagtatcatctgaatggcagagactctctggtgaatcctggcgttgccatggctacccacagggacgacgaagagcgattttttccatccagcggagtcttaatgtttgggaaacagggagctggaagagacaacgtggactatagcagcgtgatgctaaccagcgaggaagaaataaggaccaccaacccagtggccacagaacagtacggcgtggtggccgataacctgcaacagcaaaacgccgctcctattgtaggggccgtcaatagtcaaggagccttacctggcatggtgtggcagaaccgggacgtgtacctgcagggtcccatctgggccaagattcctcatacggacggcaactttcatccctcgccgctgatgggaggctttggactgaagcatccgcctcctcagatcctgattaaaaacacacctgttcccgcggatcctccgaccaccttcaatcaggccaagctggcttctttcatcacgcagtacagtaccggccaggtcagcgtggagatcgagtgggagctgcagaaggagaacagcaaacgctggaacccagagattcagtacacttccaactactacaaatctacaaatgtggactttgctgtcaatactgagggtacttattccgagcctcgccccattggcacccgttacctcacccgtaatctgtaa

SEQ ID NO: 1546 - DNA, 2217 bp, Artificial Sequence
  Description of Artificial Sequence: Synthetic polynucleotide
atggctgccgatggttatcttccagattggctcgaggacaacctctctgagggcattcgcgagtggtgggacctgaaacctggagccccgaaacccaaagccaaccagcaaaggcaggacaacggccggggtctggtgcttcctggctacaggtacctcggacccttcaacggactcgacaagggggagcccgtcaacgcggcggacgcagcggccctcgagcacgacagggcctacgaccagcagctccaagcgggtgacaatccgtacctgcggtataatcacgccgacgccgagtttcaggagcgtctgcaagaagatacgtcttttgggggcaacctcgggcgcgcagtcttccaggccaaaaagcgggttctcgaacctctgggcctggttgaatcgccggttaggacggctcctggaaagaagagaccggtagagccatcaccccagcgctctccagactcctctacgggcatcggcaagagaggccagcagcccgcaaaaaagagactcaattttgggcagactggcgactcagagtcagtccccgaccctcaaccaatcggagaaccaccagcagccccctctggtgtgggacctaatacaatggctgcaggcggtggcgctccaatggcagacaataacgaaggcgccgacggagtgggtagttcctcaggaaattggcattgcgattccacatggctgggcgacagagtcatcaccaccagcacccgcacctgggccctgcccacctacaacaaccacctctacaggcaaatctccaacgggacctcgggaggaagcaccaacgacaacacctacttcggctacagcaccccctgggggtattttgacttcaacagattccactgccacttttcaccacgtgactggcagcgactcatcaacaacaactggggattccggcccaagaggctcaacttcaagctcttcaacatccaagtcaaggaggtcacgcagaatgaaggcaccaggaccatcgccaataaccttaccagcacgattcaggtctttacggactcggaataccagctcccgtacgtgctcggctcggcgcaccagggctgcctgcctccgttcccggcggacgtcttcatgattcctcagtacgggtacctgactctgaacaatggcagtcaggctgtgggccggtcgtccttctactgcctggagtactttccttctcaaatgctgagaacgggcaacaactttgaattcagctacaacttcgaggacgtgcccttccacagcagctacgcgcacagccagagcctggaccggctgatgaaccctctcatcgaccagtacttgtactacctgtcccggactcaaagcacgggcggtactgcaggaactcagcagttgctattttctcaggccgggcctaacaacatgtcggctcaggccaagaactggctacccggtccctgctaccggcagcaacgcgtctccacgacactgtcgcagaacaacaacagcaactttgcctggacgggtgccaccaagtatcatctgaatggcagagactctctggtgaatcctggcgttgccatggctacccacagggacgacgaagagcgattttttccatccagcggagtcttaatgtttgggagacagggagctggaagagacaacgtggactatagcagcgtgatgctaaccagcgaggaagaaataaggaccaccaacccagtggccacagaacagtacggcgtggtggccgataacctgcaacagcaaaacgccgctcctattgtaggggccgtcaatagtcaaggagccttacctggcatggtgtggcagaaccgggacgtgtacctgcagggtcccatctgggccaagattcctcatacggacggcaactttcatccctcgccgctgatgggaggctttggactgaagcatccgcctcctcagatcctgattaaaaacacacctgttcccgcggatcctccgaccaccttcaatcaggccaagctggcttctttcatcacgcagtacagtaccggccaggtcagcgtggagatcgagtgggagctgcagaaggagaacagcaaacgctggaacccagagattcagtacacttccaactactacaaatctacaaatgtggactttgctgtcaatactgagggtacttattccgagcctcgccccattggcacccgttacctcacccgtaatctgtaa

SEQ ID NO: 1547 - DNA, 2217 bp, Artificial Sequence
  Description of Artificial Sequence: Synthetic polynucleotide
atggctgccgatggttatcttccagattggctcgaggacaacctctctgagggcattcgcgagtggtgggacctgaaacctggagccccgaaacccaaagccaaccagcaaaggcaggacaacggccggggtctggtgcttcctggctacaggtacctcggacccttcaacggactcgacaagggggagcccgtcaacgcggcggacgcagcggccctcgagcacgacagggcctacgaccagcagctccaagcgggtgacaatccgtacctgcggtataatcacgccgacgccgagtttcaggagcgtctgcaagaagatacgtcttttgggggcaacctcgggcgcgcagtcttccaggccaaaaagcgggttctcgaacctctgggcctggttgaatcgccggttaggacggctcctggaaagaagagaccggtagagccatcaccccagcgctctccagactcctctacgggcatcggcaagagaggccagcagcccgcaaaaaagagactcaattttgggcagactggcgactcagagtcagtccccgaccctcaaccaatcggagaaccaccagcagccccctctggtgtgggacctaatacaatggctgcaggcggtggcgctccaatggcagacaataacgaaggcgccgacggagtgggtagttcctcaggaaattggcattgcgattccacatggctgggcgacagagtcatcaccaccagcacccgcacctgggccctgcccacctacaacaaccacctctacaggcaaatctccaacgggacctcgggaggaagcaccaacgacaacacctacttcggctacagcaccccctgggggtattttgacttcaacagattccactgccacttttcaccacgtgactggcagcgactcatcaacaacaactggggattccggcccaagaggctcaacttcaagctcttcaacatccaagtcaaggaggtcacgcagaatgaaggcaccaggaccatcgccaataaccttaccagcacgattcaggtctttacggactcggaataccagctcccgtacgtgctcggctcggcgcaccagggctgcctgcctccgttcccggcggacgtcttcatgattcctcagtacgggtacctgactctgaacaatggcagtcaggctgtgggccggtcgtccttctactgcctggagtactttccttctcaaatgctgagaacgggcaacaactttgaattcagctacaacttcgaggacgtgcccttccacagcagctacgcgcacagccagagcctggaccggctgatgaaccctctcatcgaccagtacttgtactacctgtcccggactcaaagcacgggcggtactgcaggaactcagcagttgctattttctcaggccgggcctaacaacatgtcggctcaggccaagaactggctacccggtccctgctaccggcagcaacgcgtctccacgacactgtcgcagaacaacaacagcaactttgcctggacgggtgccaccaagtatcatctgaatggcagagactctctggtgaatcctggcgttgccatggctacccacagggacgacgaagagcgattttttccatccagcggagtcttaatgtttgggaaacagggagctggaagagacaacgtggactatagcagcgtgatgctaaccagcgaggaagaaataaggaccaccaacccagtggccacagaacagtacggcgtggtggccgataacctgcaacagcaaaacgccgctcctattgtaggggccgtcaatagtcaaggagccttacctggcatggtgtggcagaaccgggacgtgtacctgcagggtcccatctgggccaagattcctcatacggacggcaactttcatccctcgccgctgatgggaggctttggactgaagcatccgcctcctcagatcctgattaaaaacacacctgttcccgcggatcctccgaccaccttcaatcaggccaggctggcttctttcatcacgcagtacagtaccggccaggtcagcgtggagatcgagtgggagctgcagaaggagaacagcaaacgctggaacccagagattcagtacacttccaactactacaaatctacaaatgtggactttgctgtcaatactgagggtacttattccgagcctcgccccattggcacccgttacctcacccgtaatctgtaa

SEQ ID NO: 1548 - DNA, 2217 bp, Artificial Sequence
  Description of Artificial Sequence: Synthetic polynucleotide
atggctgccgatggttatcttccagattggctcgaggacaacctctctgagggcattcgcgagtggtgggacctgaaacctggagccccgaaacccaaagccaaccagcaaaggcaggacaacggccggggtctggtgcttcctggctacaggtacctcggacccttcaacggactcgacaagggggagcccgtcaacgcggcggacgcagcggccctcgagcacgacagggcctacgaccagcagctccaagcgggtgacaatccgtacctgcggtataatcacgccgacgccgagtttcaggagcgtctgcaagaagatacgtcttttgggggcaacctcgggcgcgcagtcttccaggccaaaaagcgggttctcgaacctctgggcctggttgaatcgccggttaggacggctcctggaaagaagagaccggtagagccatcaccccagcgctctccagactcctctacgggcatcggcaagaaaggccagcagcccgcaaaaaagagactcaattttgggcagactggcgactcagagtcagtccccgaccctcaaccaatcggagaaccaccagcagccccctctggtgtgggacctaatacaatggctgcaggcggtggcgctccaatggcagacaataacgaaggcgccgacggagtgggtagttcctcaggaaattggcattgcgattccacatggctgggcgacagagtcatcaccaccagcacccgcacctgggccctgcccacctacaacaaccacctctacaggcaaatctccaacgggacctcgggaggaagcaccaacgacaacacctacttcggctacagcaccccctgggggtattttgacttcaacagattccactgccacttttcaccacgtgactggcagcgactcatcaacaacaactggggattccggcccaagaggctcaacttcaagctcttcaacatccaagtcaaggaggtcacgcagaatgaaggcaccaggaccatcgccaataaccttaccagcacgattcaggtctttacggactcggaataccagctcccgtacgtgctcggctcggcgcaccagggctgcctgcctccgttcccggcggacgtcttcatgattcctcagtacgggtacctgactctgaacaatggcagtcaggctgtgggccggtcgtccttctactgcctggagtactttccttctcaaatgctgagaacgggcaacaactttgaattcagctacaacttcgaggacgtgcccttccacagcagctacgcgcacagccagagcctggaccggctgatgaaccctctcatcgaccagtacttgtactacctgtcccggactcaaagcacgggcggtactgcaggaactcagcagttgctattttctcaggccgggcctaacaacatgtcggctcaggccaagaactggctacccggtccctgctaccggcagcaacgcgtctccacgacactgtcgcagaacaacaacagcaactttgcctggacgggtgccaccaagtatcatctgaatggcagagactctctggtgaatcctggcgttgccatggctacccacagggacgacgaagagcgattttttccatccagcggagtcttaatgtttgggagacagggagctggaagagacaacgtggactatagcagcgtgatgctaaccagcgaggaagaaataaggaccaccaacccagtggccacagaacagtacggcgtggtggccgataacctgcaacagcaaaacgccgctcctattgtaggggccgtcaatagtcaaggagccttacctggcatggtgtggcagaaccgggacgtgtacctgcagggtcccatctgggccaagattcctcatacggacggcaactttcatccctcgccgctgatgggaggctttggactgaagcatccgcctcctcagatcctgattaaaaacacacctgttcccgcggatcctccgaccaccttcaatcaggccaggctggcttctttcatcacgcagtacagtaccggccaggtcagcgtggagatcgagtgggagctgcagaaggagaacagcaaacgctggaacccagagattcagtacacttccaactactacaaatctacaaatgtggactttgctgtcaatactgagggtacttattccgagcctcgccccattggcacccgttacctcacccgtaatctgtaa

SEQ ID NO: 1549 - protein, 744 aa, Artificial Sequence
  Description of Artificial Sequence: Synthetic polypeptide
MAADGYLPDWLEDTLSEGIRQWWKLKPGPPPPKPAERHKDDSRGLVLPGYKYLGPFNGLDKGEPVNEADAAALEHDKAYDRQLDSGDNPYLKYNHADAEFQERLKEDTSFGGNLGRAVFQAKKRVLEPLGLVEEPVKTAPGKKRPVEHSPVEPDSSSGTGKAGQQPARKRLNFGQTGDADSVPDPQPLGQPPAAPSGLGTNTMATGSGAPMADNNEGADGVGNSSGNWHCDSTWMGDRVITTSTRTWALPTYNNHLYKQISSQSGASNDNHYFGYSTPWGYFDFNRFHCHFSPRDWQRLINNNWGFRPKRLNFKLFNIQVKEVTQNDGTTTIANNLTSTVQVFTDSEYQLPYVLGSAHQGCLPPFPADVFMVPQYGYLTLNNGSQAVGRSSFYCLEYFPSQMLRTGNNFTFSYTFEDVPFHSSYAHSQSLDRLMNPLIDQYLYYLSRTNTPSGTTTQSRLQFSQAGASDIRDQSRNWLPGPCYRQQRVSKTSADNNNSEYSWTGATKYHLNGRDSLVNPGPAMASHKDDEEKFFPQSGVLIFGKQGSEKTNVDIEKVMITDEEEIRTTNPVATEQYGSVSTNLQRGQRGESGHGYFAQAATADVNTQGVLPGMVWQDRDVYLQGPIWAKIPHTDGHFHPSPLMGGFGLKHPPPQILIKNTPVPANPSTTFSAAKFASFITQYSTGQVSVEIEWELQKENSKRWNPEIQYTSNYNKSVNVDFTVDTNGVYSEPRPIGTRYLTRNL

SEQ ID NO: 1550 - DNA, 8359 bp, Artificial Sequence
  Description of Artificial Sequence: Synthetic polynucleotide
catcatcaataatataccttattttggattgaagccaatatgataatgagggggtggagtttgtgacgtggcgcggggcgtgggaacggggcgggtgacgtagtagctctagaggtcctgtattagaggtcacgtgagtgttttgcgacattttgcgacaccatgtggtcacgctgggtatttaagcccgagtgagcacgcagggtctccattttgaagcgggaggtttgaacgcgcagccgccatgccggggttttacgagattgtgattaaggtccccagcgaccttgacgagcatctgcccggcatttctgacagctttgtgaactgggtggccgagaaggaatgggagttgccgccagattctgacatggatctgaatctgattgagcaggcacccctgaccgtggccgagaagctgcagcgcgactttctgacggaatggcgccgtgtgagtaaggcaccggaggcccttttctttgtgcaatttgagaagggagagagctacttccacatgcacgtgctcgtggaaaccaccggggtgaaatccatggttttgggacgtttcctgagtcagattcgcgaaaaactgattcagagaatttaccgcgggatcgagccgactttgccaaactggttcgcggtcacaaagaccagaaatggcgccggaggcgggaacaaggtggtggatgagtgctacatccccaattacttgctccccaaaacccagcctgagctccagtgggcgtggactaatatggaacagtatttaagcgcctgtttgaatctcacggagcgtaaacggttggtggcgcagcatctgacgcacgtgtcgcagacgcaggagcagaacaaagagaatcagaatcccaattctgatgcgccggtgatcagatcaaaaacttcagccaggtacatggagctggtcgggtggctcgtggacaaggggattacctcggagaagcagtggatccaggaggaccaggcctcatacatctccttcaatgcggcctccaactcgcggtcccaaatcaaggctgccttggacaatgcgggaaagattatgagcctgactaaaaccgcccccgactacctggtgggccagcagcccgtggaggacatttccagcaatcggatttataaaattttggaactaaacgggtacgatccccaatatgcggcttccgtctttctgggatgggccacgaaaaagttcggcaagaggaacaccatctggctgtttgggcctgcaactaccgggaagaccaacatcgcggaggccatagcccacactgtgcccttctacgggtgcgtaaactggaccaatgagaactttcccttcaacgactgtgtcgacaagatggtgatctggtgggaggaggggaagatgaccgccaaggtcgtggagtcggccaaagccattctcggaggaagcaaggtgcgcgtggaccagaaatgcaagtcctcggcccagatagacccgactcccgtgatcgtcacctccaacaccaacatgtgcgccgtgattgacgggaactcaacgaccttcgaacaccagcagccgttgcaagaccggatgttcaaatttgaactcacccgccgtctggatcatgactttgggaaggtcaccaagcaggaagtcaaagactttttccggtgggcaaaggatcacgtggttgaggtggagcatgaattctacgtcaaaaagggtggagccaagaaaagacccgcccccagtgacgcagatataagtgagcccaaacgggtgcgcgagtcagttgcgcagccatcgacgtcagacgcggaagcttcgatcaactacgcagacaggtaccaaaacaaatgttctcgtcacgtgggcatgaatctgatgctgtttccctgcagacaatgcgagagaatgaatcagaattcaaatatctgcttcactcacggacagaaagactgtttagagtgctttcccgtgtcagaatctcaacccgtttctgtcgtcaaaaaggcgtatcagaaactgtgctacattcatcatatcatgggaaaggtgccagacgcttgcactgcctgcgatctggtcaatgtggatttggatgactgcatctttgaacaataaatgatttaaatcaggtatggctgccgatggttatcttccagattggctcgaggacactctctctgaaggaataagacagtggtggaagctcaaacctggcccaccaccaccaaagcccgcagagcggcataaggacgacagcaggggtcttgtgcttcctgggtacaagtacctcggacccttcaacggactcgacaagggagagccggtcaacgaggcagacgccgcggccctcgagcacgacaaagcctacgaccggcagctcgacagcggagacaacccgtacctcaagtacaaccacgccgacgcggagtttcaggagcgccttaaagaagatacgtcttttgggggcaacctcggacgagcagtcttccaggcgaaaaagagggttcttgaacctctgggcctggttgaggaacctgttaagacggctccgggaaaaaagaggccggtagagcactctcctgtggagccagactcctcctcgggaaccggaaaggcgggccagcagcctgcaagaaaaagattgaattttggtcagactggagacgcagactcagtacctgacccccagcctctcggacagccaccagcagccccctctggtctgggaactaatacgatggctacaggcagtggcgcaccaatggcagacaataacgagggcgccgacggagtgggtaattcctcgggaaattggcattgcgattccacatggatgggcgacagagtcatcaccaccagcacccgaacctgggccctgcccacctacaacaaccacctctacaaacaaatttccagccaatcaggagcctcgaacgacaatcactactttggctacagcaccccttgggggtattttgacttcaacagattccactgccacttttcaccacgtgactggcaaagactcatcaacaacaactggggattccgacccaagagactcaacttcaagctctttaacattcaagtcaaagaggtcacgcagaatgacggtacgacgacgattgccaataaccttaccagcacggttcaggtgtttactgactcggagtaccagctcccgtacgtcctcggctcggcgcatcaaggatgcctcccgccgttcccagcagacgtcttcatggtgccacagtatggatacctcaccctgaacaacgggagtcaggcagtaggacgctcttcattttactgcctggagtactttccttctcagatgctgcgtaccggaaacaactttaccttcagctacacttttgaggacgttcctttccacagcagctacgctcacagccagagtctggaccgtctcatgaatcctctcatcgaccagtacctgtattacttgagcagaacaaacactccaagtggaaccaccacgcagtcaaggcttcagttttctcaggccggagcgagtgacattcgggaccagtctaggaactggcttcctggaccctgttaccgccagcagcgagtatcaaagacatctgcggataacaacaacagtgaatactcgtggactggagctaccaagtaccacctcaatggcagagactctctggtgaatccgggcccggccatggcaagccacaaggacgatgaagaaaagttttttcctcagagcggggttctcatctttgggaagcaaggctcagagaaaacaaatgtggacattgaaaaggtcatgattacagacgaagaggaaatcaggacaaccaatcccgtggctacggagcagtatggttctgtatctaccaacctccagagaggccagagaggcgagtctggtcatggttattttgcccaggcggccaccgcagatgtcaacacacaaggcgttcttccaggcatggtctggcaggacagagatgtgtaccttcaggggcccatctgggcaaagattccacacacggacggacattttcacccctctcccctcatgggtggattcggacttaaacaccctcctccacagattctcatcaagaacaccccggtacctgcgaatccttcgaccaccttcagtgcggcaaagtttgcttccttcatcacacagtactccacgggacaggtcagcgtggagatcgagtgggagctgcagaaggaaaacagcaaacgctggaatcccgaaattcagtacacttccaactacaacaagtctgttaatgtggactttactgtggacactaatggcgtgtattcagagcctcgccccattggcaccagatacctgactcgtaatctgtaattgcttgttaatcaataaaccgtttaattcgtttcagttgaactttggtctctgcgtatttctttcttatctagtttccatgctctagaggtcctgtattagaggtcacgtgagtgttttgcgacattttgcgacaccatgtggtcacgctgggtatttaagcccgagtgagcacgcagggtctccattttgaagcgggaggtttgaacgcgcagccaccacggcggggttttacgagattgtgattaaggtccccagcgaccttgacgagcatctgcccggcatttctgacagctttgtgaactgggtggccgagaaggaatgggagttgccgccagattctgacatggatctgaatctgattgagcaggcacccctgaccgtggccgagaagctgcatcgctggcgtaatagcgaagaggcccgcaccgatcgcccttcccaacagttgcgcagcctgaatggcgaatggcgattccgttgcaatggctggcggtaatattgttctggatattaccagcaaggccgatagtttgagttcttctactcaggcaagtgatgttattactaatcaaagaagtattgcgacaacggttaatttgcgtgatggacagactcttttactcggtggcctcactgattataaaaacacttctcaggattctggcgtaccgttcctgtctaaaatccctttaatcggcctcctgtttagctcccgctctgattctaacgaggaaagcacgttatacgtgctcgtcaaagcaaccatagtacgcgccctgtagcggcgcattaagcgcggcgggtgtggtggttacgcgcagcgtgaccgctacacttgccagcgccctagcgcccgctcctttcgctttcttcccttcctttctcgccacgttcgccggctttccccgtcaagctctaaatcgggggctccctttagggttccgatttagtgctttacggcacctcgaccccaaaaaacttgattagggtgatggttcacgtagtgggccatcgccctgatagacggtttttcgccctttgacgttggagtccacgttctttaatagtggactcttgttccaaactggaacaacactcaaccctatctcggtctattcttttgatttataagggattttgccgatttcggcctattggttaaaaaatgagctgatttaacaaaaatttaacgcgaattttaacaaaatattaacgtttacaatttaaatatttgcttatacaatcttcctgtttttggggcttttctgattatcaaccggggtacatatgattgacatgctagttttacgattaccgttcatcgattctcttgtttgctccagactctcaggcaatgacctgatagcctttgtagagacctctcaaaaatagctaccctctccggcatgaatttatcagctagaacggttgaatatcatattgatggtgatttgactgtctccggcctttctcacccgtttgaatctttacctacacattactcaggcattgcatttaaaatatatgagggttctaaaaatttttatccttgcgttgaaataaaggcttctcccgcaaaagtattacagggtcataatgtttttggtacaaccgatttagctttatgctctgaggctttattgcttaattttgctaattctttgccttgcctgtatgatttattggatgttggaattcctgatgcggtattttctccttacgcatctgtgcggtatttcacaccgcatatggtgcactctcagtacaatctgctctgatgccgcatagttaagccagccccgacacccgccaacacccgctgacgcgccctgacgggcttgtctgctcccggcatccgcttacagacaagctgtgaccgtctccgggagctgcatgtgtcagaggttttcaccgtcatcaccgaaacgcgcgagacgaaagggcctcgtgatacgcctatttttataggttaatgtcatgataataatggtttcttagacgtcaggtggcacttttcggggaaatgtgcgcggaacccctatttgtttatttttctaaatacattcaaatatgtatccgctcatgagacaataaccctgataaatgcttcaataatattgaaaaaggaagagtatgagtattcaacatttccgtgtcgcccttattcccttttttgcggcattttgccttcctgtttttgctcacccagaaacgctggtgaaagtaaaagatgctgaagatcagttgggtgcacgagtgggttacatcgaactggatctcaacagcggtaagatccttgagagttttcgccccgaagaacgttttccaatgatgagcacttttaaagttctgctatgtggcgcggtattatcccgtattgacgccgggcaagagcaactcggtcgccgcatacactattctcagaatgacttggttgagtactcaccagtcacagaaaagcatcttacggatggcatgacagtaagagaattatgcagtgctgccataaccatgagtgataacactgcggccaacttacttctgacaacgatcggaggaccgaaggagctaaccgcttttttgcacaacatgggggatcatgtaactcgccttgatcgttgggaaccggagctgaatgaagccataccaaacgacgagcgtgacaccacgatgcctgtagcaatggcaacaacgttgcgcaaactattaactggcgaactacttactctagcttcccggcaacaattaatagactggatggaggcggataaagttgcaggaccacttctgcgctcggcccttccggctggctggtttattgctgataaatctggagccggtgagcgtgggtctcgcggtatcattgcagcactggggccagatggtaagccctcccgtatcgtagttatctacacgacggggagtcaggcaactatggatgaacgaaatagacagatcgctgagataggtgcctcactgattaagcattggtaactgtcagaccaagtttactcatatatactttagattgatttaaaacttcatttttaatttaaaaggatctaggtgaagatcctttttgataatctcatgaccaaaatcccttaacgtgagttttcgttccactgagcgtcagaccccgtagaaaagatcaaaggatcttcttgagatcctttttttctgcgcgtaatctgctgcttgcaaacaaaaaaaccaccgctaccagcggtggtttgtttgccggatcaagagctaccaactctttttccgaaggtaactggcttcagcagagcgcagataccaaatactgtccttctagtgtagccgtagttaggccaccacttcaagaactctgtagcaccgcctacatacctcgctctgctaatcctgttaccagtggctgctgccagtggcgataagtcgtgtcttaccgggttggactcaagacgatagttaccggataaggcgcagcggtcgggctgaacggggggttcgtgcacacagcccagcttggagcgaacgacctacaccgaactgagatacctacagcgtgagctatgagaaagcgccacgcttcccgaagggagaaaggcggacaggtatccggtaagcggcagggtcggaacaggagagcgcacgagggagcttccagggggaaacgcctggtatctttatagtcctgtcgggtttcgccacctctgacttgagcgtcgatttttgtgatgctcgtcaggggggcggagcctatggaaaaacgccagcaacgcggcctttttacggttcctggccttttgctggccttttgctcacatgttctttcctgcgttatcccctgattctgtggataaccgtattaccgcctttgagtgagctgataccgctcgccgcagccgaacgaccgagcgcagcgagtcagtgagcgaggaagcggaagagcgcccaatacgcaaaccgcctctccccgcgcgttggccgattcattaatgcagaattcc

SEQ ID NO: 1551 - protein, 736 aa, Artificial Sequence
  Description of Artificial Sequence: Synthetic polypeptide
MAADGYLPDWLEDNLSEGIREWWDLKPGAPKPKANQQKQDDGRGLVLPGYKYLGPFNGLDKGEPVNAADAAALEHDKAYDQQLKAGDNPYLRYNHADAEFQERLQEDTSFGGNLGRAVFQAKKRVLEPLGLVEEGAKTAPGKKRPVEQSPQEPDSSSGIGKKGQQPAKKRLNFGQTGDSESVPDPQPLGEPPAAPSGVGSNTMAAGGGAPMADNNEGADGVGNASGNWHCDSTWLGDRVITTSTRTWALPTYNNHLYKQISSQSGASTNDNTYFGYSTPWGYFDFNRFHCHFSPRDWQRLINNNWGFRPKRLNFKLFNIQVKEVTTNDGTTTIANNLTSTVQVFTDSEYQLPYVLGSAHQGCLPPFPADVFMIPQYGYLTLNNGSQAVGRSSFYCLEYFPSQMLRTGNNFEFSYTFEDVPFHSSYAHSQSLDRLMNPLIDQYLYYLSRTQTTSGTAGNRTLQFSQAGPSSMANQAKNWLPGPCYRQQRVSKTANQNNNSNFAWTGATKYHLNGRDSLVNPGPAMATHKDDEDKFFPMSGVLIFGKQGAGNSNVDLDNVMITSEEEIKTTNPVATEQYGTVATNLQSSNTAPATGTVNSQGALPGMVWQNRDVYLQGPIWAKIPHTDGHFHPSPLMGGFGLKHPPPQILIKNTPVPANPPTTFSPAKFASFITQYSTGQVSVEIEWELQKENSKRWNPEIQYTSNYNKSTNVDFAVDTNGVYSEPRPIGTRYLTRNL

SEQ ID NO: 1552 - DNA, 2208 bp, Artificial Sequence
  Description of Artificial Sequence: Synthetic polynucleotide
atggctgccgatggttatcttccagattggctcgaggacaacctctctgagggcattcgcgagtggtgggacttgaaacctggagccccgaaacccaaagccaaccagcaaaagcaggacgacggccggggtctggtgcttcctggctacaagtacctcggacccttcaacggactcgacaagggggagcccgtcaacgcggcggacgcagcggccctcgagcacgacaaggcctacgaccagcagctcaaagcgggtgacaatccgtacctgcggtataaccacgccgacgccgagtttcaggagcgtctgcaagaagatacgtcttttgggggcaacctcgggcgagcagtcttccaggccaagaagcgggttctcgaacctctcggtctggttgaggaaggcgctaagacggctcctggaaagaagagaccggtagagcaatcaccccaggaaccagactcctcttcgggcatcggcaagaaaggccagcagcccgcgaagaagagactcaactttgggcagacaggcgactcagagtcagtgcccgaccctcaaccactcggagaaccccccgcagccccctctggtgtgggatctaatacaatggcagcaggcggtggcgctccaatggcagacaataacgaaggcgccgacggagtgggtaacgcctcaggaaattggcattgcgattccacatggctgggcgacagagtcatcaccaccagcacccgaacctgggccctccccacctacaacaaccacctctacaagcaaatctccagccaatcgggagcaagcaccaacgacaacacctacttcggctacagcaccccctgggggtattttgactttaacagattccactgccacttctcaccacgtgactggcagcgactcatcaacaacaactggggattccggcccaagagactcaacttcaagctcttcaacatccaggtcaaggaggtcacgacgaatgatggcaccacgaccatcgccaataaccttaccagcacggttcaggtctttacggactcggaataccagctcccgtacgtcctcggctctgcgcaccagggctgcctgcctccgttcccggcggacgtcttcatgattcctcagtacgggtacctgactctgaacaatggcagtcaggccgtgggccgttcctccttctactgcctggagtactttccttctcaaatgctgagaacgggcaacaactttgagttcagctacacgtttgaggacgtgccttttcacagcagctacgcgcacagccaaagcctggaccggctgatgaaccccctcatcgaccagtacctgtactacctgtctcggactcagaccacgagtggtaccgcaggaaatcggacgttgcaattttctcaggccgggcctagtagcatggcgaatcaggccaaaaactggctacccgggccctgctaccggcagcaacgcgtctccaagacagcgaatcaaaataacaacagcaactttgcctggaccggtgccaccaagtatcatctgaatggcagagactctctggtaaatcccggtcccgctatggcaacccacaaggacgacgaagacaaattttttccgatgagcggagtcttaatatttgggaaacagggagctggaaatagcaacgtggaccttgacaacgttatgataaccagtgaggaagaaattaaaaccaccaacccagtggccacagaacagtacggcacggtggccactaacctgcaatcgtcaaacaccgctcctgctacagggaccgtcaacagtcaaggagccttacctggcatggtctggcagaaccgggacgtgtacctgcagggtcctatctgggccaagattcctcacacggacggacactttcatccctcgccgctgatgggaggctttggactgaaacacccgcctcctcagatcctgattaagaatacacctgttcccgcgaatcctccaactaccttcagtccagctaagtttgcgtcgttcatcacgcagtacagcaccggacaggtcagcgtggaaattgaatgggagctgcagaaagaaaacagcaaacgctggaacccagagattcaatacacttccaactacaacaaatctacaaatgtggactttgctgttgacacaaatggcgtttattctgagcctcgccccatcggcacccgttacctcacccgtaatctg

SEQ ID NO: 1553 - protein, 737 aa, Artificial Sequence
  Description of Artificial Sequence: Synthetic polypeptide
MAADGYLPDWLEDNLSEGIREWWDLKPGAPKPKANQQKQDDGRGLVLPGYKYLGPFNGLDKGEPVNAADAAALEHDKAYDQQLKAGDNPYLRYNHADAEFQERLQEDTSFGGNLGRAVFQAKKRVLEPLGLVEEGAKTAPGKKRPVEQSPQEPDSSTGIGKKGQQPAKKRLNFGQTGDSESVPDPQPLGEPPAAPSGVGSNTMAAGGGAPMADNNEGADGVGNASGNWHCDSTWLGDRVITTSTRTWALPTYNNHLYKQISNSQSGGSTNDNTYFGYSTPWGYFDFNRFHCHFSPRDWQRLINNNWGFRPKRLNFKLFNIQVKEVTTNDGTTTIANNLTSTVQVFTDSEYQLPYVLGSAHQGCLPPFPADVFMIPQYGYLTLNNGSQAVGRSSFYCLEYFPSQMLRTGNNFEFSYTFEDVPFHSSYAHSQSLDRLMNPLIDQYLYYLSRTQTTGGTAGNRTLQFSQAGPSSMANQAKNWLPGPCYRQQRVSKTTNQNNNSNFAWTGATKYHLNGRDSLVNPGVAMATHKDDEDRFFPSSGVLIFGKQGAGNDNVDLDNVMITSEEEIKTTNPVATEEYGVVATNLQSANTAPQTGTVNSQGALPGMVWQNRDVYLQGPIWAKIPHTDGNFHPSPLMGGFGLKHPPPQILIKNTPVPANPPTTFSPAKFASFITQYSTGQVSVEIEWELQKENSKRWNPEIQYTSNYNKSTNVDFAVDTEGVYSEPRPIGTRYLTRNL

SEQ ID NO: 1554 - DNA, 2211 bp, Artificial Sequence
  Description of Artificial Sequence: Synthetic polynucleotide
atggctgccgatggttatcttccagattggctcgaggacaacctctctgagggcattcgcgagtggtgggacttgaaacctggagccccgaaacccaaagccaaccagcaaaagcaggacgacggccggggtctggtgcttcctggctacaagtacctcggacccttcaacggactcgacaagggggagcccgtcaacgcggcggacgcagcggccctcgagcacgacaaggcctacgaccagcagctcaaagcgggtgacaatccgtacctgcggtataaccacgccgacgccgagtttcaggagcgtctgcaagaagatacgtcttttgggggcaacctcgggcgagcagtcttccaggccaagaagcgggttctcgaacctctcggtctggttgaggaaggcgctaagacggctcctggaaagaagagaccggtagagcaatcaccccaggaaccagactcctctacgggcatcggcaagaaaggccagcagcccgcgaaaaagagactcaactttgggcagactggcgactcagagtcagtgcccgaccctcaaccactcggagaaccccccgcagccccctctggtgtgggatctaatacaatggctgcaggcggtggcgctccaatggcagacaataacgaaggcgccgacggagtgggtaatgcctcaggaaattggcattgcgattccacatggctgggcgacagagtcatcaccaccagcacccgaacctgggccctccccacctacaacaaccacctctacaagcaaatctccaacagccaatcgggaggaagcaccaacgacaacacctacttcggctacagcaccccctgggggtattttgactttaacagattccactgccacttctcaccacgtgactggcagcgactcatcaacaacaactggggattccggcccaagagactcaacttcaagctcttcaacatccaggtcaaggaggtcacgacgaatgatggcaccacgaccatcgccaataaccttaccagcacggttcaggtctttacggactcggaataccagctcccgtacgtcctcggctctgcgcaccagggctgcctgcctccgttcccggcggacgtcttcatgattcctcagtacgggtacctgactctgaacaatggcagtcaggccgtgggccgttcctccttctactgcctggagtactttccttctcaaatgctgagaacgggcaacaactttgagttcagctacacgtttgaggacgtgccttttcacagcagctacgcgcacagccaaagcctggaccggctgatgaaccccctcatcgaccagtacctgtactacctgtctcggactcagaccacgggaggtaccgcaggaaatcggacgttgcaattttctcaggccgggcctagtagcatggcgaatcaggccaaaaactggctacccgggccctgctaccggcagcaacgcgtctccaagacaacgaatcaaaataacaacagcaactttgcctggaccggtgccaccaagtatcatctgaatggcagagactctctggtaaatcccggtgtcgctatggcaacccacaaggacgacgaagaccgattttttccgtccagcggagtcttaatatttgggaaacagggagctggaaatgacaacgtggaccttgacaacgttatgataaccagtgaggaagaaattaaaaccaccaacccagtggccacagaagagtacggcgtggtggccactaacctgcaatcggcaaacaccgctcctcaaacagggaccgtcaacagtcaaggagccttacctggcatggtctggcagaaccgggacgtgtacctgcagggtcctatctgggccaagattcctcacacggacggaaactttcatccctcgccgctgatgggaggctttggactgaaacacccgcctcctcagatcctgattaagaatacacctgttcccgcgaatcctccaactaccttcagtccagctaagtttgcgtcgttcatcacgcagtacagcaccggacaggtcagcgtggaaattgaatgggagctgcagaaagaaaacagcaaacgctggaacccagagattcaatacacttccaactacaacaaatctacaaatgtggactttgctgttgacacagaaggcgtttattctgagcctcgccccatcggcacccgttacctcacccgtaatctg

SEQ ID NO: 1555 - protein, 738 aa, Artificial Sequence
  Description of Artificial Sequence: Synthetic polypeptide
MAADGYLPDWLEDNLSEGIREWWDLKPGAPKPKANQQKQDDGRGLVLPGYKYLGPFNGLDKGEPVNAADAAALEHDKAYDQQLKAGDNPYLRYNHADAEFQERLQEDTSFGGNLGRAVFQAKKRVLEPLGLVEEGAKTAPGKKRPVEQSPQREPDSSTGIGKKGQQPAKKRLNFGQTGDSESVPDPQPLGEPPAAPSGVGSNTMAAGGGAPMADNNEGADGVGNSSGNWHCDSTWLGDRVITTSTRTWALPTYNNHLYKQISNGTSGGSTNDNTYFGYSTPWGYFDFNRFHCHFSPRDWQRLINNNWGFRPKRLNFKLFNIQVKEVTTNEGTKTIANNLTSTVQVFTDSEYQLPYVLGSAHQGCLPPFPADVFMIPQYGYLTLNNGSQAVGRSSFYCLEYFPSQMLRTGNNFQFSYTFEDVPFHSSYAHSQSLDRLMNPLIDQYLYYLSRTQTTGGTAGTQTLQFSQAGPSSMANQAKNWLPGPCYRQQRVSTTTNQNNNSNFAWTGATKYHLNGRDSLVNPGVAMATHKDDEDRFFPSSGVLIFGKQGAGNDNVDYSNVMITSEEEIKTTNPVATEEYGVVATNLQSANTAPQTGTVNSQGALPGMVWQNRDVYLQGPIWAKIPHTDGNFHPSPLMGGFGLKHPPPQILIKNTPVPADPPTTFNQAKLNSFITQYSTGQVSVEIEWELQKENSKRWNPEIQYTSNYYKSTNVDFAVNTEGVYSEPRPIGTRYLTRNL

SEQ ID NO: 1556 - DNA, 2214 bp, Artificial Sequence
  Description of Artificial Sequence: Synthetic polynucleotide
atggctgccgatggttatcttccagattggctcgaggacaacctctctgagggcattcgcgagtggtgggacctgaaacctggagccccgaaacccaaagccaaccagcaaaagcaggacgacggccggggtctggtgcttcctggctacaagtacctcggacccttcaacggactcgacaagggggagcccgtcaacgcggcggacgcagcggccctcgagcacgacaaggcctacgaccagcagctcaaagcgggtgacaatccgtacctgcggtataatcacgccgacgccgagtttcaggagcgtctgcaagaagatacgtcttttgggggcaacctcgggcgagcagtcttccaggccaagaagcgggttctcgaacctctcggtctggttgaggaaggcgctaagacggctcctggaaagaagagaccggtagagcagtcaccacagcgtgagcccgactcctccacgggcatcggcaagaaaggccagcagcccgccaaaaagagactcaatttcggtcagactggcgactcagagtcagtccccgaccctcaacctctcggagaacctccagcagcgccctctggtgtgggatctaatacaatggctgcaggcggtggcgcaccaatggcagacaataacgaaggtgccgacggagtgggtaattcctcgggaaattggcattgcgattccacatggctgggcgacagagtcatcaccaccagcacccgaacctgggccctgcccacctacaacaaccacctctacaagcaaatctccaacgggacctcgggaggcagcaccaacgacaacacctactttggctacagcaccccctgggggtattttgactttaacagattccactgccacttctcaccacgtgactggcagcgactcatcaacaacaactggggattccggcccaagagactcaacttcaagctcttcaacatccaggtcaaagaggtcacgacgaatgaaggcaccaagaccatcgccaataacctcaccagcaccgtccaggtgtttacggactcggaataccagctgccgtacgtcctcggctctgcccaccagggctgcctgcctccgttcccggcggacgtcttcatgattcctcagtacggctacctgactctcaacaacggtagtcaggccgtgggacgttcctccttctactgcctggagtacttcccctctcagatgctgagaacgggcaacaactttcaattcagctacactttcgaggacgtgcctttccacagcagctacgcgcacagccagagtttggacaggctgatgaatcctctcatcgaccagtacctgtactacctgtcaagaacccagactacgggaggcacagcgggaacccagacgttgcagttttctcaggccgggcctagcagcatggcgaatcaggccaaaaactggctgcctggaccctgctacagacagcagcgcgtctccacgacaacgaatcaaaacaacaacagcaactttgcctggactggtgccaccaagtatcatctgaacggcagagactctctggtgaatccgggcgtcgccatggcaacccacaaggacgacgaggaccgcttcttcccatccagcggcgtcctcatatttggcaagcagggagctggaaatgacaacgtggactatagcaacgtgatgataaccagcgaggaagaaatcaagaccaccaaccccgtggccacagaagagtatggcgtggtggctactaacctacagtcggcaaacaccgctcctcaaacggggaccgtcaacagccagggagccttacctggcatggtctggcagaaccgggacgtgtacctgcagggtcctatttgggccaagattcctcacacagatggcaactttcacccgtctcctttaatgggcggctttggacttaaacatccgcctcctcagatcctcatcaaaaacactcctgttcctgcggatcctccaacaacgttcaaccaggccaagctgaattctttcatcacgcagtacagcaccggacaagtcagcgtggagatcgagtgggagctgcagaaggagaacagcaagcgctggaacccagagattcagtatacttccaactactacaaatctacaaatgtggactttgctgttaatactgagggtgtttactctgagcctcgccccattggcactcgttacctcacccgtaatctg

SEQ ID NO: 1557 - protein, 738 aa, Artificial Sequence
  Description of Artificial Sequence: Synthetic polypeptide
MAADGYLPDWLEDNLSEGIREWWDLKPGAPKPKANQQKQDDGRGLVLPGYKYLGPFNGLDKGEPVNAADAAALEHDKAYDQQLKAGDNPYLRYNHADAEFQERLQEDTSFGGNLGRAVFQAKKRVLEPLGLVEEGAKTAPGKKRPVEQSPQREPDSSTGIGKKGQQPARKRLNFGQTGDSESVPDPQPLGEPPAAPSGVGSNTMAAGGGAPMADNNEGADGVGSSSGNWHCDSTWLGDRVITTSTRTWALPTYNNHLYKQISNGTSGGSTNDNTYFGYSTPWGYFDFNRFHCHFSPRDWQRLINNNWGFRPKRLNFKLFNIQVKEVTQNEGTKTIANNLTSTIQVFTDSEYQLPYVLGSAHQGCLPPFPADVFMIPQYGYLTLNNGSQAVGRSSFYCLEYFPSQMLRTGNNFQFSYTFEDVPFHSSYAHSQSLDRLMNPLIDQYLYYLSRTQTTGGTAGTQTLQFSQAGPSNMANQAKNWLPGPCYRQQRVSTTTSQNNNSNFAWTGATKYHLNGRDSLVNPGVAMATHKDDEDRFFPSSGILIFGKQGAGKDNVDYSNVMLTSEEEIKTTNPVATEEYGVVADNLQQQNTAPQIGTVNSQGALPGMVWQNRDVYLQGPIWAKIPHTDGNFHPSPLMGGFGLKHPPPQILIKNTPVPADPPTTFNQAKLNSFITQYSTGQVSVEIEWELQKENSKRWNPEIQYTSNYYKSTNVDFAVNTEGVYSEPRPIGTRYLTRNL

SEQ ID NO: 1558 - DNA, 2214 bp, Artificial Sequence
  Description of Artificial Sequence: Synthetic polynucleotide
atggctgccgatggttatcttccagattggctcgaggacaacctctctgagggcattcgcgagtggtgggacctgaaacctggagccccgaaacccaaagccaaccagcaaaagcaggacgacggccggggtctggtgcttcctggctacaagtacctcggacccttcaacggactcgacaagggggagcccgtcaacgcggcggacgcagcggccctcgagcacgacaaggcctacgaccagcagctcaaagcgggtgacaatccgtacctgcggtataatcacgccgacgccgagtttcaggagcgtctgcaagaagatacgtcttttgggggcaacctcgggcgagcagtcttccaggccaagaagcgggttctcgaacctctcggtctggttgaggaaggcgctaagacggctcctggaaagaagagaccggtagagcagtcaccacagcgtgagcccgactcctccacgggcatcggcaagaaaggccagcagcccgccagaaagagactcaatttcggtcagactggcgactcagagtcagtccccgaccctcaacctctcggagaacctccagcagcgccctctggtgtgggatctaatacaatggctgcaggcggtggcgcaccaatggcagacaataacgaaggtgccgacggagtgggtagttcctcgggaaattggcattgcgattccacatggctgggcgacagagtcatcaccaccagcacccgaacctgggccctgcccacctacaacaaccacctctacaagcaaatctccaacgggacctcgggaggcagcaccaacgacaacacctactttggctacagcaccccctgggggtattttgactttaacagattccactgccacttctcaccacgtgactggcagcgactcatcaacaacaactggggattccggcccaagagactcaacttcaagctcttcaacatccaggtcaaagaggtcacgcagaatgaaggcaccaagaccatcgccaataacctcaccagcaccatccaggtgtttacggactcggaataccagctgccgtacgtcctcggctctgcccaccagggctgcctgcctccgttcccggcggacgtcttcatgattcctcagtacggctacctgactctcaacaacggtagtcaggccgtgggacgttcctccttctactgcctggagtacttcccctctcagatgctgagaacgggcaacaactttcaattcagctacactttcgaggacgtgcctttccacagcagctacgcgcacagccagagtttggacaggctgatgaatcctctcatcgaccagtacctgtactacctgtcaagaacccagactacgggaggcacagcgggaacccagacgttgcagttttctcaggccgggcctagcaacatggcgaatcaggccaaaaactggctgcctggaccctgctacagacagcagcgcgtctccacgacaacgtcgcaaaacaacaacagcaactttgcctggactggtgccaccaagtatcatctgaacggcagagactctctggtgaatccgggcgtcgccatggcaacccacaaggacgacgaggaccgcttcttcccatccagcggcatcctcatatttggcaagcagggagctggaaaagacaacgtggactatagcaacgtgatgctaaccagcgaggaagaaatcaagaccaccaaccccgtggccacagaagagtatggcgtggtggctgataacctacagcagcaaaacaccgctcctcaaatagggaccgtcaacagccagggagccttacctggcatggtctggcagaaccgggacgtgtacctgcagggtcctatttgggccaagattcctcacacagatggcaactttcacccgtctcctttaatgggcggctttggacttaaacatccgcctcctcagatcctcatcaaaaacactcctgttcctgcggatcctccaacaacgttcaaccaggccaagctgaattctttcatcacgcagtacagcaccggacaagtcagcgtggagatcgagtgggagctgcagaaggagaacagcaagcgctggaacccagagattcagtatacttccaactactacaaatctacaaatgtggactttgctgttaatactgagggtgtttactctgagcctcgccccattggcactcgttacctcacccgtaatctg

SEQ ID NO: 1559 - protein, 738 aa, Artificial Sequence
  Description of Artificial Sequence: Synthetic polypeptide
MAADGYLPDWLEDNLSEGIREWWDLKPGAPKPKANQQKQDDGRGLVLPGYKYLGPFNGLDKGEPVNAADAAALEHDKAYDQQLKAGDNPYLRYNHADAEFQERLQEDTSFGGNLGRAVFQAKKRVLEPLGLVEEGAKTAPGKKRPVEPSPQRSPDSSTGIGKKGQQPARKRLNFGQTGDSESVPDPQPIGEPPAAPSGVGSGTMAAGGGAPMADNNEGADGVGSSSGNWHCDSTWLGDRVITTSTRTWALPTYNNHLYKQISNGTSGGSTNDNTYFGYSTPWGYFDFNRFHCHFSPRDWQRLINNNWGFRPKRLNFKLFNIQVKEVTQNEGTKTIANNLTSTIQVFTDSEYQLPYVLGSAHQGCLPPFPADVFMIPQYGYLTLNNGSQAVGRSSFYCLEYFPSQMLRTGNNFEFSYTFEDVPFHSSYAHSQSLDRLMNPLIDQYLYYLSRTQSTGGTAGTQQLLFSQAGPSNMSAQAKNWLPGPCYRQQRVSTTLSQNNNSNFAWTGATKYHLNGRDSLVNPGVAMATHKDDEDRFFPSSGILMFGKQGAGKDNVDYSNVMLTSEEEIKTTNPVATEQYGVVADNLQQQNTAPIVGAVNSQGALPGMVWQNRDVYLQGPIWAKIPHTDGNFHPSPLMGGFGLKHPPPQILIKNTPVPADPPTTFNQAKLNSFITQYSTGQVSVEIEWELQKENSKRWNPEIQYTSNYYKSTNVDFAVNTEGVYSEPRPIGTRYLTRNL

SEQ ID NO: 1560 - DNA, 2214 bp, Artificial Sequence
  Description of Artificial Sequence: Synthetic polynucleotide
atggctgccgatggttatcttccagattggctcgaggacaacctctctgagggcattcgcgagtggtgggacctgaaacctggagccccgaaacccaaagccaaccagcaaaagcaggacgacggccggggtctggtgcttcctggctacaagtacctcggacccttcaacggactcgacaagggggagcccgtcaacgcggcggacgcagcggccctcgagcacgacaaggcctacgaccagcagctcaaagcgggtgacaatccgtacctgcggtataatcacgccgacgccgagtttcaggagcgtctgcaagaagatacgtcttttgggggcaacctcgggcgagcagtcttccaggccaagaagcgggttctcgaacctctcggtctggttgaggaaggcgctaagacggctcctggaaagaagagaccggtagagccgtcaccacagcgttcccccgactcctccacgggcatcggcaagaaaggccagcagcccgccagaaagagactcaatttcggtcagactggcgactcagagtcagtccccgaccctcaacctatcggagaacctccagcagcgccctctggtgtgggatctggtacaatggctgcaggcggtggcgcaccaatggcagacaataacgaaggtgccgacggagtgggtagttcctcgggaaattggcattgcgattccacatggctgggcgacagagtcatcaccaccagcacccgaacctgggccctgcccacctacaacaaccacctctacaagcaaatctccaacgggacctcgggaggcagcaccaacgacaacacctactttggctacagcaccccctgggggtattttgactttaacagattccactgccacttctcaccacgtgactggcagcgactcatcaacaacaactggggattccggcccaagagactcaacttcaagctcttcaacatccaggtcaaagaggtcacgcagaatgaaggcaccaagaccatcgccaataacctcaccagcaccatccaggtgtttacggactcggaataccagctgccgtacgtcctcggctctgcccaccagggctgcctgcctccgttcccggcggacgtcttcatgattcctcagtacggctacctgactctcaacaacggtagtcaggccgtgggacgttcctccttctactgcctggagtacttcccctctcagatgctgagaacgggcaacaactttgagttcagctacactttcgaggacgtgcctttccacagcagctacgcgcacagccagagtttggacaggctgatgaatcctctcatcgaccagtacctgtactacctgtcaagaacccagtctacgggaggcacagcgggaacccagcagttgctgttttctcaggccgggcctagcaacatgtcggctcaggccaaaaactggctgcctggaccctgctacagacagcagcgcgtctccacgacactgtcgcaaaacaacaacagcaactttgcctggactggtgccaccaagtatcatctgaacggcagagactctctggtgaatccgggcgtcgccatggcaacccacaaggacgacgaggaccgcttcttcccatccagcggcatcctcatgtttggcaagcagggagctggaaaagacaacgtggactatagcaacgtgatgctaaccagcgaggaagaaatcaagaccaccaaccccgtggccacagaacagtatggcgtggtggctgataacctacagcagcaaaacaccgctcctattgtgggggccgtcaacagccagggagccttacctggcatggtctggcagaaccgggacgtgtacctgcagggtcctatttgggccaagattcctcacacagatggcaactttcacccgtctcctttaatgggcggctttggacttaaacatccgcctcctcagatcctcatcaaaaacactcctgttcctgcggatcctccaacaacgttcaaccaggccaagctgaattctttcatcacgcagtacagcaccggacaagtcagcgtggagatcgagtgggagctgcagaaggagaacagcaagcgctggaacccagagattcagtatacttccaactactacaaatctacaaatgtggactttgctgttaatactgagggtgtttactctgagcctcgccccattggcactcgttacctcacccgtaatctg

SEQ ID NO: 1561 - protein, 738 aa, Artificial Sequence
  Description of Artificial Sequence: Synthetic polypeptide
MAADGYLPDWLEDNLSEGIREWWDLKPGAPKPKANQQKQDDGRGLVLPGYKYLGPFNGLDKGEPVNAADAAALEHDKAYDQQLKAGDNPYLRYNHADAEFQERLQEDTSFGGNLGRAVFQAKKRVLEPLGLVEEGAKTAPGKKRPVEPSPQRSPDSSTGIGKKGQQPAKKRLNFGQTGDSESVPDPQPIGEPPAGPSGLGSGTMAAGGGAPMADNNEGADGVGSSSGNWHCDSTWLGDRVITTSTRTWALPTYNNHLYKQISNGTSGGSTNDNTYFGYSTPWGYFDFNRFHCHFSPRDWQRLINNNWGFRPKRLNFKLFNIQVKEVTQNEGTKTIANNLTSTIQVFTDSEYQLPYVLGSAHQGCLPPFPADVFMIPQYGYLTLNNGSQAVGRSSFYCLEYFPSQMLRTGNNFEFSYTFEDVPFHSSYAHSQSLDRLMNPLIDQYLYYLSRTQSTGGTAGTQQLLFSQAGPSNMSAQAKNWLPGPCYRQQRVSTTLSQNNNSNFAWTGATKYHLNGRDSLVNPGVAMATHKDDEERFFPSSGVLMFGKQGAGKDNVDYSSVMLTSEEEIKTTNPVATEQYGVVADNLQQQNTAPIVGAVNSQGALPGMVWQNRDVYLQGPIWAKIPHTDGNFHPSPLMGGFGLKHPPPQILIKNTPVPADPPTTFSQAKLASFITQYSTGQVSVEIEWELQKENSKRWNPEIQYTSNYYKSTNVDFAVNTEGTYSEPRPIGTRYLTRNL

SEQ ID NO: 1562 - DNA, 2214 bp, Artificial Sequence
  Description of Artificial Sequence: Synthetic polynucleotide
atggctgccgatggttatcttccagattggctcgaggacaacctctctgagggcattcgcgagtggtgggacttgaaacctggagccccgaaacccaaagccaaccagcaaaagcaggacgacggccggggtctggtgcttcctggctacaagtacctcggacccttcaacggactcgacaagggggagcccgtcaacgcggcggacgcagcggccctcgagcacgacaaggcctacgaccagcagctcaaagcgggtgacaatccgtacctgcggtataaccacgccgacgccgagtttcaggagcgtctgcaagaagatacgtcttttgggggcaacctcgggcgagcagtcttccaggccaagaagcgggttctcgaacctctcggtctggttgaggaaggcgctaagacggctcctggaaagaagagaccggtagagccatcaccccagcgttctccagactcctctacgggcatcggcaagaaaggccagcagcccgcgaaaaagagactcaactttgggcagactggcgactcagagtcagtgcccgaccctcaaccaatcggagaaccccccgcaggcccctctggtctgggatctggtacaatggctgcaggcggtggcgctccaatggcagacaataacgaaggcgccgacggagtgggtagttcctcaggaaattggcattgcgattccacatggctgggcgacagagtcatcaccaccagcacccgaacctgggccctccccacctacaacaaccacctctacaagcaaatctccaacgggacttcgggaggaagcaccaacgacaacacctacttcggctacagcaccccctgggggtattttgactttaacagattccactgccacttctcaccacgtgactggcagcgactcatcaacaacaactggggattccggcccaagagactcaacttcaagctcttcaacatccaggtcaaggaggtcacgcagaatgaaggcaccaagaccatcgccaataaccttaccagcacgattcaggtctttacggactcggaataccagctcccgtacgtcctcggctctgcgcaccagggctgcctgcctccgttcccggcggacgtcttcatgattcctcagtacgggtacctgactctgaacaatggcagtcaggccgtgggccgttcctccttctactgcctggagtactttccttctcaaatgctgagaacgggcaacaactttgagttcagctacacgtttgaggacgtgccttttcacagcagctacgcgcacagccaaagcctggaccggctgatgaaccccctcatcgaccagtacctgtactacctgtctcggactcagtccacgggaggtaccgcaggaactcagcagttgctattttctcaggccgggcctagtaacatgtcggctcaggccaaaaactggctacccgggccctgctaccggcagcaacgcgtctccacgacactgtcgcaaaataacaacagcaactttgcctggaccggtgccaccaagtatcatctgaatggcagagactctctggtaaatcccggtgtcgctatggcaacccacaaggacgacgaagagcgattttttccgtccagcggagtcttaatgtttgggaaacagggagctggaaaagacaacgtggactatagcagcgttatgctaaccagtgaggaagaaattaaaaccaccaacccagtggccacagaacagtacggcgtggtggccgataacctgcaacagcaaaacaccgctcctattgtaggggccgtcaacagtcaaggagccttacctggcatggtctggcagaaccgggacgtgtacctgcagggtcctatctgggccaagattcctcacacggacggaaactttcatccctcgccgctgatgggaggctttggactgaaacacccgcctcctcagatcctgattaagaatacacctgttcccgcggatcctccaactaccttcagtcaagctaagctggcgtcgttcatcacgcagtacagcaccggacaggtcagcgtggaaattgaatgggagctgcagaaagaaaacagcaaacgctggaacccagagattcaatacacttccaactactacaaatctacaaatgtggactttgctgttaacacagaaggcacttattctgagcctcgccccatcggcacccgttacctcacccgtaatctg

SEQ ID NO: 1563 - protein, 737 aa, Artificial Sequence
  Description of Artificial Sequence: Synthetic polypeptide
MAADGYLPDWLEDNLSEGIREWWDLKPGAPKPKANQQKQDDGRGLVLPGYKYLGPFNGLDKGEPVNAADAAALEHDKAYDQQLKAGDNPYLRYNHADAEFQERLQEDTSFGGNLGRAVFQAKKRVLEPLGLVEEGAKTAPGKKRPVEPSPQRSPDSSTGIGKKGQQPAKKRLNFGQTGDSESVPDPQPLGEPPAAPSGVGSGTMAAGGGAPMADNNEGADGVGNASGNWHCDSTWLGDRVITTSTRTWALPTYNNHLYKQISSQSAGSTNDNTYFGYSTPWGYFDFNRFHCHFSPRDWQRLINNNWGFRPKKLRFKLFNIQVKEVTTNDGVTTIANNLTSTVQVFSDSEYQLPYVLGSAHQGCLPPFPADVFMIPQYGYLTLNNGSQSVGRSSFYCLEYFPSQMLRTGNNFEFSYTFEDVPFHSSYAHSQSLDRLMNPLIDQYLYYLARTQSTTGGTAGNRELQFYQAGPSTMAEQAKNWLPGPCYRQQRVSKTLDQNNNSNFAWTGATKYHLNGRNSLVNPGVAMATHKDDEDRFFPSSGVLIFGKTGAANKTTLENVLMTNEEEIKTTNPVATEEYGVVSSNLQSANTAPQTQTVNSQGALPGMVWQNRDVYLQGPIWAKIPHTDGNFHPSPLMGGFGLKHPPPQILIKNTPVPANPPEVFTPAKFASFITQYSTGQVSVEIEWELQKENSKRWNPEIQYTSNYDKSTNVDFAVDSEGVYSEPRPIGTRYLTRNL

SEQ ID NO: 1564 - DNA, 2211 bp, Artificial Sequence
  Description of Artificial Sequence: Synthetic polynucleotide
atggctgccgatggttatcttccagattggctcgaggacaacctctctgagggcattcgcgagtggtgggacctgaaacctggagccccgaaacccaaagccaaccagcaaaagcaggacgacggccggggtctggtgcttcctggctacaagtacctcggacccttcaacggactcgacaagggggagcccgtcaacgcggcggacgcagcggccctcgagcacgacaaggcctacgaccagcagctcaaagcgggtgacaatccgtacctgcggtataaccacgccgacgccgagtttcaggagcgtctgcaagaagatacgtcatttgggggcaacctcgggcgagcagtcttccaggccaagaagcgggttctcgaacctctcggtctggttgaggaaggcgctaagacggctcctggaaagaagagaccggtagagccgtcacctcagcgttcccccgactcctccacgggcatcggcaagaaaggccagcagcccgccaaaaagagactcaatttcggtcagactggcgactcagagtcagtccccgaccctcaacctctcggagaacctccagcagcgccctctggtgtgggatctggtacaatggctgcaggcggtggcgcaccaatggcagacaataacgaaggtgccgacggagtgggtaatgcctcaggaaattggcattgcgattccacatggctgggcgacagagtcattaccaccagcacccgaacctgggccctgcccacctacaacaaccacctctacaagcaaatctccagtcaaagtgcaggtagtaccaacgacaacacctacttcggctacagcaccccctgggggtattttgactttaacagattccactgccacttctcaccacgtgactggcagcgactcatcaacaacaactggggattccggcccaagaagctgcggttcaagctcttcaacatccaggtcaaggaggtcacgacgaatgacggcgttacgaccatcgctaataaccttaccagcacggttcaggtattctcggactcggaataccagctgccgtacgtcctcggctctgcgcaccagggctgcctgcctccgttcccggcggacgtcttcatgattcctcagtacggctacctgactctcaacaatggcagtcagtctgtgggacgttcctccttctactgcctggagtacttcccctctcagatgctgagaacgggcaacaactttgagttcagctacaccttcgaggacgtgcctttccacagcagctacgcacacagccagagcctggaccggctgatgaatcccctcatcgaccagtacttgtactacctggccagaacacagagtaccacaggaggcacagctggcaatcgggaactgcagttttaccaggccgggccttcaactatggccgaacaagccaagaattggttacctggaccttgctaccggcaacaaagagtctccaaaacgctggatcaaaacaacaacagcaactttgcttggactggtgccaccaaatatcacctgaacggcagaaactcgttggttaatcccggcgtcgccatggcaactcacaaggacgacgaggaccgctttttcccatccagcggagtcctgatttttggaaaaactggagcagctaacaaaactacattggaaaatgtgttaatgacaaatgaagaagaaattaaaactactaatcctgtagccacggaagaatacggggtagtcagcagcaacttacaatcggctaatactgcaccccagacacaaactgtcaacagccagggagccttacctggcatggtctggcagaaccgggacgtgtacctgcagggtcccatctgggccaagattcctcacacggatggcaactttcacccgtctcctttgatgggcggctttggacttaaacatccgcctcctcagatcctgatcaagaacactcccgttcccgctaatcctccggaggtgtttactcctgccaagtttgcttcgttcatcacacagtacagcaccggacaagtcagcgtggaaatcgagtgggagctgcagaaggaaaacagcaagcgctggaacccggagattcagtacacctccaactatgataagtcgactaatgtggactttgccgttgacagcgagggtgtttactctgagcctcgccctattggcactcgttacctcacccgtaatctg

SEQ ID NO: 1565 - protein, 735 aa, Artificial Sequence
  Description of Artificial Sequence: Synthetic polypeptide
MAADGYLPDWLEDNLSEGIREWWDLKPGAPKPKANQQKQDDGRGLVLPGYKYLGPFNGLDKGEPVNAADAAALEHDKAYDQQLKAGDNPYLRYNHADAEFQERLQEDTSFGGNLGRAVFQAKKRVLEPLGLVEEGAKTAPGKKRPVEQSPQEPDSSSGIGKSGQQPAKKRLNFGQTGDSESVPDPQPLGEPPAAPSGVGSNTMASGGGAPMADNNEGADGVGNASGNWHCDSTWLGDRVITTSTRTWALPTYNNHLYKQISSQSGASNDNHYFGYSTPWGYFDFNRFHCHFSPRDWQRLINNNWGFRPKRLNFKLFNIQVKEVTTNDGTTTIANNLTSTVQVFTDSEYQLPYVLGSAHQGCLPPFPADVFMIPQYGYLTLNNGSQAVGRSSFYCLEYFPSQMLRTGNNFTFSYTFEDVPFHSSYAHSQSLDRLMNPLIDQYLYYLSRTQTTSGTAQNRELQFSQAGPSSMANQAKNWLPGPCYRQQRVSKTANDNNNSNFAWTGATKYHLNGRDSLVNPGPAMASHKDDEDKFFPMSGVLIFGKQGAGASNVDLDNVMITDEEEIKTTNPVATEQYGTVATNLQSSNTAPATGTVNSQGALPGMVWQDRDVYLQGPIWAKIPHTDGHFHPSPLMGGFGLKHPPPQILIKNTPVPANPPTTFSPAKFASFITQYSTGQVSVEIEWELQKENSKRWNPEIQYTSNYNKSANVDFTVDTNGVYSEPRPIGTRYLTRNL

SEQ ID NO: 1566 - DNA, 2205 bp, Artificial Sequence
  Description of Artificial Sequence: Synthetic polynucleotide
atggctgccgatggttatcttccagattggctcgaggacaacctctctgagggcattcgcgagtggtgggacttgaaacctggagccccgaaacccaaagccaaccagcaaaagcaggacgacggccggggtctggtgcttcctggctacaagtacctcggacccttcaacggactcgacaagggggagcccgtcaacgcggcggatgcagcggccctcgagcacgacaaggcctacgaccagcagctcaaagcgggtgacaatccgtacctgcggtataaccacgccgacgccgagtttcaggagcgtctgcaagaagatacgtcttttgggggcaacctcgggcgagcagtcttccaggccaagaagagggttctcgaacctcttggtctggttgaggaaggtgctaagacggctcctggaaagaaacgtccggtagagcagtcgccacaagagccagactcctcctcgggcattggcaagtcaggccagcagcccgctaaaaagagactcaattttggtcagactggcgactcagagtcagtccccgacccacaacctctcggagaacctccagcagccccctctggtgtgggatctaatacaatggcttcaggcggtggcgcaccaatggcagacaataacgaaggcgccgacggagtgggtaatgcctcaggaaattggcattgcgattccacatggctgggcgacagagtcatcaccaccagcacccgaacatgggccttgcccacctataacaaccacctctacaagcaaatctccagtcaatcaggggccagcaacgacaaccactacttcggctacagcaccccctgggggtattttgatttcaacagattccactgccatttctcaccacgtgactggcagcgactcatcaacaacaattggggattccggcccaagagactcaacttcaagctcttcaacatccaagtcaaggaggtcacgacgaatgatggcaccacgaccatcgctaataaccttaccagcacggttcaagtcttcacggactcggagtaccagttgccgtacgtcctcggctctgcgcaccagggctgcctccctccgttcccggcggacgtgttcatgattccgcagtacggctacctaacgctcaacaatggcagccaggcagtgggacggtcatccttttactgcctggaatatttcccatcgcagatgctgagaacgggcaataactttaccttcagctacaccttcgaggacgtgcctttccacagcagctacgcgcacagccagagcctggaccggctgatgaatcctctcatcgaccagtacctgtattacctgagcagaactcagactacgtccggaactgcccaaaacagggagttgcagtttagccaggcgggtccatctagcatggctaatcaggccaaaaactggctacctggaccctgttaccggcagcagcgcgtttctaaaacagcaaatgacaacaacaacagcaactttgcctggactggtgctacaaaatatcaccttaatgggcgtgattctttagtcaaccctggccctgctatggcctcacacaaagacgacgaagacaagttctttcccatgagcggtgtcttgatttttggaaagcagggcgccggagcttcaaacgttgatttggacaatgtcatgatcacagacgaagaggaaatcaaaaccactaaccccgtggccaccgaacaatatgggactgtggcaaccaatctccagagcagcaacacagcccctgcgaccggaactgtgaattctcagggagccttacctggaatggtgtggcaagacagagacgtatacctgcagggtcctatttgggccaaaattcctcacacggatggacactttcacccgtctcctctcatgggcggctttggacttaagcacccgcctcctcagatcctcatcaaaaacacgcctgttcctgcgaatcctccgacaacgttttcgcctgcaaagtttgcttcattcatcacccagtattccacaggacaagtgagcgtggagattgaatgggagctgcagaaagaaaacagcaaacgctggaatcccgaaatacagtatacatctaactataataaatctgccaacgttgatttcactgtggacaccaatggagtttatagtgagcctcgccccattggcacccgttacctcacccgtaacctg

SEQ ID NO: 1567 - protein, 735 aa, Artificial Sequence
  Description of Artificial Sequence: Synthetic polypeptide
MAADGYLPDWLEDNLSEGIREWWDLKPGAPQPKANQQHQDDGRGLVLPGYKYLGPFNGLDKGEPVNEADAAALEHDKAYDQQLKAGDNPYLKYNHADAEFQERLQEDTSFGGNLGRAVFQAKKRVLEPLGLVEEAAKTAPGKKRPVEQSPQEPDSSSGIGKSGQQPARKRLNFGQTGDSESVPDPQPLGEPPAAPSGVGSNTMASGGGAPMADNNEGADGVGNSSGNWHCDSTWLGDRVITTSTRTWALPTYNNHLYKQISSQSGASNDNHYFGYSTPWGYFDFNRFHCHFSPRDWQRLINNNWGFRPKKLNFKLFNIQVKEVTQNDGTTTIANNLTSTVQVFTDSEYQLPYVLGSAHQGCLPPFPADVFMIPQYGYLTLNNGSQAVGRSSFYCLEYFPSQMLRTGNNFTFSYTFEDVPFHSSYAHSQSLDRLMNPLIDQYLYYLSRTQTTSGTTQQSRLQFSQAGPSSMAQQAKNWLPGPCYRQQRVSKTANDNNNSNFAWTGATKYHLNGRDSLVNPGPAMASHKDDEEKFFPMHGVLIFGKQGTGASNVDLDNVMITDEEEIRTTNPVATEQYGTVATNLQSSNTAPATGTVNSQGALPGMVWQDRDVYLQGPIWAKIPHTDGHFHPSPLMGGFGLKHPPPQILIKNTPVPANPPTTFSPAKFASFITQYSTGQVSVEIEWELQKENSKRWNPEIQYTSNYNKSVNVDFTVDTNGVYSEPRPIGTRYLTRNL

SEQ ID NO: 1568 - DNA, 2205 bp, Artificial Sequence
  Description of Artificial Sequence: Synthetic polynucleotide
atggctgctgacggttatcttccagattggctcgaggacaacctttctgaaggcattcgtgagtggtgggatctgaaacctggagcccctcaacccaaagcgaaccaacaacaccaggacgacggtcggggtcttgtgcttccgggttacaaatacctcggaccctttaacggactcgacaaaggagagccggtcaacgaggcggacgcggcagccctcgaacacgacaaagcttacgaccagcagctcaaggccggtgacaacccgtacctcaagtacaaccacgccgacgccgagtttcaggagcgtcttcaagaagatacgtcttttgggggcaaccttggcagagcagtcttccaggccaaaaagagggtccttgagcctcttggtctggttgaggaagcagctaaaacggctcctggaaagaagaggcctgtagaacagtctcctcaggaaccggactcatcatctggtattggcaaatcgggccaacagcctgccagaaaaagactaaatttcggtcagactggagactcagagtcagtcccagaccctcaacctctcggagaaccaccagcagccccctcaggtgtgggatctaatacaatggcttcaggcggtggcgcaccaatggcagacaataacgagggtgccgatggagtgggtaattcctcaggaaattggcattgcgattccacatggctgggcgacagagtcatcaccaccagcaccagaacctgggccctgcccacttacaacaaccatctctacaagcaaatctccagccaatcaggagcttcaaacgacaaccactactttggctacagcaccccttgggggtattttgactttaacagattccactgccacttctcaccacgtgactggcagcgactcattaacaacaactggggattccggcccaagaaactcaacttcaagctcttcaacatccaagttaaagaggtcacgcagaacgatggcacgacgactattgccaataaccttaccagcacggttcaagtgtttacggactcggagtatcagctcccgtacgtgctcgggtcggcgcaccaaggctgtctcccgccgtttccagcggacgtcttcatgatccctcagtatggatacctcaccctgaacaacggaagtcaagcggtgggacgctcatccttttactgcctggagtacttcccttcgcagatgctaaggactggaaataacttcacattcagctataccttcgaggatgtaccttttcacagcagctacgctcacagccagagtttggatcgcttgatgaatcctcttattgatcagtatctgtactacctgagcagaacgcaaacaacctctggaacaacccaacaatcacggctgcaatttagccaggctgggccttcgtctatggctcagcaggccaaaaattggctacctgggccctgctaccggcaacagagagtttcaaagactgctaacgacaacaacaacagtaactttgcttggacaggggccaccaaatatcatctcaatggccgcgactcgctggtgaatccaggaccagctatggccagtcacaaggacgatgaagaaaaatttttccctatgcacggcgttctaatatttggcaaacaagggacaggggcaagtaacgtagatttagataatgtaatgattacggatgaagaagagattcgtaccaccaatcctgtggcaacagagcagtatggaactgtggcaactaacttgcagagctcaaatacagctcccgcgactggaactgtcaatagtcagggggccttacctggcatggtgtggcaagatcgtgacgtgtaccttcaaggacctatctgggcaaagattcctcacacggatggacactttcatccttctcctctgatgggaggctttggactgaaacatccgcctcctcaaatcttgatcaaaaatactccggtaccggcaaatcctccgacgactttcagcccggccaagtttgcttcatttatcactcagtactccactggacaggtcagcgtggaaattgagtgggagctacagaaagaaaacagcaaacgttggaatccagagattcagtacacttccaactacaacaagtctgttaatgtggactttactgtagacactaatggtgtttatagtgaacctcgccctattggaacccggtatctcacacgaaacttg

SEQ ID NO: 1569 - protein, 736 aa, Artificial Sequence
  Description of Artificial Sequence: Synthetic polypeptide
MAADGYLPDWLEDNLSEGIREWWDLKPGAPKPKANQQKQDDGRGLVLPGYKYLGPFNGLDKGEPVNAADAAALEHDKAYDQQLKAGDNPYLRYNHADAEFQERLQEDTSFGGNLGRAVFQAKKRVLEPLGLVEEGAKTAPGKKRPVEQSPQEPDSSSGIGKKGQQPARKRLNFGQTGDSESVPDPQPLGEPPAAPSGVGSNTMAAGGGAPMADNNEGADGVGNASGNWHCDSTWLGDRVITTSTRTWALPTYNNHLYKQISSQSGGSTNDNTYFGYSTPWGYFDFNRFHCHFSPRDWQRLINNNWGFRPKRLNFKLFNIQVKEVTTNDGTTTIANNLTSTVQVFTDSEYQLPYVLGSAHQGCLPPFPADVFMIPQYGYLTLNNGSQAVGRSSFYCLEYFPSQMLRTGNNFEFSYTFEDVPFHSSYAHSQSLDRLMNPLIDQYLYYLSRTQTTSGTAGNRTLQFSQAGPSSMANQAKNWLPGPCYRQQRVSKTANQNNNSNFAWTGATKYHLNGRDSLVNPGPAMATHKDDEDKFFPMSGVLIFGKQGAGNSNVDLDNVMITNEEEIKTTNPVATEQYGTVATNLQSANTAPATGTVNSQGALPGMVWQDRDVYLQGPIWAKIPHTDGHFHPSPLMGGFGLKHPPPQILIKNTPVPANPPTTFSPAKFASFITQYSTGQVSVEIEWELQKENSKRWNPEIQYTSNYNKSTNVDFAVDTNGVYSEPRPIGTRYLTRNL

SEQ ID NO: 1570 - protein, 736 aa, Artificial Sequence
  Description of Artificial Sequence: Synthetic polypeptide
MAADGYLPDWLEDNLSEGIREWWDLKPGAPKPKANQQKQDDGRGLVLPGYKYLGPFNGLDKGEPVNAADAAALEHDKAYDQQLKAGDNPYLRYNHADAEFQERLQEDTSFGGNLGRAVFQAKKRVLEPLGLVEEGAKTAPGKKRPVEQSPQEPDSSSGIGKKGQQPAKKRLNFGQTGDSESVPDPQPLGEPPAAPSGVGSNTMASGGGAPMADNNEGADGVGNASGNWHCDSTWLGDRVITTSTRTWALPTYNNHLYKQISSQSGASTNDNTYFGYSTPWGYFDFNRFHCHFSPRDWQRLINNNWGFRPKRLNFKLFNIQVKEVTTNDGTTTIANNLTSTVQVFTDSEYQLPYVLGSAHQGCLPPFPADVFMIPQYGYLTLNNGSQAVGRSSFYCLEYFPSQMLRTGNNFQFSYTFEDVPFHSSYAHSQSLDRLMNPLIDQYLYYLSRTQTTSGTAGNRELQFSQAGPSSMANQAKNWLPGPCYRQQRVSKTTNQNNNSNFAWTGATKYHLNGRDSLVNPGPAMATHKDDEDKFFPMSGVLIFGKQGAGNSNVDLDNVMITNEEEIKTTNPVATEEYGTVATNLQSANTAPATGTVNSQGALPGMVWQNRDVYLQGPIWAKIPHTDGHFHPSPLMGGFGLKHPPPQILIKNTPVPANPPTTFSPAKFASFITQYSTGQVSVEIEWELQKENSKRWNPEIQYTSNYNKSTNVDFAVDTNGVYSEPRPIGTRYLTRNL

SEQ ID NO: 1571 - protein, 736 aa, Artificial Sequence
  Description of Artificial Sequence: Synthetic polypeptide
MAADGYLPDWLEDNLSEGIREWWDLKPGAPKPKANQQKQDDGRGLVLPGYKYLGPFNGLDKGEPVNAADAAALEHDKAYDQQLKAGDNPYLRYNHADAEFQERLQEDTSFGGNLGRAVFQAKKRVLEPLGLVEEGAKTAPGKKRPVEQSPQEPDSSSGIGKKGQQPARKRLNFGQTGDSESVPDPQPLGEPPAAPSGVGSNTMAAGGGAPMADNNEGADGVGNASGNWHCDSTWLGDRVITTSTRTWALPTYNNHLYKQISSQSGGSTNDNTYFGYSTPWGYFDFNRFHCHFSPRDWQRLINNNWGFRPKRLNFKLFNIQVKEVTTNDGTTTIANNLTSTVQVFTDSEYQLPYVLGSAHQGCLPPFPADVFMIPQYGYLTLNNGSQAVGRSSFYCLEYFPSQMLRTGNNFEFSYTFEDVPFHSSYAHSQSLDRLMNPLIDQYLYYLSRTQTTSGTAGNRELQFSQAGPSSMANQAKNWLPGPCYRQQRVSKTTNQNNNSNFAWTGATKYHLNGRDSLVNPGPAMATHKDDEDKFFPMSGVLIFGKQGAGNSNVDLDNVMITSEEEIKTTNPVATEEYGTVATNLQSSNTAPATGTVNSQGALPGMVWQERDVYLQGPIWAKIPHTDGHFHPSPLMGGFGLKHPPPQILIKNTPVPANPPTTFSPAKFASFITQYSTGQVSVEIEWELQKENSKRWNPEIQYTSNYNKSTNVDFAVDTNGVYSEPRPIGTRYLTRNL

SEQ ID NO: 1572 - protein, 736 aa, Artificial Sequence
  Description of Artificial Sequence: Synthetic polypeptide
MAADGYLPDWLEDNLSEGIREWWDLKPGAPKPKANQQKQDDGRGLVLPGYKYLGPFNGLDKGEPVNAADAAALEHDKAYDQQLKAGDNPYLRYNHADAEFQERLQEDTSFGGNLGRAVFQAKKRVLEPLGLVEEGAKTAPGKKRPVEQSPQEPDSSSGIGKKGQQPARKRLNFGQTGDSESVPDPQPLGEPPAAPSGVGSNTMASGGGAPMADNNEGADGVGNASGNWHCDSTWLGDRVITTSTRTWALPTYNNHLYKQISSQSGGSTNDNTYFGYSTPWGYFDFNRFHCHFSPRDWQRLINNNWGFRPKKLNFKLFNIQVKEVTTNDGTTTIANNLTSTVQVFTDSEYQLPYVLGSAHQGCLPPFPADVFMIPQYGYLTLNNGSQAVGRSSFYCLEYFPSQMLRTGNNFEFSYTFEDVPFHSSYAHSQSLDRLMNPLIDQYLYYLSRTQTTSGTAGNRELQFSQAGPSSMANQAKNWLPGPCYRQQRVSKTTNQNNNSNFAWTGATKYHLNGRDSLVNPGPAMATHKDDEDKFFPMSGVLIFGKQGAGNSNVDLDNVMITSEEEIKTTNPVATEEYGTVATNLQSANTAPATGTVNSQGALPGMVWQDRDVYLQGPIWAKIPHTDGHFHPSPLMGGFGLKHPPPQILIKNTPVPANPPTTFSPAKFASFITQYSTGQVSVEIEWELQKENSKRWNPEIQYTSNYNKSTNVDFAVDTNGVYSEPRPIGTRYLTRNL

SEQ ID NO: 1573 - protein, 736 aa, Artificial Sequence
  Description of Artificial Sequence: Synthetic polypeptide
MAADGYLPDWLEDNLSEGIREWWDLKPGAPKPKANQQKQDDGRGLVLPGYKYLGPFNGLDKGEPVNAADAAALEHDKAYDQQLKAGDNPYLRYNHADAEFQERLQEDTSFGGNLGRAVFQAKKRVLEPLGLVEEGAKTAPGKKRPVEQSPQEPDSSSGIGKKGQQPARKRLNFGQTGDSESVPDPQPLGEPPAAPSGVGSNTMAAGGGAPMADNNEGADGVGNASGNWHCDSTWLGDRVITTSTRTWALPTYNNHLYKQISSQSGGSTNDNTYFGYSTPWGYFDFNRFHCHFSPRDWQRLINNNWGFRPKKLNFKLFNIQVKEVTTNDGTTTIANNLTSTVQVFTDSEYQLPYVLGSAHQGCLPPFPADVFMIPQYGYLTLNNGSQAVGRSSFYCLEYFPSQMLRTGNNFQFSYTFEDVPFHSSYAHSQSLDRLMNPLIDQYLYYLSRTQTTSGTAGNRTLQFSQAGPSSMANQAKNWLPGPCYRQQRVSKTTNQNNNSNFAWTGATKYHLNGRDSLVNPGPAMATHKDDEDKFFPMSGVLIFGKQGAGNSNVDLDNVMITNEEEIKTTNPVATEEYGTVATNLQSANTAPATGTVNSQGALPGMVWQDRDVYLQGPIWAKIPHTDGHFHPSPLMGGFGLKHPPPQILIKNTPVPANPPTTFSPAKFASFITQYSTGQVSVEIEWELQKENSKRWNPEIQYTSNYNKSTNVDFAVDTNGVYSEPRPIGTRYLTRNL

SEQ ID NO: 1574 - protein, 736 aa, Artificial Sequence
  Description of Artificial Sequence: Synthetic polypeptide
MAADGYLPDWLEDNLSEGIREWWDLKPGAPKPKANQQKQDDGRGLVLPGYKYLGPFNGLDKGEPVNAADAAALEHDKAYDQQLKAGDNPYLRYNHADAEFQERLQEDTSFGGNLGRAVFQAKKRVLEPLGLVEEGAKTAPGKKRPVEQSPQEPDSSSGIGKKGQQPAKKRLNFGQTGDSESVPDPQPLGEPPAAPSGVGSNTMAAGGGAPMADNNEGADGVGNASGNWHCDSTWLGDRVITTSTRTWALPTYNNHLYKQISSQSGGSTNDNTYFGYSTPWGYFDFNRFHCHFSPRDWQRLINNNWGFRPKKLNFKLFNIQVKEVTTNDGTTTIANNLTSTVQVFTDSEYQLPYVLGSAHQGCLPPFPADVFMIPQYGYLTLNNGSQAVGRSSFYCLEYFPSQMLRTGNNFEFSYTFEDVPFHSSYAHSQSLDRLMNPLIDQYLYYLSRTQTTSGTAGNRTLQFSQAGPSSMANQAKNWLPGPCYRQQRVSKTANQNNNSNFAWTGATKYHLNGRDSLVNPGPAMATHKDDEDKFFPMSGVLIFGKQGAGNSNVDLDNVMITSEEEIKTTNPVATEQYGTVATNLQSSNTAPATGTVNSQGALPGMVWQNRDVYLQGPIWAKIPHTDGHFHPSPLMGGFGLKHPPPQILIKNTPVPANPPTTFSPAKFASFITQYSTGQVSVEIEWELQKENSKRWNPEIQYTSNYNKSTNVDFAVDTNGVYSEPRPIGTRYLTRNL

SEQ ID NO: 1575 - protein, 736 aa, Artificial Sequence
  Description of Artificial Sequence: Synthetic polypeptide
MAADGYLPDWLEDNLSEGIREWWDLKPGAPKPKANQQKQDDGRGLVLPGYKYLGPFNGLDKGEPVNAADAAALEHDKAYDQQLKAGDNPYLRYNHADAEFQERLQEDTSFGGNLGRAVFQAKKRVLEPLGLVEEGAKTAPGKKRPVEQSPQEPDSSSGIGKKGQQPAKKRLNFGQTGDSESVPDPQPLGEPPAAPSGVGSNTMASGGGAPMADNNEGADGVGNASGNWHCDSTWLGDRVITTSTRTWALPTYNNHLYKQISSQSGGSTNDNTYFGYSTPWGYFDFNRFHCHFSPRDWQRLINNNWGFRPKKLNFKLFNIQVKEVTTNDGTTTIANNLTSTVQVFTDSEYQLPYVLGSAHQGCLPPFPADVFMIPQYGYLTLNNGSQAVGRSSFYCLEYFPSQMLRTGNNFEFSYTFEDVPFHSSYAHSQSLDRLMNPLIDQYLYYLSRTQTTSGTAGNRTLQFSQAGPSSMANQAKNWLPGPCYRQQRVSKTANQNNNSNFAWTGATKYHLNGRDSLVNPGPAMATHKDDEDKFFPMSGVLIFGKQGAGNSNVDLDNVMITSEEEIKTTNPVATEEYGTVATNLQSSNTAPATGTVNSQGALPGMVWQNRDVYLQGPIWAKIPHTDGHFHPSPLMGGFGLKHPPPQILIKNTPVPANPPTTFSPAKFASFITQYSTGQVSVEIEWELQKENSKRWNPEIQYTSNYNKSTNVDFAVDTNGVYSEPRPIGTRYLTRNL

SEQ ID NO: 1576 - protein, 736 aa, Artificial Sequence
  Description of Artificial Sequence: Synthetic polypeptide
MAADGYLPDWLEDNLSEGIREWWDLKPGAPKPKANQQKQDDGRGLVLPGYKYLGPFNGLDKGEPVNAADAAALEHDKAYDQQLKAGDNPYLRYNHADAEFQERLQEDTSFGGNLGRAVFQAKKRVLEPLGLVEEGAKTAPGKKRPVEQSPQEPDSSSGIGKKGQQPAKKRLNFGQTGDSESVPDPQPLGEPPAAPSGVGSNTMASGGGAPMADNNEGADGVGNASGNWHCDSTWLGDRVITTSTRTWALPTYNNHLYKQISSQSGGSTNDNTYFGYSTPWGYFDFNRFHCHFSPRDWQRLINNNWGFRPKKLNFKLFNIQVKEVTTNDGTTTIANNLTSTVQVFTDSEYQLPYVLGSAHQGCLPPFPADVFMIPQYGYLTLNNGSQAVGRSSFYCLEYFPSQMLRTGNNFQFSYTFEDVPFHSSYAHSQSLDRLMNPLIDQYLYYLSRTQTTSGTAGNRELQFSQAGPSSMANQAKNWLPGPCYRQQRVSKTTNQNNNSNFAWTGATKYHLNGRDSLVNPGPAMATHKDDEDKFFPMSGVLIFGKQGAGNSNVDLDNVMITNEEEIKTTNPVATEQYGTVATNLQSANTAPATGTVNSQGALPGMVWQDRDVYLQGPIWAKIPHTDGHFHPSPLMGGFGLKHPPPQILIKNTPVPANPPTTFSPAKFASFITQYSTGQVSVEIEWELQKENSKRWNPEIQYTSNYNKSTNVDFAVDTNGVYSEPRPIGTRYLTRNL

SEQ ID NO: 1577 - DNA, 2211 bp, Artificial Sequence
  Description of Artificial Sequence: Synthetic polynucleotide
atggctgccgatggttatcttccagattggctcgaggacaacctctctgagggcattcgcgagtggtgggacttgaaacctggagccccgaaacccaaagccaaccagcaaaagcaggacgacggccggggtctggtgcttcctggctacaagtacctcggacccttcaacggactcgacaagggggagcccgtcaacgcggcggacgcagcggccctcgagcacgacaaggcctacgaccagcagctcaaagcgggtgacaatccgtacctgcggtataaccacgccgacgccgagtttcaggagcgtctgcaagaagatacgtcttttgggggcaacctcgggcgagcagtcttccaggccaagaagcgggttctcgaacctctcggtctggttgaggaaggcgctaagacggctcctggaaagaagagaccggtagagcaatcaccccaggaaccagactcctcttcgggcatcggcaagaaaggccagcagcccgcgaaaaagagactcaactttgggcagacaggcgactcagagtcagtgcccgaccctcaaccactcggagaaccccccgcagccccctctggtgtgggatctaatacaatggctgcaggcggtggcgctccaatggcagacaataacgaaggcgccgacggagtgggtaacgcctcaggaaattggcattgcgattccacatggctgggcgacagagtcatcaccaccagcacccgaacctgggccctccccacctacaacaaccacctctacaagcaaatctccagccaatcgggagcaagcaccaacgacaacacctacttcggctacagcaccccctgggggtattttgactttaacagattccactgccacttctcaccacgtgactggcagcgactcatcaacaacaactggggattccggcccaagagactcaacttcaagctcttcaacatccaggtcaaggaggtcacgacgaatgatggcaccacgaccatcgccaataaccttaccagcacggttcaggtctttacggactcggaataccagctcccgtacgtcctcggctctgcgcaccagggctgcctgcctccgttcccggcggacgtcttcatgattcctcagtacgggtacctgactctgaacaatggcagtcaggccgtgggccgttcctccttctactgcctggagtactttccttctcaaatgctgagaacgggcaacaactttgagttcagctacacgtttgaggacgtgccttttcacagcagctacgcgcacagccaaagcctggaccggctgatgaaccccctcatcgaccagtacctgtactacctgtctcggactcagaccacgagtggtaccgcaggaaatcggacgttgcaattttctcaggccgggcctagtagcatggcgaatcaggccaaaaactggctacccgggccctgctaccggcagcaacgcgtctccaagacagcgaatcaaaataacaacagcaactttgcctggaccggtgccaccaagtatcatctgaatggcagagactctctggtaaatcccggtcccgctatggcaacccacaaggacgacgaagacaaattttttccgatgagcggagtcttaatatttgggaaacagggagctggaaatagcaacgtggaccttgacaacgttatgataaccagtgaggaagaaattaaaaccaccaacccagtggccacagaacagtacggcacggtggccactaacctgcaatcgtcaaacaccgctcctgctacagggaccgtcaacagtcaaggagccttacctggcatggtctggcagaaccgggacgtgtacctgcagggtcctatctgggccaagattcctcacacggacggacactttcatccctcgccgctgatgggaggctttggactgaaacacccgcctcctcagatcctgattaagaatacacctgttcccgcgaatcctccaactaccttcagtccagctaagtttgcgtcgttcatcacgcagtacagcaccggacaggtcagcgtggaaattgaatgggagctgcagaaagaaaacagcaaacgctggaacccagagattcaatacacttccaactacaacaaatctacaaatgtggactttgctgttgacacaaatggcgtttattctgagcctcgccccatcggcacccgttacctcacccgtaatctgtaa

SEQ ID NO: 1578 - protein, 738 aa, Artificial Sequence; identical to SEQ ID NO: 7
  Description of Artificial Sequence: Synthetic polypeptide

SEQ ID NO: 1579 - DNA, 2211 bp, Artificial Sequence
  Description of Artificial Sequence: Synthetic polynucleotide
atggctgccgatggttatcttccagattggctcgaggacaacctctctgagggcattcgcgagtggtgggacttgaaacctggagccccgaaacccaaagccaaccagcaaaagcaggacgacggccggggtctggtgcttcctggctacaagtacctcggacccttcaacggactcgacaagggggagcccgtcaacgcggcggacgcagcggccctcgagcacgacaaggcctacgaccagcagctcaaagcgggtgacaatccgtacctgcggtataaccacgccgacgccgagtttcaggagcgtctgcaagaagatacgtcttttgggggcaacctcgggcgagcagtcttccaggccaagaagcgggttctcgaaccttttggtctggttgaggaaggcgctaagacggctcctggaaagaaacgtccggtagagcagtcgccacaagagccagactcctcctcgggcatcggcaagacaggccagcagcccgctaaaaagagactcaattttggtcagactggcgactcagagtcagtccccgacccacaacctctcggagaacctccagcaacccccgctgctgtgggacctactacaatggcttcaggcggtggcgcaccaatggcagacaataacgaaggcgccgacggagtgggtaatgcctcaggaaattggcattgcgattccacatggctgggcgacagagtcatcaccaccagcacccgcacctgggccttgcccacctacaataaccacctctacaagcaaatctccagtgcttcaacgggggccagcaacgacaaccactacttcggctacagcaccccctgggggtattttgatttcaacagattccactgccacttttcaccgcgtgactggcagcgactcatcaacaacaattggggattccggcccaagagactcaacttcaagctcttcaacatccaagtcaaggaggtcacgacgagtgatggcgtcacaaccatcgctaataaccttaccagcacggttcaagtcttctcggactcggagtaccagcttccgtacgtcctcggctctgcgcaccagggctgcctccctccgttcccggcggacgtgttcatgattccgcaatacggctacctgacgctcaacaatggcagccaagccgtgggacgttcatccttttactgcctggaatatttcccttctcagatgctgagaacgggcaacaactttaccttcagctacacctttgaggaagtgcctttccacagcagctacgcgcacagccagagcctggaccggctgatgaatcctctcatcgaccaatacctgtattacctgaacagaactcaaaatcagtccggaagtgcccaaaacaaggacttgctgtttagccgtgggtctccagctggcatgtctgttcagcccaaaaactggctacctggaccctgttatcggcagcagcgcgtttctaaaacaaaaacaggcaacaacaacagcaattttacctggactggtgcttcaaaatataacctcaatgggcatgaatccatcatcaaccctggcactgctatggcctcacacaaagacgacgaagacaagttctttcccatgagcggtgtcatgatttttggaaaagagagcgccggagcttcaaacactgcattggacaatgtcatgattacagacgaagaggaaattaaagccactaaccctgtggccaccgaaagatttgggaccgtggcagtcaatttccagagcagcagcacacaccctgcgaccggagatgtgcatgttatgggagcattacctggcatggtgtggcaagatagagacgtgtacctgcagggtcccatctgggccaaaattcctcacacagatggacactttcacccgtctcctcttatgggcggctttggactcaagcacccgcctcctcagatcctcatcaaaaacacgcctgttcctgcgaatcctccggcggagttttcagctacaaagtttgcttcattcatcacccaatactccacaggacaagtgagtgtggaaattgaatgggagctgcagaaagaaaacagcaagcgctggaatcccgaagtgcagtacacatccaattatgcaaaatctgccaacgttgattttaccgtggacaacaatggactttatactgagcctcgccccattggcacccgttaccttacccgtcccctgtaa

SEQ ID NO: 1580 - DNA, 2211 bp, Artificial Sequence; identical to SEQ ID NO: 1579
  Description of Artificial Sequence: Synthetic polynucleotide

SEQ ID NO: 1581 - DNA, 2202 bp, Artificial Sequence
  Description of Artificial Sequence: Synthetic polynucleotide
atgactgacggttaccttccagattggctagaggacaacctctctgaaggcgttcgagagtggtgggcgctgcaacctggagcccctaaacccaaggcaaatcaacaacatcaggacaacgctcggggtcttgtgcttccgggttacaaatacctcggacccggcaacggacttgacaagggggaacccgtcaacgcagcggacgcggcagccctcgaacacgacaaggcctacgaccagcagctcaaggccggtgacaacccctacctcaagtacaaccacgccgacgccgagtttcaggagcgtcttcaagaagatacgtcttttgggggcaacctcggacgagcagtcttccaggccaaaaagaggatccttgagcctctgggtctggttgaggaagcggctaagacggctcctggaaaaaagagacctgtagagcaatctccagcagaaccggactcctcttcgggcatcggcaaatcaggccagcagcccgctagaaaaagactgaattttggtcagactggcgacacagagtcagtcccagaccctcaaccactcggacaacctcccgcagccccctctggtgtgggatctactacaatggcttcaggcggtggcgcaccaatggcagacaataacgagggtgccgatggagtgggtaattcctcaggaaattggcattgcgattcccaatggctgggcgacagagtcatcaccaccagcacccgcacctgggccctgcccacctacaacaatcacctctacaagcaaatctccagccaatcaggagccaccaacgacaaccactactttggctacagcaccccctgggggtattttgacttcaacagattccactgccacttttcaccacgtgactggcaaagactcatcaacaacaactggggattccgacccaagagactcaacttcaagctctttaacattcaagtcaaagaggtcacgcagaatgacggtacgacgacgattgccaataaccttaccagcacggttcaggtgtttactgactccgagtaccagctcccgtacgtcctcggctcggcgcatcagggatgcctcccgccgttcccagcagacgtcttcatggtcccacagtatggatacctcaccctgaacaacgggagtcaggcggtaggacgctcttccttttactgcctggagtactttccttctcagatgctgcgtactggaaacaactttcagtttagctacacttttgaagacgtgcctttccacagcagctacgctcacagccaaagtctggaccgtctcatgaatcctctgatcgaccagtacctgtactatctgaacaggacacaaacagccagtggaactcagcagtctcggctactgtttagccaagctggacccaccagtatgtctcttcaagctaaaaactggctgcctggaccttgctacagacagcagcgtctgtcaaagcaggcaaacgacaacaacaacagcaactttccctggactggtgccaccaaatatcatctgaatggccgggactcattggtgaacccgggccctgctatggccagtcacaaggatgacaaagaaaagtttttccccatgcatggaaccctgatatttggtaaagaaggaacaaatgccaacaacgcggatttggaaaatgtcatgattacagatgaagaagaaatccgcaccaccaatcccgtggctacggagcagtacgggactgtgtcaaataatttgcaaaactcaaacgctggtccaactactggaactgtcaatcaccaaggagcgttacctggtatggtgtggcaggatcgagacgtgtacctgcagggacccatttgggccaagattcctcacaccgatggacactttcatccttctccactgatgggaggttttgggctcaaacacccgcctcctcagatcatgatcaaaaacactcccgttccagccaatcctcccacaaactttagtgcggcaaagtttgcttccttcatcacacagtactccacggggcaggtcagcgtggagatcgagtgggagctgcagaaggagaacagcaaacgctggaatcccgaaattcagtacacttccaactacaacaaatctgttaatgtggactttactgtggacactaatggtgtgtattcagagcctcgccccattggcaccagatacctgactcgtaatctgtaa

SEQ ID NO: 1582 - DNA, 2211 bp, Artificial Sequence
  Description of Artificial Sequence: Synthetic polynucleotide
atggctgccgatggttatcttccagattggctcgaggacaacctctctgagggcattcgcgagtggtgggacttgaaacctggagccccgaaacccaaagccaaccagcaaaagcaggacgacggccggggtctggtgcttcctggctacaagtacctcggacccttcaacggactcgacaagggggagcccgtcaacgcggcggacgcagcggccctcgagcacgacaaggcctacgaccagcagctcaaagcgggtgacaatccgtacctgcggtataaccacgccgacgccgagtttcaggagcgtctgcaagaagatacgtcttttgggggcaacctcgggcgagcagtcttccaggccaagaagcgggttctcgaaccttttggtctggttgaggaaggcgctaagacggctcctggaaagaaacgtccggtagagcagtcgccacaagagccagactcctcctcgggcatcggcaagacaggccagcagcccgctaaaaagagactcaattttggtcagactggcgactcagagtcagtccccgacccacaacctctcggagaacctccagcaacccccgctgctgtgggacctactacaatggcttcaggcggtggcgcaccaatggcagacaataacgaaggcgccgacggagtgggtaatgcctcaggaaattggcattgcgattccacatggctgggcgacagagtcatcaccaccagcacccgcacctgggccttgcccacctacaataaccacctctacaagcaaatctccagtgcttcaacgggggccagcaacgacaaccactacttcggctacagcaccccctgggggtattttgatttcaacagattccactgccacttttcaccacgtgactggcagcgactcatcaacaacaattggggattccggcccaagagactcaacttcaagctcttcaacatccaagtcaaggaggtcacgacgaatgatggcgtcacaaccatcgctaataaccttaccagcacggttcaagtcttctcggactcggagtaccagcttccgtacgtcctcggctctgcgcaccagggctgcctccctccgttcccggcggacgtgttcatgattccgcaatacggctacctgacgctcaacaatggcagccaagccgtgggacgttcatccttttactgcctggaatatttcccttctcagatgctgagaacgggcaacaactttaccttcagctacacctttgaggaagtgcctttccacagcagctacgcgcacagccagagcctggaccggctgatgaatcctctcatcgaccaatacctgtattacctgaacagaactcaaaatcagtccggaagtgcccaaaacaaggacttgctgtttagccgtgggtctccagctggcatgtctgttcagcccaaaaactggctacctggaccctgttatcggcagcagcgcgtttctaaaacaaaaacagacaacaacaacagcaattttacctggactggtgcttcaaaatataacctcaatgggcgtgaatccatcatcaaccctggcactgctatggcctcacacaaagacgacgaagacaagttctttcccatgagcggtgtcatgatttttggaaaagagagcgccggagcttcaaacactgcattggacaatgtcatgattacagacgaagaggaaattaaagccactaaccctgtggccaccgaaagatttgggaccgtggcagtcaatttccagagcagcagcacagaccctgcgaccggagatgtgcatgttatgggagcattacctggcatggtgtggcaagatagagacgtgtacctgcagggtcccatctgggccaaaattcctcacacagatggacactttcacccgtctcctcttatgggcggctttggactcaagcacccgcctcctcagatcctcatcaaaaacacgcctgttcctgcgaatcctccggcggagttttcagctacaaagtttgcttcattcatcacccaatactccacaggacaagtgagtgtggaaattgaatgggagctgcagaaagaaaacagcaagcgctggaatcccgaagtgcagtacacatccaattatgcaaaatctgccaacgttgattttaccgtggacaacaatggactttatactgagcctcgccccattggcacccgttaccttacccgtcccctgtaa

SEQ ID NO: 1583 - DNA, 2211 bp, Artificial Sequence
  Description of Artificial Sequence: Synthetic polynucleotide
atggctgccgatggttatcttccagattggctcgaggacaacctctctgagggcattcgcaagtggtgggacttgaaacctggagccccgaaacccaaagccaaccagcaaaagcaggacgacggccggggtctggtgcttcctggctacaagtacctcggacccttcaacggactcgacaagggggagcccgtcaacgcggcggacgcagcggccctcgagcacgacaaggcctacgaccagcagctcaaagcgggtgacaatccgtacctgcggtataaccacgccgacgccgagtttcaggagcgtctgcaagaagatacgtcttttgggggcaacctcgggagagcagtcttccaggccaagaagcgggttctcgaaccttttggtctggttgaggaaggcgctaagacggctcctggaaagaaacgtccggtagagcagtcgccacaagagccagactcctcctcgggcatcggcaagacaggccagcagcccgctaaaaagagactcaattttggtcagactggcgactcagagtcagtccccgacccacaacctctcggagaacctccagcaacccccgctgctgtgggacctactacaatggcttcaggcggtggcgcaccaatggcagacaataacgaaggcgccgacggagtgggtaatgcctcaggaaattggcattgcgattccacatggctgggcgacagagtcatcaccaccagcacccgcacctgggccttgcccacctacaataaccacctctacaagcaaatctccagtgcttcaacgggggccagcaacgacaaccactacttcggctacagcaccccctgggggtattttgatttcaacagattccactgccacttttcaccacgtgactggcagcgactcatcaacaacaattggggattccggcccaagagactcaacttcaagctcttcaacatccaagtcaaggaggtcacgacgaatgatggcgtcacaaccatcgctaataaccttaccagcacggttcaagtcttctcggactcggagtaccagcttccgtacgtcctcggctctgcgcaccagggctgcctccctccgttcccggcggacgtgttcatgattccgcaatacggctacctgacgctcaacaatggcagccaagccgtgggacgttcatccttttactgcctggaatatttcccttctcagatgctgagaacgggcaacaactttaccttcagctacacctttgaggaagtgcctttccacagcagctacgcgcacagccagagcctggaccggctgatgaatcctctcatcgaccaatacctgtattacctgaacagaactcaaaatcagtccggaagtgcccaaaacaaggacttgctgtttagccgtgggtctccagctggcatgtctgttcagcccaaaaactggctacctggaccctgttatcggcagcagcgcgtttctaaaacaaaaacagacaacaacaacagcaattttacctggactggtgcttcaaaatataacctcaatgggcgtgaatccatcatcaaccctggcactgctatggcctcacacaaagacgacaaagacaagttctttcccatgagcggtgtcatgatttttggaaaagagagcgccggagcttcaaacactgcattggacaatgtcatgattacagacgaagaggaaattaaagccactaaccctgtggccaccgaaagatttgggaccgtggcagtcaatttccagagcagcagcacagaccctgcgaccggagatgtgcatgttatgggagcattacctggcatggtgtggcaagatagagacgtgtacctgcagggtcccatttgggccaaaattcctcacacagatggacactttcacccgtctcctcttatgggcggctttggactcaagcacccgcctcctcagatcctcatcaaaaacacacctgttcctgcgaatcctccggcggagttttcagctacaaagtttgcttcattcatcacccaatactccacaggacaagtgagtgtggaaattgaatgggagctgcagaaagaaaacagcaagcgctggaatcccgaagtgcagtacacatccaattatgcaaaatctgccaacgttgattttaccgtggacaacaatggactttatactgagcctcgccccattggcacccgttaccttacccgtcccctgtaa

SEQ ID NO: 1584 - DNA, 2211 bp, Artificial Sequence
  Description of Artificial Sequence: Synthetic polynucleotide
atggctgccgatggttatcttccagattggctcgaggacaacctctctgagggcattcgcgagtggtgggacttgaaacctggagccccgaaacccaaagccaaccagcaaaagcaggacaacggccggggtctggtgcttcctggctacaagtacctcggacccttcaacggactcgacaagggggagcccgtcaacgcggcggacgcagcggccctcgagcacgacaaggcctacgaccagcagctcaaagcgggtgacaatccgtacctgcggtataaccacgccgacgccgagtttcaggagcgtctgcaagaagatacgtcttttgggggcaacctcgggcgagcagtcttccaggccaagaagcgggttctcgaaccttttggtctggttgaggaaggcgctaagacggctcctggaaagaaacgtccggtagagcagtcgccacaagagccagactcctcctcgggcatcggcaagacaggccagcagcccgctaaaaagagactcaattttggtcagactggcgactcagagtcagtccccgacccacaacctctcggagaacctccagcaacccccgctgctgtgggacctactacaatggcttcaggcggtggcgcaccaatggcagacaataacgaaggcgccgacggagtgggtaatgcctcaggaaattggcattgcgattccacatggctgggcgacagagtcatcaccaccagcacccgcacctgggccttgcccacctacaataaccacctctacaagcaaatctccagtgcttcaacgggggccagcaacgacaaccactacttcggctacagcaccccctgggggtattttgatttcaacagattccactgccacttttcaccacgtgactggcagcgactcatcaacaacaattggggattccggcccaagagactcaacttcaagctcttcaacatccaagtcaaggaggtcacgacgaatgatggcgtcacaaccatcgctaataaccttaccagcacggttcaagtcttctcggactcggagtaccagcttccgtacgtcctcggctctgcgcaccagggctgcctccctccgttcccggcggacgtgttcatgattccgcaatacggctacctgacgctcaacaatggcagccaagccgtgggacgttcatccttttactgcctggaatatttcccttctcagatgctgagaacgggcaacaactttaccttcagctacacctttgaggaagtgcctttccacagcagctacgcgcacagccagagcctggaccggctgatgaatcctctcatcgaccaatacctgtattacctgaacagaactcaaaatcagtccggaagtgcccaaaacaaggacttgctgtttagccgtgggtctccagctggcatgtctgttcagcccaaaaactggctacctggaccctgttatcggcagcagcgcgtttctaaaacaaaaacagacaacaacaacagcaattttacctggactggtgcttcaaaatataacctcaatgggcgtgaatccatcatcaaccctggcactgctatggcctcacacaaagacgacgaagacaagttctttcccatgagcggtgtcatgatttttggaaaagagagcgccggagcttcaaacactgcattggacaatgtcatgattacagacgaagaggaaattaaagccactaaccctgtggccaccgaaagatttgggaccgtggcagtcaatttccagagcagcagcacacaccctgcgaccggagatgtgcatgttatgggagcattacctggcatggtgtggcaagatagagacgtgtacctgcagggtcccatctgggccaaaattcctcacacagatggacactttcacccgtctcctcttatgggcggctttggactcaagcacccgcctcctcagatcctcatcaaaaacacgcctgttcctgcgaatcctccggcggagttttcagctacaaagtttgcttcattcatcacccaatactccacaggacaagtgagtgtggaaattgaatgggagctgcagaaagaaaacagcaagcgctggaatcccgaagtgcagtacacatccaattatgcaaaatctgccaacgttgattttaccgtggacaacaatggactttatactgagcctcgccccattggcacccgttaccttacccgtcccctgtaa

SEQ ID NO: 1585 - DNA, 2211 bp, Artificial Sequence
  Description of Artificial Sequence: Synthetic polynucleotide
atggctgccgatggttatcttccagattggctcgaggacaacctctctgagggcattcgcgagtggtgggacttgaaacctggagccccgaaacccaaagccaaccagcaaaagcaggacgacggccggggtctggtgcttcctggctacaagtacctcggacccttcaacggactcgacaagggggagcccgtcaacgcggcggacgcagcggccctcgagcacgacaaggcctacgaccagcagctcaaagcgggtgacaatccgtacctgcggtataaccacgccgacgccgagtttcaggagcgtctgcaagaagatacgtcttttgggggcaacctcgggcgagcagtcttccaggccaaaaagcgggttctcgaaccttttggtctggttgaggaaggcgctaagacggctcctggaaagaaacgtccggtagagcagtcgccacaagagccagactcctcctcgggcatcggcaagacaggccagcagcccgctaaaaagagactcaattttggtcagactggcgactcagagtcagtccccgacccacaacctctcggagaacctccagcaacccccgctgctgtgggacctactacaatggcttcaggcggtggcgcaccaatggcagacaataacgaaggcgccgacggagtgggtaatgcctcaggaaattggcattgcgattccacatggctgggcgacagagtcatcaccaccagcacccgcacctgggccttgcccacctacaataaccacctctacaagcaaatctccagtgcttcaacgggggccagcaacgacaaccactacttcggctacagcaccccctgggggtattttgatttcaacagattccactgccacttttcaccacgtgactggcagcgactcatcaacaacaattggggattccggcccaagagactcaacttcaagctcttcaacatccaagtcaaggaggtcacgacgaatgatggcgtcacaaccatcgctaataaccttaccagcacggttcaagtcttctcggactcggagtaccagcttccgtacgtcctcggctctgcgcaccagggctgcctccctccgttcccggcggacgtgttcatgattccgcaatacggctacctgacgctcaacaatggcagccaagccgtgggacgttcatccttttattgcctggaatatttcccatcgcagatgctgagaacgggcaataactttaccttcagctacacctttgaggacgtgcctttccacagcagctacgcgcacagccagagcctggaccggctgatgaatcctctcatcgaccagtacctgtattacctgaacagaactcagaaccagtccggaagtgcccaaaacaaggacttgctgtttagccgggggtctccagctggcatgtctgttcagctcaaaaactggctacctggaccctgttatcggcagcagcgcgtttctaaaacaaaaacagacaacaacaacagcaattttacctggactggtgcttcaaaatataaccttaatgggcgtgaatccatcatcaaccctggcactgctatggcctcacacaaagacgacgaagacaagttctttcccatgagcggtgtcatgatttttggaaaagagagcgccggagcttcaaacactgcattggacaatgtcatgattacagacgaagaggaaattaaagccactaaccctgtggccaccgaaagatttgggaccgtggcagtcaatttccagagcagcagcacagaccctgcgaccggagatgtgcatgttatgggagcattacctggcatggtgtggcaagatagagacgtgtacctgcagggtcccatttgggccaaaattcctcacacagatggacactttcacccgtctcctcttatgggcggctttggactcaaacacccgcctcctcagatcctcatcaaaaacacacctgttcctgcgaatcctccggcggagttttcagctacaaagtttgcttcattcatcacccaatactccacaggacaagtgagcgtggaaattgaatgggagctgcagaaagaaaacagcaagcgctggaatcccgaagtgcagtacacatccaattatgcaaaatctgccaacgttgattttaccgtggacaacaatggactttatactgagcctcgccccattggcacccgttaccttacccgtcccctgtaa

SEQ ID NO: 1586 - DNA, 2211 bp, Artificial Sequence
  Description of Artificial Sequence: Synthetic polynucleotide
atggctgccgatggttatcttccagattggctcgaggacaacctctctgagggcattcgcgagtggtgggacttgaaacctggagccccgaaacccaaagccaaccagcaaaagcaggacgacggccggggtctggtgcttcctggctacaagtacctcggacccttcaacggactcgacaagggggagcccgtcaacgcggcggacgcagcggccctcgagcacgacaaggcctacgaccagcagctcaaagcgggtgacaatccgtacctgcggtataaccacgccgacgccgagtttcaggagcgtctgcaagaagatacgtcttttgggggcaacctcgggcgagcagtcttccaggccaagaagcgggttctcgaaccttttggtctggttgaggaaggtgctaagacggctcctggaaagaagagaccggtagagcagtcgccccaagaaccagactcctcatcgggcatcggcaaatcaggccagcagcccgctaaaaagagactcaattttggtcagactggcgactcagagtcagtccccgacccacaacctctcggagaacctccagcaacccccgctgctgtgggacctactacaatggcttcaggcggtggcgcaccaatggcagacaataacgaaggcgccgacggagtgggtaatgcctcaggaaattggcattgcgattccacatggctgggcgacagagtcattaccaccagcacccgaacctgggccctgcccacctataacaaccacctctacaaacaaatctccagcgcttcaacgggggccagcaacgacaaccactacttcggctacagcaccccctgggggtattttgattttaacagattccactgccacttctcaccacgtgactggcagcgactcatcaacaacaattggggattccggcccaagagactcaacttcaagctcttcaacatccaagtcaaggaggtcacgacgaacgatggcgtcacgaccatcgctaataaccttaccagcacggttcaagtcttctcggactcggagtaccagttgccgtacgtcctcggctctgcgcaccagggctgcctccctccgttcccggcggacgtgttcatgattccgcagtacggctacctaacactcaacaatggcagccaggccgtgggacgttcatccttttactgcctggaatatttcccatcgcagatgctgagaacgggcaataactttaccttcagctacacattcgaggacgtgcctttccacagcagctacgcgcacagccaaagcctggaccggctgatgaatcctctcatcgaccagtacttgtattacctaaacagaactcaaaatcagtccggaagtgcccaaaacaaggacttgctgtttagccgggggtctccagctggcatgtctgttcagcccaaaaactggctacctggaccctgttatcggcagcagcgcgtttctaaaacaaaaacagacaacaacaacagcaactttacctggactggtgcttcaaaatataaccttaatgggcgtgaatctataatcaaccctggcactgctatggcttcacacaaagacgacgaagacaagttctttccaatgagcggtgtcatgatttttggcaaggagagcgccggagcttcaaacactgcattggacaatgtcatgattacagacgaagaggaaattaaagccactaaccctgtggccaccgaaagatttgggaccgtggcagtcaatttccagagcagcagcacagaccctgcgaccggagatgtgcatgttatgggagcattacctggcatggtgtggcaagatagagacgtgtacctgcagggtccaatttgggccaaaattcctcacacagatggacactttcacccgtctcctcttatgggcggctttggacttaagcacccgcctcctcagatcctcatcaaaaacacgcctgttcctgcgaatcctccggcagagttttcggctacaaagtttgcttcattcatcacccagtattccacaggacaagtgagtgtggaaattgaatgggagttgcagaaagaaaacagcaagcgttggaatcccgaagtgcagtacacatctaattatgcaaaatctgccaacgttgatttcactgtggacaacaatggactttatactgagcctcgccccattggcacccgttacctcacccgtcccctgtaa

SEQ ID NO: 1587 - DNA, 2211 bp, Artificial Sequence
  Description of Artificial Sequence: Synthetic polynucleotide
atggctgccgatggttatcttccagattggctcgaggacaacctctctgagggcattcgcgagtggtgggacttgaaacctggagccccgaaacccaaagccaaccagcaaaagcaggacgacggccggggtctggtgcttcctggctacaagtacctcggacccttcaacggactcgacaagggggagcccgtcaacgcggcggacgcagcggccctcgagcacgacaaggcctacgaccagcagctcaaagcgggtgacaatccgtacctgcggtataaccacgccgacgccgagtttcaggagcgtctgcaagaagatacgtcttttgggggcaacctcgggcgagcagtcttccaggccaagaagagggttctcgaaccttttggtctggttgaggaaggtgctaagacggctcctggaaagaaacgtccggtagagcagtcaccccaagaaccagactcctcctcgggcattggcaaatcaggccagcagcccgctaaaaagagactcaattttggtcagactggcgactcagagtcagtccccgacccacaacctctcggagaacctccagcaacccccgctgctttgggacctactacaatggcttcaggcggtggcgcaccaatggcagacaataacgaaggcgccgacggagtgggtaatgcctcaggaaattggcattgcgattccacatggctgggcgacagagtcatcaccaccagcacccgcacctgggccttgcccacctacaataaccacctctacaagcaaatctccagtgcttcaacgggggccagcaacgacaaccactacttcggctacagcaccccctgggggtattttgatttcaacagattccactgccatttctcaccacgtgactggcagcgactcatcaacaacaactggggattccggcccaagagactcaacttcaagctcttcaacatccaagtcaaggaggtcacgacgaacgatggcgtcacgaccatcgctaataaccttaccagcacggttcaagtcttctcggactcggagtaccagcttccgtacgtcctcggctctgcgcaccagggctgcctccctccgttcccggcggacgtgttcatgattccgcagtacggctacctgacgctcaacaatggcagcaaagccgtgggacgttcatccttttactgcctggaatatttcccttctcagatgctgagaacgggcaacaactttaccttcagctacacctttgaggaagtgcctttccacagcagctacgcgcacagccagagcctggaccggctgatgaatcctctcatcgaccaatacctgtattacctgaacagaactcaaaatcagtccggaagtgcccaaaacaaggacttgctgtttagccgtgggtctccagctggcatgtctgttcagcccaaaaactggctacctggaccctgttatcggcagcagcgcgtttctaaaacaaaaacagacaacaacaacagcaattttacctggactggtgcttcaaaatataacctcaatgggcgtgaatccatcatcaaccctggcactgctatggcctcacacaaagacgacgaagacaagttctttcccatgagcggtgtcatgatttttggaaaagagagcgccggagcttcaaacactgcattggacaatgtcatgattacagacgaagaggaaattaaagccactaaccctgtggccaccgaaagatttgggaccgtggcagtcaatttccagagcagcagcacagaccctgcgaccggagatgtgcatgttatgggagcattacctggcatggtgtggcaagatagagacgtgtacctgcagggtcccatttgggccaaaattcctcacacggatggacactttcacccgtctcctcttatgggcggctttggactcaagcacccgcctcctcagatcctcatcaaaaacacacctgttcctgcgaatcctccggcagagttttcggctacaaagtttgcttcattcatcacccagtactccacaggacaagtgagcgtggaaattgaatgggagttgcagaaagaaaacagtaagcgctggaatcccgaagtgcagtacacatctaattatgcaaaatctgccaacgttgacttcactgtggacaacaatggactttatactgagcctcgccccattggcacccgttacctcacccgtcccctgtaa

SEQ ID NO: 1588 - DNA, 2970 bp, Artificial Sequence
  Description of Artificial Sequence: Synthetic polynucleotide
agatgaccgccaaggtcgtagagtccgccaaggccattctgggcggcagcaaggtgcgcgtggaccaaaaatgcaaggcctctgcgcagatcgaccccacccccgtgatcgtcacctccaacaccaacatgtgcgccgtgattgacgggaacagcaccaccttcgagcaccagcagcccctgcaggaccggatgttcaagtttgaactcacccgccgcctcgactacgactttggcaaggtcaccaagcaggaagtcaaggactttttccggtgggcggctgatcacgtgactgacgtggctcatgagttttacgtcacaaagggtggagctaagaaaaggcccgccccctctgacgaggatataagcgagcccaagcggccgcgcgtgtcatttgcgcagccggagacgtcagacgcggaagctcccggagacttcgccgacaggtaccaaaacaaatgttctcgtcacgcgggtatgctgcagatgctctttccctgcaagacgtgcgagagaatgaatcagaattccaacgtctgcttcacgcacggtcagaaagattgcggggagtgctttcccgggtcagaatctcaaccggtttctgtcgtcagaaaaacgtatcagaaactgtgcatccttcatcagctccggggggcacccgagatcgcctgctctgcttgcgaccaactcaaccccgatttggacgattgccaatttgagcaataaatgactgaaatcaggtatggctgctgacggttatcttccagattggctcgaggacaacctctctgaaggcattcgcgagtggtgggcgctgaaacctggagctccacaacccaaggccaaccaacagcatcaggacaacggcaggggtcttgtgcttcctgggtacaagtacctcggacccttcaacggactcgacaagggagagccggtcaacgaggcagacgccgcggccctcgagcacgacaaggcctacgacaagcagctcgagcagggggacaacccgtatctcaagtacaaccacggcgacgccgagttccagcagcgcttggcgaccgacacctcttttgggggcaacctcgggcgagcagtcttccaggccaaaaagaggattctcgagcctctgggtctggttgaagagggcgttaaaacggctcctggaaagaaacgcccattagaaaagactccaaatcggccgaccaacccggactctgggaaggccccggccaagaaaaagcaaaaagacggcgaaccagccgactctgctagaaggacactcgactttgaagactctggagcaggagacggaccccctgagggatcatcttccggagaaatgtctcatgatgctgagatgcgtgcggcgccaggcggaaatgctgtcgaggcgggacaaggtgccgatggagtgggtaatgcctccggtgattggcattgcgattccacctggtcagagggccgagtcaccaccaccagcacccgaacctgggtcctacccacgtacaacaaccacctgtacctgcgaatcggaacaacggccaacagcaacacctacaacggattctccaccccctggggatactttgactttaaccgcttccactgccacttttccccacgcgactggcagcgactcatcaacaacaactggggactcaggccgaaatcgatgcgtgttaaaatcttcaacatacaggtcaaggaggtcacgacgtcaaacggcgagactacggtcgctaataaccttaccagcacggttcagatctttgcggattcgacgtatgaactcccatacgtgatggacgccggtcaggaggggagctttcctccgtttcccaacgacgtctttatggttccccaatacggatactgcggagttgtcactggaaaaaaccagaaccagacagacagaaatgccttttactgcctggaatactttccatcccaaatgctaagaactggcaacaattttgaagtcagttaccaatttgaaaaagttcctttccattcaatgtacgcgcacagccagagcctggacagaatgatgaatcctttactggatcagtacctgtggcatctgcaatcgaccactaccggaaattcccttaatcaaggaacagctaccaccacgtacgggaaaattaccactggagactttgcctactacaggaaaaactggttgcctggagcctgcattaaacaacaaaaattttcaaagaatgccaatcaaaactacaagattcccgccagcgggggagacgcccttttaaagtatgacacgcataccactctaaatgggcgatggagtaacatggctcctggacctccaatggcaaccgcaggtgccggggactcggattttagcaacagccagctgatctttgccggacccaatccgagcggtaacacgaccacatcttcaaacaatttgttgtttacctcagaagaggagattgccacaacaaacccacgagacacggacatgtttggacagattgcagataataatcaaaatgccaccaccgcccctcacatcgctaacctggacgctatgggaattgttcccggaatggtctggcaaaacagagacatctactaccagggccctatttgggccaaggtccctcacacggacggacactttcacccttcgccgctgatgggaggatttggactgaaacacccgcctccacagattttcatcaaaaacacccccgtacccgccaatcccaatactacctttagcgctgcaaggattaattcttttctgacgcagtacagcaccggacaagttgccgttcagatcgactgggaaattcagaaggagcattccaaacgctggaatcccgaagttcaatttacttcaaactacggcactcaaaattctatgctgtgggctcccgacaatgctggcaactaccacgaactccgggctattgggtcccgtttcctcacccaccacttgtaa

SEQ ID NO: 1589 - protein, 736 aa, Artificial Sequence
  Description of Artificial Sequence: Synthetic polypeptide
MAADGYLPDWLEDNLSEGIREWWDLKPGAPKPKANQQKQDDGRGLVLPGYKYLGPFNGLDKGEPVNAADAAALEHDKAYDQQLKAGDNPYLRYNHADAEFQERLQEDTSFGGNLGRAVFQAKKRVLEPFGLVEEGAKTAPGKKRPVEQSPQEPDSSSGIGKTGQQPAKKRLNFGQTGDSESVPDPQPLGEPPATPAAVGPTTMASGGGAPMADNNEGADGVGNASGNWHCDSTWLGDRVITTSTRTWALPTYNNHLYKQISSASTGASNDNHYFGYSTPWGYFDFNRFHCHFSPRDWQRLINNNWGFRPKRLNFKLFNIQVKEVTTSDGVTTIANNLTSTVQVFSDSEYQLPYVLGSAHQGCLPPFPADVFMIPQYGYLTLNNGSQAVGRSSFYCLEYFPSQMLRTGNNFTFSYTFEEVPFHSSYAHSQSLDRLMNPLIDQYLYYLNRTQNQSGSAQNKDLLFSRGSPAGMSVQPKNWLPGPCYRQQRVSKTKTGNNNSNFTWTGASKYNLNGHESIINPGTAMASHKDDEDKFFPMSGVMIFGKESAGASNTALDNVMITDEEEIKATNPVATERFGTVAVNFQSSSTHPATGDVHVMGALPGMVWQDRDVYLQGPIWAKIPHTDGHFHPSPLMGGFGLKHPPPQILIKNTPVPANPPAEFSATKFASFITQYSTGQVSVEIEWELQKENSKRWNPEVQYTSNYAKSANVDFTVDNNGLYTEPRPIGTRYLTRPL

SEQ ID NO: 1590 - protein, 736 aa, Artificial Sequence; identical to SEQ ID NO: 1589
  Description of Artificial Sequence: Synthetic polypeptide

SEQ ID NO: 1591 - protein, 733 aa, Artificial Sequence
  Description of Artificial Sequence: Synthetic polypeptide
MTDGYLPDWLEDNLSEGVREWWALQPGAPKPKANQQHQDNARGLVLPGYKYLGPGNGLDKGEPVNAADAAALEHDKAYDQQLKAGDNPYLKYNHADAEFQERLQEDTSFGGNLGRAVFQAKKRILEPLGLVEEAAKTAPGKKRPVEQSPAEPDSSSGIGKSGQQPARKRLNFGQTGDTESVPDPQPLGQPPAAPSGVGSTTMASGGGAPMADNNEGADGVGNSSGNWHCDSQWLGDRVITTSTRTWALPTYNNHLYKQISSQSGATNDNHYFGYSTPWGYFDFNRFHCHFSPRDWQRLINNNWGFRPKRLNFKLFNIQVKEVTQNDGTTTIANNLTSTVQVFTDSEYQLPYVLGSAHQGCLPPFPADVFMVPQYGYLTLNNGSQAVGRSSFYCLEYFPSQMLRTGNNFQFSYTFEDVPFHSSYAHSQSLDRLMNPLIDQYLYYLNRTQTASGTQQSRLLFSQAGPTSMSLQAKNWLPGPCYRQQRLSKQANDNNNSNFPWTGATKYHLNGRDSLVNPGPAMASHKDDKEKFFPMHGTLIFGKEGTNANNADLENVMITDEEEIRTTNPVATEQYGTVSNNLQNSNAGPTTGTVNHQGALPGMVWQDRDVYLQGPIWAKIPHTDGHFHPSPLMGGFGLKHPPPQIMIKNTPVPANPPTNFSAAKFASFITQYSTGQVSVEIEWELQKENSKRWNPEIQYTSNYNKSVNVDFTVDTNGVYSEPRPIGTRYLTRNL

SEQ ID NO: 1592 - protein, 736 aa, Artificial Sequence; identical to SEQ ID NO: 757
  Description of Artificial Sequence: Synthetic polypeptide

SEQ ID NO: 1593 - protein, 736 aa, Artificial Sequence
  Description of Artificial Sequence: Synthetic polypeptide
MAADGYLPDWLEDNLSEGIRKWWDLKPGAPKPKANQQKQDDGRGLVLPGYKYLGPFNGLDKGEPVNAADAAALEHDKAYDQQLKAGDNPYLRYNHADAEFQERLQEDTSFGGNLGRAVFQAKKRVLEPFGLVEEGAKTAPGKKRPVEQSPQEPDSSSGIGKTGQQPAKKRLNFGQTGDSESVPDPQPLGEPPATPAAVGPTTMASGGGAPMADNNEGADGVGNASGNWHCDSTWLGDRVITTSTRTWALPTYNNHLYKQISSASTGASNDNHYFGYSTPWGYFDFNRFHCHFSPRDWQRLINNNWGFRPKRLNFKLFNIQVKEVTTNDGVTTIANNLTSTVQVFSDSEYQLPYVLGSAHQGCLPPFPADVFMIPQYGYLTLNNGSQAVGRSSFYCLEYFPSQMLRTGNNFTFSYTFEEVPFHSSYAHSQSLDRLMNPLIDQYLYYLNRTQNQSGSAQNKDLLFSRGSPAGMSVQPKNWLPGPCYRQQRVSKTKTDNNNSNFTWTGASKYNLNGRESIINPGTAMASHKDDKDKFFPMSGVMIFGKESAGASNTALDNVMITDEEEIKATNPVATERFGTVAVNFQSSSTDPATGDVHVMGALPGMVWQDRDVYLQGPIWAKIPHTDGHFHPSPLMGGFGLKHPPPQILIKNTPVPANPPAEFSATKFASFITQYSTGQVSVEIEWELQKENSKRWNPEVQYTSNYAKSANVDFTVDNNGLYTEPRPIGTRYLTRPL

SEQ ID NO: 1594 - protein, 736 aa, Artificial Sequence
  Description of Artificial Sequence: Synthetic polypeptide
MAADGYLPDWLEDNLSEGIREWWDLKPGAPKPKANQQKQDNGRGLVLPGYKYLGPFNGLDKGEPVNAADAAALEHDKAYDQQLKAGDNPYLRYNHADAEFQERLQEDTSFGGNLGRAVFQAKKRVLEPFGLVEEGAKTAPGKKRPVEQSPQEPDSSSGIGKTGQQPAKKRLNFGQTGDSESVPDPQPLGEPPATPAAVGPTTMASGGGAPMADNNEGADGVGNASGNWHCDSTWLGDRVITTSTRTWALPTYNNHLYKQISSASTGASNDNHYFGYSTPWGYFDFNRFHCHFSPRDWQRLINNNWGFRPKRLNFKLFNIQVKEVTTNDGVTTIANNLTSTVQVFSDSEYQLPYVLGSAHQGCLPPFPADVFMIPQYGYLTLNNGSQAVGRSSFYCLEYFPSQMLRTGNNFTFSYTFEEVPFHSSYAHSQSLDRLMNPLIDQYLYYLNRTQNQSGSAQNKDLLFSRGSPAGMSVQPKNWLPGPCYRQQRVSKTKTDNNNSNFTWTGASKYNLNGRESIINPGTAMASHKDDEDKFFPMSGVMIFGKESAGASNTALDNVMITDEEEIKATNPVATERFGTVAVNFQSSSTHPATGDVHVMGALPGMVWQDRDVYLQGPIWAKIPHTDGHFHPSPLMGGFGLKHPPPQILIKNTPVPANPPAEFSATKFASFITQYSTGQVSVEIEWELQKENSKRWNPEVQYTSNYAKSANVDFTVDNNGLYTEPRPIGTRYLTRPL

SEQ ID NO: 1595 - protein, 736 aa, Artificial Sequence
  Description of Artificial Sequence: Synthetic polypeptide
MAADGYLPDWLEDNLSEGIREWWDLKPGAPKPKANQQKQDDGRGLVLPGYKYLGPFNGLDKGEPVNAADAAALEHDKAYDQQLKAGDNPYLRYNHADAEFQERLQEDTSFGGNLGRAVFQAKKRVLEPFGLVEEGAKTAPGKKRPVEQSPQEPDSSSGIGKTGQQPAKKRLNFGQTGDSESVPDPQPLGEPPATPAAVGPTTMASGGGAPMADNNEGADGVGNASGNWHCDSTWLGDRVITTSTRTWALPTYNNHLYKQISSASTGASNDNHYFGYSTPWGYFDFNRFHCHFSPRDWQRLINNNWGFRPKRLNFKLFNIQVKEVTTNDGVTTIANNLTSTVQVFSDSEYQLPYVLGSAHQGCLPPFPADVFMIPQYGYLTLNNGSQAVGRSSFYCLEYFPSQMLRTGNNFTFSYTFEDVPFHSSYAHSQSLDRLMNPLIDQYLYYLNRTQNQSGSAQNKDLLFSRGSPAGMSVQLKNWLPGPCYRQQRVSKTKTDNNNSNFTWTGASKYNLNGRESIINPGTAMASHKDDEDKFFPMSGVMIFGKESAGASNTALDNVMITDEEEIKATNPVATERFGTVAVNFQSSSTDPATGDVHVMGALPGMVWQDRDVYLQGPIWAKIPHTDGHFHPSPLMGGFGLKHPPPQILIKNTPVPANPPAEFSATKFASFITQYSTGQVSVEIEWELQKENSKRWNPEVQYTSNYAKSANVDFTVDNNGLYTEPRPIGTRYLTRPL

SEQ ID NO: 1596 - protein, 736 aa, Artificial Sequence
  Description of Artificial Sequence: Synthetic polypeptide
MAADGYLPDWLEDNLSEGIREWWDLKPGAPKPKANQQKQDDGRGLVLPGYKYLGPFNGLDKGEPVNAADAAALEHDKAYDQQLKAGDNPYLRYNHADAEFQERLQEDTSFGGNLGRAVFQAKKRVLEPFGLVEEGAKTAPGKKRPVEQSPQEPDSSSGIGKSGQQPAKKRLNFGQTGDSESVPDPQPLGEPPATPAAVGPTTMASGGGAPMADNNEGADGVGNASGNWHCDSTWLGDRVITTSTRTWALPTYNNHLYKQISSASTGASNDNHYFGYSTPWGYFDFNRFHCHFSPRDWQRLINNNWGFRPKRLNFKLFNIQVKEVTTNDGVTTIANNLTSTVQVFSDSEYQLPYVLGSAHQGCLPPFPADVFMIPQYGYLTLNNGSQAVGRSSFYCLEYFPSQMLRTGNNFTFSYTFEDVPFHSSYAHSQSLDRLMNPLIDQYLYYLNRTQNQSGSAQNKDLLFSRGSPAGMSVQPKNWLPGPCYRQQRVSKTKTDNNNSNFTWTGASKYNLNGRESIINPGTAMASHKDDEDKFFPMSGVMIFGKGSAGASNTALDNVMITDEEEIKATNPVATERFGTVAVNFQSSSTDPATGDVHVMGALPGMVWQDRDVYLQGPIWAKIPHTDGHFHPSPLMGGFGLKHPPPQILIKNTPVPANPPAEFSATKFASFITQYSTGQVSVEIEWELQKENSKRWNPEVQYTSNYAKSANVDFTVDNNGLYTEPRPIGTRYLTRPL

SEQ ID NO: 1597 - protein, 736 aa, Artificial Sequence; identical to SEQ ID NO: 688
  Description of Artificial Sequence: Synthetic polypeptide

SEQ ID NO: 1598 - protein, 742 aa, Artificial Sequence
  Description of Artificial Sequence: Synthetic polypeptide
MAADGYLPDWLEDNLSEGIREWWALKPGAPQPKANQQHQDNGRGLVLPGYKYLGPFNGLDKGEPVNEADAAALEHDKAYDKQLEQGDNPYLKYNHADAEFQQRLATDTSFGGNLGRAVFQAKKRILEPLGLVEEGVKTAPGKKRPLEKTPNRPTNPDSGKAPAKKKQKDGEPADSARRTLDFEDSGAGDGPPEGSSSGEMSHDAEMRAAPGGNAVEAGQGADGVGNASGDWHCDSTWSEGRVTTTSTRTWVLPTYNNHLYLRIGTTANSNTYNGFSTPWGYFDFNRFHCHFSPRDWQRLINNNWGLRPKSMRVKIFNIQVKEVTTSNGETTVANNLTSTVQIFADSTYELPYVMDAGQEGSFPPFPNDVFMVPQYGYCGVVTGKNQNQTDRNAFYCLEYFPSQMLRTGNNFEVSYQFEKVPFHSMYAHSQSLDRMMNPLLDQYLWHLQSTTTGNSLNQGTATTTYGKITTGDFAYYRKNWLPGACIKQQKFSKNANQNYKIPASGGDALLKYDTHTTLNGRWSNMAPGPPMATAGAGDSDFSNSQLIFAGPNPSGNTTTSSNNLLFTSEEEIATTNPRDTDMFGQIADNNQNATTAPHIANLDAMGIVPGMVWQNRDIYYQGPIWAKVPHTDGHFHPSPLMGGFGLKHPPPQIFIKNTPVPANPNTTFSAARINSFLTQYSTGQVAVQIDWEIQKEHSKRWNPEVQFTSNYGTQNSMLWAPDNAGNYHELRAIGSRFLTHHL

SEQ ID NO: 1599 - DNA, 2211 bp, Artificial Sequence
  Description of Artificial Sequence: Synthetic polynucleotide
atggctgccgatggttatcttccagattggctcgaggacaacctctctgagggcattcgcgagtggtgggacttgaaacctggagccccgaagcccaaagccaaccagcaaaagcaggacgacggccggggtctggtgcttcctggctacaagtacctcggacccttcaacggactcgacaagggggagcccgtcaacgcggcggacgcagcggccctcgagcacgacaaggcctacgaccagcagctcaaagcgggtgacaatccgtacctgcggtataaccacgccgacgccgagtttcaggagcgtctgcaagaagatacgtcttttgggggcaacctcgggcgagcagtcttccaggccaagaagcgggttctcgaacctctcggtctggttgaggaaggcgctaaggcggctcctggaaagaaacgtccggtagagcagtcgccacaagagccagactcctcctcgggcatcggcaagacaggccagcagcccgctaaaaagagactcaattttggtcagactggcgactcagagtcagtccccgatccacaacctctcggagaacctccagcagccccctcaggtctgggacctaatacaatggcttcaggcggtggcgctccaatggcagacaataacgaaggcgccgacggagtgggtaattcctcgggaaattggcattgcgattccacatggctgggggacagagtcatcaccaccagcacccgaacctgggccctgcccacctacaacaaccacctctacaagcaaatctccaacggcacctcgggaggaagcaccaacgacaacacctattttggctacagcaccccctgggggtattttgacttcaacagattccactgtcacttttcaccacgtgactggcaacgactcatcaacaacaattggggattccggcccaaaagactcaacttcaagctgttcaacatccaggtcaaggaagtcacgacgaacgaaggcaccaagaccatcgccaataatctcaccagcaccgtgcaggtctttacggactcggagtaccagttaccgtacgtgctaggatccgctcaccagggatgtctgcctccgttcccggcggacgtcttcatggttcctcagtacggctatttaactttaaacaatggaagccaagccctgggacgttcctccttctactgtctggagtatttcccatcgcagatgctgagaaccggcaacaactttcagttcagctacaccttcgaggacgtgcctttccacagcagctacgcgcacagccagagcctggacaggctgatgaatcccctcatcgaccagtacctgtactacctggtcagaacgcaaacgactggaactggagggacgcagactctggcattcagccaagcgggtcctagctcaatggccaaccaggctagaaattgggtgcccggaccttgctaccggcagcagcgcgtctccacgacaaccaaccagaacaacaacagcaactttgcctggacgggagctgccaagtttaagctgaacggccgagactctctaatgaatccgggcgtggcaatggcttcccacaaggatgacgacgaccgcttcttcccttcgagcggggtcctgatttttggcaagcaaggagccgggaacgatggagtggattacagccaagtgctgattacagatgaggaagaaatcaaggctaccaaccccgtggccacagaagaatatggagcagtggccatcaacaaccaggccgccaatacgcaggcgcagaccggactcgtgcacaaccagggggtgattcccggcatggtgtggcagaatagagacgtgtacctgcagggtcccatctgggccaaaattcctcacacggacggcaactttcacccgtctcccctgatgggcggctttggactgaagcacccgcctcctcaaattctcatcaagaacacaccggttccagcggacccgccgcttaccttcaaccaggccaagctgaactctttcatcacgcagtacagcaccggacaggtcagcgtggaaatcgagtgggagctgcagaaagaaaacagcaaacgctggaatccagagattcaatacacttccaactactacaaatctacaaatgtggactttgctgtcaacacggagggggtttatagcgagcctcgccccattggcacccgttacctcacccgcaacctgtaa

SEQ ID NO: 1600 - DNA, 2592 bp, Artificial Sequence
  Description of Artificial Sequence: Synthetic polynucleotide
ctggctgccgatggttatcttccagattggctcgaggacaacctctctgagggcattcgcgagtggtgggacttgaaacctggagccccgaagcccaaagccaaccagcaaaagcaggacgacggccggggtctggtgcttcctggctacaagtacctcggacccttcaacggactcgacaagggggagcccgtcaacgcggcggacgcagcggccctcgagcacgacaaggcctacgaccagcagctcaaagcgggtgacaatccgtacctgcggtataaccacgccgacgccgagtttcaggagcgtctgcaagaagatacgtcttttgggggcaacctcgggcgagcagtcttccaggccaagaagcgggttctcgaacctctcggtctggttgaggaaggcgctaagatggaagtgcagctccaagccagtggtggcggactggtgcaggcaggaggcagcttgaggctcagctgtgccgccagcggcttcaagatcacccactacaccatgggctggttccggcaggcccctggcaaggagagggagttcgtgagcaggattacctggggtggtgacaacaccttctacagcaacagcgtgaagggcaggttcaccatcagcagggacaacgccaagaacaccgtgtacctgcagatgaacagcctgaagcccgaggacaccgccgactactactgtgcagccggcagtaccagcaccgctacccccctgagggtggactactggggcaaaggcactcaggtgacagtgtcttcaggagggggtggcagcgctcctggaaagaaacgtccggtagagcagtcgccacaagagccagactcctcctcgggcatcggcaagacaggccagcagcccgctaaaaagagactcaattttggtcagactggcgactcagagtcagtccccgatccacaacctctcggagaacctccagcagccccctcaggtctgggacctaatacaatggcttcaggcggtggcgctccaatggcagacaataacgaaggcgccgacggagtgggtaattcctcgggaaattggcattgcgattccacatggctgggggacagagtcatcaccaccagcacccgaacctgggccctgcccacctacaacaaccacctctacaagcaaatctccaacggcacctcgggaggaagcaccaacgacaacacctattttggctacagcaccccctgggggtattttgacttcaacagattccactgtcacttttcaccacgtgactggcaacgactcatcaacaacaattggggattccggcccaaaagactcaacttcaagctgttcaacatccaggtcaaggaagtcacgacgaacgaaggcaccaagaccatcgccaataatctcaccagcaccgtgcaggtctttacggactcggagtaccagttaccgtacgtgctaggatccgctcaccagggatgtctgcctccgttcccggcggacgtcttcatggttcctcagtacggctatttaactttaaacaatggaagccaagccctgggacgttcctccttctactgtctggagtatttcccatcgcagatgctgagaaccggcaacaactttcagttcagctacaccttcgaggacgtgcctttccacagcagctacgcgcacagccagagcctggacaggctgatgaatcccctcatcgaccagtacctgtactacctggtcagaacgcaaacgactggaactggagggacgcagactctggcattcagccaagcgggtcctagctcaatggccaaccaggctagaaattgggtgcccggaccttgctaccggcagcagcgcgtctccacgacaaccaaccagaacaacaacagcaactttgcctggacgggagctgccaagtttaagctgaacggccgagactctctaatgaatccgggcgtggcaatggcttcccacaaggatgacgacgaccgcttcttcccttcgagcggggtcctgatttttggcaagcaaggagccgggaacgatggagtggattacagccaagtgctgattacagatgaggaagaaatcaaggctaccaaccccgtggccacagaagaatatggagcagtggccatcaacaaccaggccgccaatacgcaggcgcagaccggactcgtgcacaaccagggggtgattcccggcatggtgtggcagaatagagacgtgtacctgcagggtcccatctgggccaaaattcctcacacggacggcaactttcacccgtctcccctgatgggcggctttggactgaagcacccgcctcctcaaattctcatcaagaacacaccggttccagcggacccgccgcttaccttcaaccaggccaagctgaactctttcatcacgcagtacagcaccggacaggtcagcgtggaaatcgagtgggagctgcagaaagaaaacagcaaacgctggaatccagagattcaatacacttccaactactacaaatctacaaatgtggactttgctgtcaacacggagggggtttatagcgagcctcgccccattggcacccgttacctcacccgcaacctgtaa

SEQ ID NO: 1601 - DNA, 2601 bp, Artificial Sequence
  Description of Artificial Sequence: Synthetic polynucleotide
ctggctgccgatggttatcttccagattggctcgaggacaacctctctgagggcattcgcgagtggtgggacttgaaacctggagccccgaagcccaaagccaaccagcaaaagcaggacgacggccggggtctggtgcttcctggctacaagtacctcggacccttcaacggactcgacaagggggagcccgtcaacgcggcggacgcagcggccctcgagcacgacaaggcctacgaccagcagctcaaagcgggtgacaatccgtacctgcggtataaccacgccgacgccgagtttcaggagcgtctgcaagaagatacgtcttttgggggcaacctcgggcgagcagtcttccaggccaagaagcgggttctcgaacctctcggtctggttgaggaaggcgctaagatggaggtgcagctgcaggcttctggaggaggactggtgcaggctggagggagtctgaggctgtcttgcagtgcctcagtgaggactttctccatctacgccatgggctggtttaggcaggctcccgggaaggagcgcgaattcgtggccggaatcaaccggtctggcgacgtgaccaagtacgctgatttcgtgaaaggccggtttagcatttccagagacaacgccaagaatatggtgtatctgcagatgaactccctgaaacctgaagacacagctctgtactattgtgccgctacttgggcctacgataccgtgggggctctgacatcaggatataatttttggggccaggggacccaggtgacagtgagctccggaggaggaggaagcgctcctggaaagaaacgtccggtagagcagtcgccacaagagccagactcctcctcgggcatcggcaagacaggccagcagcccgctaaaaagagactcaattttggtcagactggcgactcagagtcagtccccgatccacaacctctcggagaacctccagcagccccctcaggtctgggacctaatacaatggcttcaggcggtggcgctccaatggcagacaataacgaaggcgccgacggagtgggtaattcctcgggaaattggcattgcgattccacatggctgggggacagagtcatcaccaccagcacccgaacctgggccctgcccacctacaacaaccacctctacaagcaaatctccaacggcacctcgggaggaagcaccaacgacaacacctattttggctacagcaccccctgggggtattttgacttcaacagattccactgtcacttttcaccacgtgactggcaacgactcatcaacaacaattggggattccggcccaaaagactcaacttcaagctgttcaacatccaggtcaaggaagtcacgacgaacgaaggcaccaagaccatcgccaataatctcaccagcaccgtgcaggtctttacggactcggagtaccagttaccgtacgtgctaggatccgctcaccagggatgtctgcctccgttcccggcggacgtcttcatggttcctcagtacggctatttaactttaaacaatggaagccaagccctgggacgttcctccttctactgtctggagtatttcccatcgcagatgctgagaaccggcaacaactttcagttcagctacaccttcgaggacgtgcctttccacagcagctacgcgcacagccagagcctggacaggctgatgaatcccctcatcgaccagtacctgtactacctggtcagaacgcaaacgactggaactggagggacgcagactctggcattcagccaagcgggtcctagctcaatggccaaccaggctagaaattgggtgcccggaccttgctaccggcagcagcgcgtctccacgacaaccaaccagaacaacaacagcaactttgcctggacgggagctgccaagtttaagctgaacggccgagactctctaatgaatccgggcgtggcaatggcttcccacaaggatgacgacgaccgcttcttcccttcgagcggggtcctgatttttggcaagcaaggagccgggaacgatggagtggattacagccaagtgctgattacagatgaggaagaaatcaaggctaccaaccccgtggccacagaagaatatggagcagtggccatcaacaaccaggccgccaatacgcaggcgcagaccggactcgtgcacaaccagggggtgattcccggcatggtgtggcagaatagagacgtgtacctgcagggtcccatctgggccaaaattcctcacacggacggcaactttcacccgtctcccctgatgggcggctttggactgaagcacccgcctcctcaaattctcatcaagaacacaccggttccagcggacccgccgcttaccttcaaccaggccaagctgaactctttcatcacgcagtacagcaccggacaggtcagcgtggaaatcgagtgggagctgcagaaagaaaacagcaaacgctggaatccagagattcaatacacttccaactactacaaatctacaaatgtggactttgctgtcaacacggagggggtttatagcgagcctcgccccattggcacccgttacctcacccgcaacctgtaa

SEQ ID NO: 1602 - DNA, 2367 bp, Artificial Sequence
  Description of Artificial Sequence: Synthetic polynucleotide
ctggctgccgatggttatcttccagattggctcgaggacaacctctctgagggcattcgcgagtggtgggacttgaaacctggagccccgaagcccaaagccaaccagcaaaagcaggacgacggccggggtctggtgcttcctggctacaagtacctcggacccttcaacggactcgacaagggggagcccgtcaacgcggcggacgcagcggccctcgagcacgacaaggcctacgaccagcagctcaaagcgggtgacaatccgtacctgcggtataaccacgccgacgccgagtttcaggagcgtctgcaagaagatacgtcttttgggggcaacctcgggcgagcagtcttccaggccaagaagcgggttctcgaacctctcggtctggttgaggaaggcgctaagatgccaagcagtgtaatcgatgcgctgcagtacaagctggagggcaccacgaggctgaccaggaagaggggtctgaagctggccacggccctcagccttagcaataagttcgtagagggcagccccagcggcggcggcggcagcggcggcggcggcagcgctcctggaaagaaacgtccggtagagcagtcgccacaagagccagactcctcctcgggcatcggcaagacaggccagcagcccgctaaaaagagactcaattttggtcagactggcgactcagagtcagtccccgatccacaacctctcggagaacctccagcagccccctcaggtctgggacctaatacaatggcttcaggcggtggcgctccaatggcagacaataacgaaggcgccgacggagtgggtaattcctcgggaaattggcattgcgattccacatggctgggggacagagtcatcaccaccagcacccgaacctgggccctgcccacctacaacaaccacctctacaagcaaatctccaacggcacctcgggaggaagcaccaacgacaacacctattttggctacagcaccccctgggggtattttgacttcaacagattccactgtcacttttcaccacgtgactggcaacgactcatcaacaacaattggggattccggcccaaaagactcaacttcaagctgttcaacatccaggtcaaggaagtcacgacgaacgaaggcaccaagaccatcgccaataatctcaccagcaccgtgcaggtctttacggactcggagtaccagttaccgtacgtgctaggatccgctcaccagggatgtctgcctccgttcccggcggacgtcttcatggttcctcagtacggctatttaactttaaacaatggaagccaagccctgggacgttcctccttctactgtctggagtatttcccatcgcagatgctgagaaccggcaacaactttcagttcagctacaccttcgaggacgtgcctttccacagcagctacgcgcacagccagagcctggacaggctgatgaatcccctcatcgaccagtacctgtactacctggtcagaacgcaaacgactggaactggagggacgcagactctggcattcagccaagcgggtcctagctcaatggccaaccaggctagaaattgggtgcccggaccttgctaccggcagcagcgcgtctccacgacaaccaaccagaacaacaacagcaactttgcctggacgggagctgccaagtttaagctgaacggccgagactctctaatgaatccgggcgtggcaatggcttcccacaaggatgacgacgaccgcttcttcccttcgagcggggtcctgatttttggcaagcaaggagccgggaacgatggagtggattacagccaagtgctgattacagatgaggaagaaatcaaggctaccaaccccgtggccacagaagaatatggagcagtggccatcaacaaccaggccgccaatacgcaggcgcagaccggactcgtgcacaaccagggggtgattcccggcatggtgtggcagaatagagacgtgtacctgcagggtcccatctgggccaaaattcctcacacggacggcaactttcacccgtctcccctgatgggcggctttggactgaagcacccgcctcctcaaattctcatcaagaacacaccggttccagcggacccgccgcttaccttcaaccaggccaagctgaactctttcatcacgcagtacagcaccggacaggtcagcgtggaaatcgagtgggagctgcagaaagaaaacagcaaacgctggaatccagagattcaatacacttccaactactacaaatctacaaatgtggactttgctgtcaacacggagggggtttatagcgagcctcgccccattggcacccgttacctcacccgcaacctgtaa

SEQ ID NO: 1603 - DNA, 2328 bp, Artificial Sequence
  Description of Artificial Sequence: Synthetic polynucleotide
ctggctgccgatggttatcttccagattggctcgaggacaacctctctgagggcattcgcgagtggtgggacttgaaacctggagccccgaagcccaaagccaaccagcaaaagcaggacgacggccggggtctggtgcttcctggctacaagtacctcggacccttcaacggactcgacaagggggagcccgtcaacgcggcggacgcagcggccctcgagcacgacaaggcctacgaccagcagctcaaagcgggtgacaatccgtacctgcggtataaccacgccgacgccgagtttcaggagcgtctgcaagaagatacgtcttttgggggcaacctcgggcgagcagtcttccaggccaagaagcgggttctcgaacctctcggtctggttgaggaaggcgctaagatgtataccatctggatgcccgagaaccccaggcccggtaccccctgcgacatcttcaccaacagcaggggcaagcgagccagcaacggcggcggcggcggcagcggcggcggcggcagcgctcctggaaagaaacgtccggtagagcagtcgccacaagagccagactcctcctcgggcatcggcaagacaggccagcagcccgctaaaaagagactcaattttggtcagactggcgactcagagtcagtccccgatccacaacctctcggagaacctccagcagccccctcaggtctgggacctaatacaatggcttcaggcggtggcgctccaatggcagacaataacgaaggcgccgacggagtgggtaattcctcgggaaattggcattgcgattccacatggctgggggacagagtcatcaccaccagcacccgaacctgggccctgcccacctacaacaaccacctctacaagcaaatctccaacggcacctcgggaggaagcaccaacgacaacacctattttggctacagcaccccctgggggtattttgacttcaacagattccactgtcacttttcaccacgtgactggcaacgactcatcaacaacaattggggattccggcccaaaagactcaacttcaagctgttcaacatccaggtcaaggaagtcacgacgaacgaaggcaccaagaccatcgccaataatctcaccagcaccgtgcaggtctttacggactcggagtaccagttaccgtacgtgctaggatccgctcaccagggatgtctgcctccgttcccggcggacgtcttcatggttcctcagtacggctatttaactttaaacaatggaagccaagccctgggacgttcctccttctactgtctggagtatttcccatcgcagatgctgagaaccggcaacaactttcagttcagctacaccttcgaggacgtgcctttccacagcagctacgcgcacagccagagcctggacaggctgatgaatcccctcatcgaccagtacctgtactacctggtcagaacgcaaacgactggaactggagggacgcagactctggcattcagccaagcgggtcctagctcaatggccaaccaggctagaaattgggtgcccggaccttgctaccggcagcagcgcgtctccacgacaaccaaccagaacaacaacagcaactttgcctggacgggagctgccaagtttaagctgaacggccgagactctctaatgaatccgggcgtggcaatggcttcccacaaggatgacgacgaccgcttcttcccttcgagcggggtcctgatttttggcaagcaaggagccgggaacgatggagtggattacagccaagtgctgattacagatgaggaagaaatcaaggctaccaaccccgtggccacagaagaatatggagcagtggccatcaacaaccaggccgccaatacgcaggcgcagaccggactcgtgcacaaccagggggtgattcccggcatggtgtggcagaatagagacgtgtacctgcagggtcccatctgggccaaaattcctcacacggacggcaactttcacccgtctcccctgatgggcggctttggactgaagcacccgcctcctcaaattctcatcaagaacacaccggttccagcggacccgccgcttaccttcaaccaggccaagctgaactctttcatcacgcagtacagcaccggacaggtcagcgtggaaatcgagtgggagctgcagaaagaaaacagcaaacgctggaatccagagattcaatacacttccaactactacaaatctacaaatgtggactttgctgtcaacacggagggggtttatagcgagcctcgccccattggcacccgttacctcacccgcaacctgtaa

SEQ ID NO: 1604 - DNA, 2298 bp, Artificial Sequence
  Description of Artificial Sequence: Synthetic polynucleotide
ctggctgccgatggttatcttccagattggctcgaggacaacctctctgagggcattcgcgagtggtgggacttgaaacctggagccccgaagcccaaagccaaccagcaaaagcaggacgacggccggggtctggtgcttcctggctacaagtacctcggacccttcaacggactcgacaagggggagcccgtcaacgcggcggacgcagcggccctcgagcacgacaaggcctacgaccagcagctcaaagcgggtgacaatccgtacctgcggtataaccacgccgacgccgagtttcaggagcgtctgcaagaagatacgtcttttgggggcaacctcgggcgagcagtcttccaggccaagaagcgggttctcgaacctctcggtctggttgaggaaggcgctaagatgaccttcttctacggcggcagcaggggcaagaggaacaacttcaagaccgaggagtacggcggcggcggcagcggcggcggcggcagcgctcctggaaagaaacgtccggtagagcagtcgccacaagagccagactcctcctcgggcatcggcaagacaggccagcagcccgctaaaaagagactcaattttggtcagactggcgactcagagtcagtccccgatccacaacctctcggagaacctccagcagccccctcaggtctgggacctaatacaatggcttcaggcggtggcgctccaatggcagacaataacgaaggcgccgacggagtgggtaattcctcgggaaattggcattgcgattccacatggctgggggacagagtcatcaccaccagcacccgaacctgggccctgcccacctacaacaaccacctctacaagcaaatctccaacggcacctcgggaggaagcaccaacgacaacacctattttggctacagcaccccctgggggtattttgacttcaacagattccactgtcacttttcaccacgtgactggcaacgactcatcaacaacaattggggattccggcccaaaagactcaacttcaagctgttcaacatccaggtcaaggaagtcacgacgaacgaaggcaccaagaccatcgccaataatctcaccagcaccgtgcaggtctttacggactcggagtaccagttaccgtacgtgctaggatccgctcaccagggatgtctgcctccgttcccggcggacgtcttcatggttcctcagtacggctatttaactttaaacaatggaagccaagccctgggacgttcctccttctactgtctggagtatttcccatcgcagatgctgagaaccggcaacaactttcagttcagctacaccttcgaggacgtgcctttccacagcagctacgcgcacagccagagcctggacaggctgatgaatcccctcatcgaccagtacctgtactacctggtcagaacgcaaacgactggaactggagggacgcagactctggcattcagccaagcgggtcctagctcaatggccaaccaggctagaaattgggtgcccggaccttgctaccggcagcagcgcgtctccacgacaaccaaccagaacaacaacagcaactttgcctggacgggagctgccaagtttaagctgaacggccgagactctctaatgaatccgggcgtggcaatggcttcccacaaggatgacgacgaccgcttcttcccttcgagcggggtcctgatttttggcaagcaaggagccgggaacgatggagtggattacagccaagtgctgattacagatgaggaagaaatcaaggctaccaaccccgtggccacagaagaatatggagcagtggccatcaacaaccaggccgccaatacgcaggcgcagaccggactcgtgcacaaccagggggtgattcccggcatggtgtggcagaatagagacgtgtacctgcagggtcccatctgggccaaaattcctcacacggacggcaactttcacccgtctcccctgatgggcggctttggactgaagcacccgcctcctcaaattctcatcaagaacacaccggttccagcggacccgccgcttaccttcaaccaggccaagctgaactctttcatcacgcagtacagcaccggacaggtcagcgtggaaatcgagtgggagctgcagaaagaaaacagcaaacgctggaatccagagattcaatacacttccaactactacaaatctacaaatgtggactttgctgtcaacacggagggggtttatagcgagcctcgccccattggcacccgttacctcacccgcaacctgtaa

SEQ ID NO: 1605 - DNA, 2211 bp, Artificial Sequence
  Description of Artificial Sequence: Synthetic polynucleotide
atggctgccgatggttatcttccagattggctcgaggacaaccttagtgaaggaattcgcgagtggtgggctttgaaacctggagcccctcaacccaaggcaaatcaacaacatcaagacaacgctcgaggtcttgtgcttccgggttacaaataccttggacccggcaacggactcgacaagggggagccggtcaacgcagcagacgcggcggccctcgagcacgacaaggcctacgaccagcagctcaaggccggagacaacccgtacctcaagtacaaccacgccgacgccgagttccaggagcggctcaaagaagatacgtcttttgggggcaacctcgggcgagcagtcttccaggccaaaaagaggcttcttgaacctcttggtctggttgaggaagcggctaaggcggctcctggaaagaagaggcctgtagagcagtctcctcaggaaccggactcctccgcgggtattggcaaatcgggtgcacagcccgctaaaaagagactcaatttcggtcagactggcgacacagagtcagtcccagaccctcaaccaatcggagaacctcccgcagccccctcaggtgtgggatctcttacaatggcttcaggtggtggcgcaccagtggcagacaataacgaaggtgccgatggagtgggtagttcctcgggaaattggcattgcgattcccaatggctgggggacagagtcatcaccaccagcacccgaacctgggccctgcccacctacaacaatcacctctacaagcaaatctccaacagcacatctggaggatcttcaaatgacaacgcctacttcggctacagcaccccctgggggtattttgacttcaacagattccactgccacttctcaccacgtgactggcagcgactcatcaacaacaactggggattccggcctaagcgactcaacttcaagctcttcaacattcaggtcaaagaggttacggacaacaatggagtcaagaccatcgccaataaccttaccagcacggtccaggtcttcacggactcagactatcagctcccgtacgtgctcgggtcggctcacgagggctgcctcccgccgttcccagcggacgttttcatgattcctcagtacgggtatctgacgcttaatgatggaagccaggccgtgggtcgttcgtccttttactgcctggaatatttcccgtcgcaaatgctaagaacgggtaacaacttccagttcaactacgagtttgagaacgtacctttccatagcagctacgctcacagccaaagcctggaccgactaatgaatccactcatcgaccaatacttgtactatctctcaaagactattaacgattctggacagaatcaacaaacgctaaaattcagtgtggccggacccagcaacatggctgtccagggaagaaactacatacctggacccagctaccgacaacaacgtgtctcaaccactgtgactcaaaacaacaacagcgaatttgcttggcctggagcttcttcttgggctctcaatggacgtaatagcttgatgaatcctggacctgctatggccagccacaaagaaggagaggaccgtttctttcctttgtctggatctttaatttttggcaaacaaggaactggaagagacaacgtggatgcggacgaagtcatgataaccaacgaagaagaaattaaaactactaacccggtagcaacggagtcctatggacaagtggccataaaccaccagagtgcccaagcacaggcgcagaccggctgggttcaaaaccaaggaatacttccgggtatggtttggcaggacagagatgtgtacctgcaaggacccatttgggccaaaattcctcacacggacggcaactttcacccttctccgctgatgggagggtttggaatgaagcacccgcctcctcagatcctcatcaaaaacacacctgtacctgcggatcctccaacggccttcaacaaggacaagctgaactctttcatcacccagtattctactggccaagtcagcgtggagatcgagtgggagctgcagaaggaaaacagcaagcgctggaacccggagatccagtacacttccaactattacaagtctaataatgttgaatttgctgttaatactgaaggtgtatatagtgaaccccgccccattggcaccagatacctgactcgtaatctgtaa

SEQ ID NO: 1606 - DNA, 2277 bp, Artificial Sequence
  Description of Artificial Sequence: Synthetic polynucleotide
ctggctgccgatggttatcttccagattggctcgaggacaaccttagtgaaggaattcgcgagtggtgggctttgaaacctggagcccctcaacccaaggcaaatcaacaacatcaagacaacgctcgaggtcttgtgcttccgggttacaaataccttggacccggcaacggactcgacaagggggagccggtcaacgcagcagacgcggcggccctcgagcacgacaaggcctacgaccagcagctcaaggccggagacaacccgtacctcaagtacaaccacgccgacgccgagttccaggagcggctcaaagaagatacgtcttttgggggcaacctcgggcgagcagtcttccaggccaaaaagaggcttcttgaacctcttggtctggttgaggaagcggctaagatgaacaaccagaagatcgtgaacctgaaggagaaggtggcccagctggaggccggcggcggcggcagcgctcctggaaagaagaggcctgtagagcagtctcctcaggaaccggactcctccgcgggtattggcaaatcgggtgcacagcccgctaaaaagagactcaatttcggtcagactggcgacacagagtcagtcccagaccctcaaccaatcggagaacctcccgcagccccctcaggtgtgggatctcttacaatggcttcaggtggtggcgcaccagtggcagacaataacgaaggtgccgatggagtgggtagttcctcgggaaattggcattgcgattcccaatggctgggggacagagtcatcaccaccagcacccgaacctgggccctgcccacctacaacaatcacctctacaagcaaatctccaacagcacatctggaggatcttcaaatgacaacgcctacttcggctacagcaccccctgggggtattttgacttcaacagattccactgccacttctcaccacgtgactggcagcgactcatcaacaacaactggggattccggcctaagcgactcaacttcaagctcttcaacattcaggtcaaagaggttacggacaacaatggagtcaagaccatcgccaataaccttaccagcacggtccaggtcttcacggactcagactatcagctcccgtacgtgctcgggtcggctcacgagggctgcctcccgccgttcccagcggacgttttcatgattcctcagtacgggtatctgacgcttaatgatggaagccaggccgtgggtcgttcgtccttttactgcctggaatatttcccgtcgcaaatgctaagaacgggtaacaacttccagttcaactacgagtttgagaacgtacctttccatagcagctacgctcacagccaaagcctggaccgactaatgaatccactcatcgaccaatacttgtactatctctcaaagactattaacgattctggacagaatcaacaaacgctaaaattcagtgtggccggacccagcaacatggctgtccagggaagaaactacatacctggacccagctaccgacaacaacgtgtctcaaccactgtgactcaaaacaacaacagcgaatttgcttggcctggagcttcttcttgggctctcaatggacgtaatagcttgatgaatcctggacctgctatggccagccacaaagaaggagaggaccgtttctttcctttgtctggatctttaatttttggcaaacaaggaactggaagagacaacgtggatgcggacgaagtcatgataaccaacgaagaagaaattaaaactactaacccggtagcaacggagtcctatggacaagtggccataaaccaccagagtgcccaagcacaggcgcagaccggctgggttcaaaaccaaggaatacttccgggtatggtttggcaggacagagatgtgtacctgcaaggacccatttgggccaaaattcctcacacggacggcaactttcacccttctccgctgatgggagggtttggaatgaagcacccgcctcctcagatcctcatcaaaaacacacctgtacctgcggatcctccaacggccttcaacaaggacaagctgaactctttcatcacccagtattctactggccaagtcagcgtggagatcgagtgggagctgcagaaggaaaacagcaagcgctggaacccggagatccagtacacttccaactattacaagtctaataatgttgaatttgctgttaatactgaaggtgtatatagtgaaccccgccccattggcaccagatacctgactcgtaatctgtaa

SEQ ID NO: 1607 - DNA, 2313 bp, Artificial Sequence
  Description of Artificial Sequence: Synthetic polynucleotide
ctggctgccgatggttatcttccagattggctcgaggacaaccttagtgaaggaattcgcgagtggtgggctttgaaacctggagcccctcaacccaaggcaaatcaacaacatcaagacaacgctcgaggtcttgtgcttccgggttacaaataccttggacccggcaacggactcgacaagggggagccggtcaacgcagcagacgcggcggccctcgagcacgacaaggcctacgaccagcagctcaaggccggagacaacccgtacctcaagtacaaccacgccgacgccgagttccaggagcggctcaaagaagatacgtcttttgggggcaacctcgggcgagcagtcttccaggccaaaaagaggcttcttgaacctcttggtctggttgaggaagcggctaagatgtataccatctggatgcccgagaaccccaggcccggtaccccctgcgacatcttcaccaacagcaggggcaagcgagccagcaacggcggcggcggcggcagcgctcctggaaagaagaggcctgtagagcagtctcctcaggaaccggactcctccgcgggtattggcaaatcgggtgcacagcccgctaaaaagagactcaatttcggtcagactggcgacacagagtcagtcccagaccctcaaccaatcggagaacctcccgcagccccctcaggtgtgggatctcttacaatggcttcaggtggtggcgcaccagtggcagacaataacgaaggtgccgatggagtgggtagttcctcgggaaattggcattgcgattcccaatggctgggggacagagtcatcaccaccagcacccgaacctgggccctgcccacctacaacaatcacctctacaagcaaatctccaacagcacatctggaggatcttcaaatgacaacgcctacttcggctacagcaccccctgggggtattttgacttcaacagattccactgccacttctcaccacgtgactggcagcgactcatcaacaacaactggggattccggcctaagcgactcaacttcaagctcttcaacattcaggtcaaagaggttacggacaacaatggagtcaagaccatcgccaataaccttaccagcacggtccaggtcttcacggactcagactatcagctcccgtacgtgctcgggtcggctcacgagggctgcctcccgccgttcccagcggacgttttcatgattcctcagtacgggtatctgacgcttaatgatggaagccaggccgtgggtcgttcgtccttttactgcctggaatatttcccgtcgcaaatgctaagaacgggtaacaacttccagttcaactacgagtttgagaacgtacctttccatagcagctacgctcacagccaaagcctggaccgactaatgaatccactcatcgaccaatacttgtactatctctcaaagactattaacgattctggacagaatcaacaaacgctaaaattcagtgtggccggacccagcaacatggctgtccagggaagaaactacatacctggacccagctaccgacaacaacgtgtctcaaccactgtgactcaaaacaacaacagcgaatttgcttggcctggagcttcttcttgggctctcaatggacgtaatagcttgatgaatcctggacctgctatggccagccacaaagaaggagaggaccgtttctttcctttgtctggatctttaatttttggcaaacaaggaactggaagagacaacgtggatgcggacgaagtcatgataaccaacgaagaagaaattaaaactactaacccggtagcaacggagtcctatggacaagtggccataaaccaccagagtgcccaagcacaggcgcagaccggctgggttcaaaaccaaggaatacttccgggtatggtttggcaggacagagatgtgtacctgcaaggacccatttgggccaaaattcctcacacggacggcaactttcacccttctccgctgatgggagggtttggaatgaagcacccgcctcctcagatcctcatcaaaaacacacctgtacctgcggatcctccaacggccttcaacaaggacaagctgaactctttcatcacccagtattctactggccaagtcagcgtggagatcgagtgggagctgcagaaggaaaacagcaagcgctggaacccggagatccagtacacttccaactattacaagtctaataatgttgaatttgctgttaatactgaaggtgtatatagtgaaccccgccccattggcaccagatacctgactcgtaatctgtaa

SEQ ID NO: 1608 - DNA, 2283 bp, Artificial Sequence
  Description of Artificial Sequence: Synthetic polynucleotide
ctggctgccgatggttatcttccagattggctcgaggacaaccttagtgaaggaattcgcgagtggtgggctttgaaacctggagcccctcaacccaaggcaaatcaacaacatcaagacaacgctcgaggtcttgtgcttccgggttacaaataccttggacccggcaacggactcgacaagggggagccggtcaacgcagcagacgcggcggccctcgagcacgacaaggcctacgaccagcagctcaaggccggagacaacccgtacctcaagtacaaccacgccgacgccgagttccaggagcggctcaaagaagatacgtcttttgggggcaacctcgggcgagcagtcttccaggccaaaaagaggcttcttgaacctcttggtctggttgaggaagcggctaagatgaccttcttctacggcggcagcaggggcaagaggaacaacttcaagaccgaggagtacggcggcggcggcagcgctcctggaaagaagaggcctgtagagcagtctcctcaggaaccggactcctccgcgggtattggcaaatcgggtgcacagcccgctaaaaagagactcaatttcggtcagactggcgacacagagtcagtcccagaccctcaaccaatcggagaacctcccgcagccccctcaggtgtgggatctcttacaatggcttcaggtggtggcgcaccagtggcagacaataacgaaggtgccgatggagtgggtagttcctcgggaaattggcattgcgattcccaatggctgggggacagagtcatcaccaccagcacccgaacctgggccctgcccacctacaacaatcacctctacaagcaaatctccaacagcacatctggaggatcttcaaatgacaacgcctacttcggctacagcaccccctgggggtattttgacttcaacagattccactgccacttctcaccacgtgactggcagcgactcatcaacaacaactggggattccggcctaagcgactcaacttcaagctcttcaacattcaggtcaaagaggttacggacaacaatggagtcaagaccatcgccaataaccttaccagcacggtccaggtcttcacggactcagactatcagctcccgtacgtgctcgggtcggctcacgagggctgcctcccgccgttcccagcggacgttttcatgattcctcagtacgggtatctgacgcttaatgatggaagccaggccgtgggtcgttcgtccttttactgcctggaatatttcccgtcgcaaatgctaagaacgggtaacaacttccagttcaactacgagtttgagaacgtacctttccatagcagctacgctcacagccaaagcctggaccgactaatgaatccactcatcgaccaatacttgtactatctctcaaagactattaacgattctggacagaatcaacaaacgctaaaattcagtgtggccggacccagcaacatggctgtccagggaagaaactacatacctggacccagctaccgacaacaacgtgtctcaaccactgtgactcaaaacaacaacagcgaatttgcttggcctggagcttcttcttgggctctcaatggacgtaatagcttgatgaatcctggacctgctatggccagccacaaagaaggagaggaccgtttctttcctttgtctggatctttaatttttggcaaacaaggaactggaagagacaacgtggatgcggacgaagtcatgataaccaacgaagaagaaattaaaactactaacccggtagcaacggagtcctatggacaagtggccataaaccaccagagtgcccaagcacaggcgcagaccggctgggttcaaaaccaaggaatacttccgggtatggtttggcaggacagagatgtgtacctgcaaggacccatttgggccaaaattcctcacacggacggcaactttcacccttctccgctgatgggagggtttggaatgaagcacccgcctcctcagatcctcatcaaaaacacacctgtacctgcggatcctccaacggccttcaacaaggacaagctgaactctttcatcacccagtattctactggccaagtcagcgtggagatcgagtgggagctgcagaaggaaaacagcaagcgctggaacccggagatccagtacacttccaactattacaagtctaataatgttgaatttgctgttaatactgaaggtgtatatagtgaaccccgccccattggcaccagatacctgactcgtaatctgtaa

SEQ ID NO: 1609 - DNA, 2283 bp, Artificial Sequence
  Description of Artificial Sequence: Synthetic polynucleotide
ctggctgccgatggttatcttccagattggctcgaggacaaccttagtgaaggaattcgcgagtggtgggctttgaaacctggagcccctcaacccaaggcaaatcaacaacatcaagacaacgctcgaggtcttgtgcttccgggttacaaataccttggacccggcaacggactcgacaagggggagccggtcaacgcagcagacgcggcggccctcgagcacgacaaggcctacgaccagcagctcaaggccggagacaacccgtacctcaagtacaaccacgccgacgccgagttccaggagcggctcaaagaagatacgtcttttgggggcaacctcgggcgagcagtcttccaggccaaaaagaggcttcttgaacctcttggtctggttgaggaagcggctaagatggcagctgcggccgccgcggctgcagcggctgcagccgccgcagctgcggctgcagcgggcggcggcggcagcgctcctggaaagaagaggcctgtagagcagtctcctcaggaaccggactcctccgcgggtattggcaaatcgggtgcacagcccgctaaaaagagactcaatttcggtcagactggcgacacagagtcagtcccagaccctcaaccaatcggagaacctcccgcagccccctcaggtgtgggatctcttacaatggcttcaggtggtggcgcaccagtggcagacaataacgaaggtgccgatggagtgggtagttcctcgggaaattggcattgcgattcccaatggctgggggacagagtcatcaccaccagcacccgaacctgggccctgcccacctacaacaatcacctctacaagcaaatctccaacagcacatctggaggatcttcaaatgacaacgcctacttcggctacagcaccccctgggggtattttgacttcaacagattccactgccacttctcaccacgtgactggcagcgactcatcaacaacaactggggattccggcctaagcgactcaacttcaagctcttcaacattcaggtcaaagaggttacggacaacaatggagtcaagaccatcgccaataaccttaccagcacggtccaggtcttcacggactcagactatcagctcccgtacgtgctcgggtcggctcacgagggctgcctcccgccgttcccagcggacgttttcatgattcctcagtacgggtatctgacgcttaatgatggaagccaggccgtgggtcgttcgtccttttactgcctggaatatttcccgtcgcaaatgctaagaacgggtaacaacttccagttcaactacgagtttgagaacgtacctttccatagcagctacgctcacagccaaagcctggaccgactaatgaatccactcatcgaccaatacttgtactatctctcaaagactattaacgattctggacagaatcaacaaacgctaaaattcagtgtggccggacccagcaacatggctgtccagggaagaaactacatacctggacccagctaccgacaacaacgtgtctcaaccactgtgactcaaaacaacaacagcgaatttgcttggcctggagcttcttcttgggctctcaatggacgtaatagcttgatgaatcctggacctgctatggccagccacaaagaaggagaggaccgtttctttcctttgtctggatctttaatttttggcaaacaaggaactggaagagacaacgtggatgcggacgaagtcatgataaccaacgaagaagaaattaaaactactaacccggtagcaacggagtcctatggacaagtggccataaaccaccagagtgcccaagcacaggcgcagaccggctgggttcaaaaccaaggaatacttccgggtatggtttggcaggacagagatgtgtacctgcaaggacccatttgggccaaaattcctcacacggacggcaactttcacccttctccgctgatgggagggtttggaatgaagcacccgcctcctcagatcctcatcaaaaacacacctgtacctgcggatcctccaacggccttcaacaaggacaagctgaactctttcatcacccagtattctactggccaagtcagcgtggagatcgagtgggagctgcagaaggaaaacagcaagcgctggaacccggagatccagtacacttccaactattacaagtctaataatgttgaatttgctgttaatactgaaggtgtatatagtgaaccccgccccattggcaccagatacctgactcgtaatctgtaa

SEQ ID NO: 1610 - protein, 726 aa, Artificial Sequence
  Description of Artificial Sequence: Synthetic polypeptide
MEVQLQASGGGLVQAGGSLRLSCAASGFKITHYTMGWFRQAPGKEREFVSRITWGGDNTFYSNSVKGRFTISRDNAKNTVYLQMNSLKPEDTADYYCAAGSTSTATPLRVDYWGKGTQVTVSSGGGGSAPGKKRPVEQSPQEPDSSSGIGKTGQQPAKKRLNFGQTGDSESVPDPQPLGEPPAAPSGLGPNTMASGGGAPMADNNEGADGVGNSSGNWHCDSTWLGDRVITTSTRTWALPTYNNHLYKQISNGTSGGSTNDNTYFGYSTPWGYFDFNRFHCHFSPRDWQRLINNNWGFRPKRLNFKLFNIQVKEVTTNEGTKTIANNLTSTVQVFTDSEYQLPYVLGSAHQGCLPPFPADVFMVPQYGYLTLNNGSQALGRSSFYCLEYFPSQMLRTGNNFQFSYTFEDVPFHSSYAHSQSLDRLMNPLIDQYLYYLVRTQTTGTGGTQTLAFSQAGPSSMANQARNWVPGPCYRQQRVSTTTNQNNNSNFAWTGAAKFKLNGRDSLMNPGVAMASHKDDDDRFFPSSGVLIFGKQGAGNDGVDYSQVLITDEEEIKATNPVATEEYGAVAINNQAANTQAQTGLVHNQGVIPGMVWQNRDVYLQGPIWAKIPHTDGNFHPSPLMGGFGLKHPPPQILIKNTPVPADPPLTFNQAKLNSFITQYSTGQVSVEIEWELQKENSKRWNPEIQYTSNYYKSTNVDFAVNTEGVYSEPRPIGTRYLTRNL

SEQ ID NO: 1611 - protein, 729 aa, Artificial Sequence
  Description of Artificial Sequence: Synthetic polypeptide
MEVQLQASGGGLVQAGGSLRLSCSASVRTFSIYAMGWFRQAPGKEREFVAGINRSGDVTKYADFVKGRFSISRDNAKNMVYLQMNSLKPEDTALYYCAATWAYDTVGALTSGYNFWGQGTQVTVSSGGGGSAPGKKRPVEQSPQEPDSSSGIGKTGQQPAKKRLNFGQTGDSESVPDPQPLGEPPAAPSGLGPNTMASGGGAPMADNNEGADGVGNSSGNWHCDSTWLGDRVITTSTRTWALPTYNNHLYKQISNGTSGGSTNDNTYFGYSTPWGYFDFNRFHCHFSPRDWQRLINNNWGFRPKRLNFKLFNIQVKEVTTNEGTKTIANNLTSTVQVFTDSEYQLPYVLGSAHQGCLPPFPADVFMVPQYGYLTLNNGSQALGRSSFYCLEYFPSQMLRTGNNFQFSYTFEDVPFHSSYAHSQSLDRLMNPLIDQYLYYLVRTQTTGTGGTQTLAFSQAGPSSMANQARNWVPGPCYRQQRVSTTTNQNNNSNFAWTGAAKFKLNGRDSLMNPGVAMASHKDDDDRFFPSSGVLIFGKQGAGNDGVDYSQVLITDEEEIKATNPVATEEYGAVAINNQAANTQAQTGLVHNQGVIPGMVWQNRDVYLQGPIWAKIPHTDGNFHPSPLMGGFGLKHPPPQILIKNTPVPADPPLTFNQAKLNSFITQYSTGQVSVEIEWELQKENSKRWNPEIQYTSNYYKSTNVDFAVNTEGVYSEPRPIGTRYLTRNL

SEQ ID NO: 1612 - protein, 651 aa, Artificial Sequence
  Description of Artificial Sequence: Synthetic polypeptide
MPSSVIDALQYKLEGTTRLTRKRGLKLATALSLSNKFVEGSPSGGGGSGGGGSAPGKKRPVEQSPQEPDSSSGIGKTGQQPAKKRLNFGQTGDSESVPDPQPLGEPPAAPSGLGPNTMASGGGAPMADNNEGADGVGNSSGNWHCDSTWLGDRVITTSTRTWALPTYNNHLYKQISNGTSGGSTNDNTYFGYSTPWGYFDFNRFHCHFSPRDWQRLINNNWGFRPKRLNFKLFNIQVKEVTTNEGTKTIANNLTSTVQVFTDSEYQLPYVLGSAHQGCLPPFPADVFMVPQYGYLTLNNGSQALGRSSFYCLEYFPSQMLRTGNNFQFSYTFEDVPFHSSYAHSQSLDRLMNPLIDQYLYYLVRTQTTGTGGTQTLAFSQAGPSSMANQARNWVPGPCYRQQRVSTTTNQNNNSNFAWTGAAKFKLNGRDSLMNPGVAMASHKDDDDRFFPSSGVLIFGKQGAGNDGVDYSQVLITDEEEIKATNPVATEEYGAVAINNQAANTQAQTGLVHNQGVIPGMVWQNRDVYLQGPIWAKIPHTDGNFHPSPLMGGFGLKHPPPQILIKNTPVPADPPLTFNQAKLNSFITQYSTGQVSVEIEWELQKENSKRWNPEIQYTSNYYKSTNVDFAVNTEGVYSEPRPIGTRYLTRNL

SEQ ID NO: 1613 - protein, 638 aa, Artificial Sequence
  Description of Artificial Sequence: Synthetic polypeptide
MYTIWMPENPRPGTPCDIFTNSRGKRASNGGGGGSGGGGSAPGKKRPVEQSPQEPDSSSGIGKTGQQPAKKRLNFGQTGDSESVPDPQPLGEPPAAPSGLGPNTMASGGGAPMADNNEGADGVGNSSGNWHCDSTWLGDRVITTSTRTWALPTYNNHLYKQISNGTSGGSTNDNTYFGYSTPWGYFDFNRFHCHFSPRDWQRLINNNWGFRPKRLNFKLFNIQVKEVTTNEGTKTIANNLTSTVQVFTDSEYQLPYVLGSAHQGCLPPFPADVFMVPQYGYLTLNNGSQALGRSSFYCLEYFPSQMLRTGNNFQFSYTFEDVPFHSSYAHSQSLDRLMNPLIDQYLYYLVRTQTTGTGGTQTLAFSQAGPSSMANQARNWVPGPCYRQQRVSTTTNQNNNSNFAWTGAAKFKLNGRDSLMNPGVAMASHKDDDDRFFPSSGVLIFGKQGAGNDGVDYSQVLITDEEEIKATNPVATEEYGAVAINNQAANTQAQTGLVHNQGVIPGMVWQNRDVYLQGPIWAKIPHTDGNFHPSPLMGGFGLKHPPPQILIKNTPVPADPPLTFNQAKLNSFITQYSTGQVSVEIEWELQKENSKRWNPEIQYTSNYYKSTNVDFAVNTEGVYSEPRPIGTRYLTRNL

SEQ ID NO: 1614 - protein, 628 aa, Artificial Sequence
  Description of Artificial Sequence: Synthetic polypeptide
MTFFYGGSRGKRNNFKTEEYGGGGSGGGGSAPGKKRPVEQSPQEPDSSSGIGKTGQQPAKKRLNFGQTGDSESVPDPQPLGEPPAAPSGLGPNTMASGGGAPMADNNEGADGVGNSSGNWHCDSTWLGDRVITTSTRTWALPTYNNHLYKQISNGTSGGSTNDNTYFGYSTPWGYFDFNRFHCHFSPRDWQRLINNNWGFRPKRLNFKLFNIQVKEVTTNEGTKTIANNLTSTVQVFTDSEYQLPYVLGSAHQGCLPPFPADVFMVPQYGYLTLNNGSQALGRSSFYCLEYFPSQMLRTGNNFQFSYTFEDVPFHSSYAHSQSLDRLMNPLIDQYLYYLVRTQTTGTGGTQTLAFSQAGPSSMANQARNWVPGPCYRQQRVSTTTNQNNNSNFAWTGAAKFKLNGRDSLMNPGVAMASHKDDDDRFFPSSGVLIFGKQGAGNDGVDYSQVLITDEEEIKATNPVATEEYGAVAINNQAANTQAQTGLVHNQGVIPGMVWQNRDVYLQGPIWAKIPHTDGNFHPSPLMGGFGLKHPPPQILIKNTPVPADPPLTFNQAKLNSFITQYSTGQVSVEIEWELQKENSKRWNPEIQYTSNYYKSTNVDFAVNTEGVYSEPRPIGTRYLTRNL

SEQ ID NO: 1615 - protein, 621 aa, Artificial Sequence
  Description of Artificial Sequence: Synthetic polypeptide
MNNQKIVNLKEKVAQLEAGGGGSAPGKKRPVEQSPQEPDSSAGIGKSGAQPAKKRLNFGQTGDTESVPDPQPIGEPPAAPSGVGSLTMASGGGAPVADNNEGADGVGSSSGNWHCDSQWLGDRVITTSTRTWALPTYNNHLYKQISNSTSGGSSNDNAYFGYSTPWGYFDFNRFHCHFSPRDWQRLINNNWGFRPKRLNFKLFNIQVKEVTDNNGVKTIANNLTSTVQVFTDSDYQLPYVLGSAHEGCLPPFPADVFMIPQYGYLTLNDGSQAVGRSSFYCLEYFPSQMLRTGNNFQFNYEFENVPFHSSYAHSQSLDRLMNPLIDQYLYYLSKTINDSGQNQQTLKFSVAGPSNMAVQGRNYIPGPSYRQQRVSTTVTQNNNSEFAWPGASSWALNGRNSLMNPGPAMASHKEGEDRFFPLSGSLIFGKQGTGRDNVDADEVMITNEEEIKTTNPVATESYGQVAINHQSAQAQAQTGWVQNQGILPGMVWQDRDVYLQGPIWAKIPHTDGNFHPSPLMGGFGMKHPPPQILIKNTPVPADPPTAFNKDKLNSFITQYSTGQVSVEIEWELQKENSKRWNPEIQYTSNYYKSNNVEFAVNTEGVYSEPRPIGTRYLTRNL

SEQ ID NO: 1616 - protein, 633 aa, Artificial Sequence
  Description of Artificial Sequence: Synthetic polypeptide
MYTIWMPENPRPGTPCDIFTNSRGKRASNGGGGGSAPGKKRPVEQSPQEPDSSAGIGKSGAQPAKKRLNFGQTGDTESVPDPQPIGEPPAAPSGVGSLTMASGGGAPVADNNEGADGVGSSSGNWHCDSQWLGDRVITTSTRTWALPTYNNHLYKQISNSTSGGSSNDNAYFGYSTPWGYFDFNRFHCHFSPRDWQRLINNNWGFRPKRLNFKLFNIQVKEVTDNNGVKTIANNLTSTVQVFTDSDYQLPYVLGSAHEGCLPPFPADVFMIPQYGYLTLNDGSQAVGRSSFYCLEYFPSQMLRTGNNFQFNYEFENVPFHSSYAHSQSLDRLMNPLIDQYLYYLSKTINDSGQNQQTLKFSVAGPSNMAVQGRNYIPGPSYRQQRVSTTVTQNNNSEFAWPGASSWALNGRNSLMNPGPAMASHKEGEDRFFPLSGSLIFGKQGTGRDNVDADEVMITNEEEIKTTNPVATESYGQVAINHQSAQAQAQTGWVQNQGILPGMVWQDRDVYLQGPIWAKIPHTDGNFHPSPLMGGFGMKHPPPQILIKNTPVPADPPTAFNKDKLNSFITQYSTGQVSVEIEWELQKENSKRWNPEIQYTSNYYKSNNVEFAVNTEGVYSEPRPIGTRYLTRNL

SEQ ID NO: 1617 - protein, 623 aa, Artificial Sequence
  Description of Artificial Sequence: Synthetic polypeptide
MTFFYGGSRGKRNNFKTEEYGGGGSAPGKKRPVEQSPQEPDSSAGIGKSGAQPAKKRLNFGQTGDTESVPDPQPIGEPPAAPSGVGSLTMASGGGAPVADNNEGADGVGSSSGNWHCDSQWLGDRVITTSTRTWALPTYNNHLYKQISNSTSGGSSNDNAYFGYSTPWGYFDFNRFHCHFSPRDWQRLINNNWGFRPKRLNFKLFNIQVKEVTDNNGVKTIANNLTSTVQVFTDSDYQLPYVLGSAHEGCLPPFPADVFMIPQYGYLTLNDGSQAVGRSSFYCLEYFPSQMLRTGNNFQFNYEFENVPFHSSYAHSQSLDRLMNPLIDQYLYYLSKTINDSGQNQQTLKFSVAGPSNMAVQGRNYIPGPSYRQQRVSTTVTQNNNSEFAWPGASSWALNGRNSLMNPGPAMASHKEGEDRFFPLSGSLIFGKQGTGRDNVDADEVMITNEEEIKTTNPVATESYGQVAINHQSAQAQAQTGWVQNQGILPGMVWQDRDVYLQGPIWAKIPHTDGNFHPSPLMGGFGMKHPPPQILIKNTPVPADPPTAFNKDKLNSFITQYSTGQVSVEIEWELQKENSKRWNPEIQYTSNYYKSNNVEFAVNTEGVYSEPRPIGTRYLTRNL

SEQ ID NO: 1618 - protein, 623 aa, Artificial Sequence
  Description of Artificial Sequence: Synthetic polypeptide
MAAAAAAAAAAAAAAAAAAAGGGGSAPGKKRPVEQSPQEPDSSAGIGKSGAQPAKKRLNFGQTGDTESVPDPQPIGEPPAAPSGVGSLTMASGGGAPVADNNEGADGVGSSSGNWHCDSQWLGDRVITTSTRTWALPTYNNHLYKQISNSTSGGSSNDNAYFGYSTPWGYFDFNRFHCHFSPRDWQRLINNNWGFRPKRLNFKLFNIQVKEVTDNNGVKTIANNLTSTVQVFTDSDYQLPYVLGSAHEGCLPPFPADVFMIPQYGYLTLNDGSQAVGRSSFYCLEYFPSQMLRTGNNFQFNYEFENVPFHSSYAHSQSLDRLMNPLIDQYLYYLSKTINDSGQNQQTLKFSVAGPSNMAVQGRNYIPGPSYRQQRVSTTVTQNNNSEFAWPGASSWALNGRNSLMNPGPAMASHKEGEDRFFPLSGSLIFGKQGTGRDNVDADEVMITNEEEIKTTNPVATESYGQVAINHQSAQAQAQTGWVQNQGILPGMVWQDRDVYLQGPIWAKIPHTDGNFHPSPLMGGFGMKHPPPQILIKNTPVPADPPTAFNKDKLNSFITQYSTGQVSVEIEWELQKENSKRWNPEIQYTSNYYKSNNVEFAVNTEGVYSEPRPIGTRYLTRNL

SEQ ID NO: 1619 - DNA, 2214 bp, Artificial Sequence
  Description of Artificial Sequence: Synthetic polynucleotide
atggctgccgatggttatcttccagattggctcgaggacaacctctctgagggcattcgcgagtggtgggacttgaaacctggagccccgaagcccaaagccaaccagcaaaagcaggacgacggccggggtctggtgcttcctggctacaagtacctcggacccttcaacggactcgacaagggggagcccgtcaacgcggcggacgcagcggccctcgagcacgacaaggcctacgaccagcagctcaaagcgggtgacaatccgtacctgcggtataaccacgccgacgtcgagtttcaggagcgtctgcaagaagatacgtcttttgggggcaacctcgggcgagcagtcttccaggccaagaagagggttctcgaaccttttggtctggttgaggaaggcgctaagacggctcctggaaagaaacgtccggtagagcagtcgccacaagagccagactcctcctcgggcatcggcaagaaaggccaacagcccgccagaaaaagactcaattttggccagactggcgactcagagtcagttccagaccctcaacctctcggagaacctccagcagcgccctctggtgtgggacctaatacaatggctgcaggcggtggcgcaccaatggcagacaataacgagggcgccgacggagtgggtaattcctcgggaaattggcattgcgattccacatggatgggggacagagtcatcaccaccagcacccgaacctgggccctgcccacctacaacaaccacctctacaagcaaatctccaacggcacctcgggaggaagcaccaacgacaacacctattttggctacagcaccccctgggggtattttgatttcaacagattccactgccacttctcaccacgtgactggcagcgactcatcaacaacaactggggattccggccaaaaagactcagcttcaagctcttcaacatccaggtcaaggaggtcacgcagaatgaaggcaccaagaccatcgccaataaccttaccagcacgattcaggtatttacggactcggaataccagctgccatacgtcctcggctccgcgcaccagggctgcctgcctccgttcccggcggacgtcttcatgattccccagtacggctaccttacactgaacaatggaagtcaagccgtaggccgttcctccttctactgcctggaatattttccttctcaaatgctgagaacgggcaacaactttgagttcagctaccagtttgaggacgtgccttttcacagcagctacgcgcacagccaaagcctggaccggctgatgaaccccctcatcgaccagtacctgtactacctgtctcggactcagtccacgggaggtaccgcaagaactcagcagttgctattttctcaggccgggcctaatacaatggccaatcaggcaaagaactggctgccaggaccctgttaccgccaacaacgcgtctcaacgacaaccgggcaaaacaacaatagcaactctgcctggactgctgggaccaaataccatctgaatggaagaaattcattggctaatcctggcatcgctatggcaacacacaaagacgacgaggagcgtttttttcccagtaacgggatcctgatttttggcaaacaaaatgctgccagagacaatgcggattacagcgatgtcatgctcaccagcgaggaagaaatcaaaaccactaaccctgtggctacagaggaatacggtatcgtggcagataacttgcagcagcaaaacacggctcctcaaattggaactgtcaacagccagggggccttacccggtatggtctggcagaaccgggacgtgtacctgcagggtcccatctgggccaagattcctcacacggacggcaacttccacccatctccgctgatgggcggctttggcctgaaacatcctccgcctcagatcctgatcaagaacacgcctgtacctgcggatcctccgaccaccttcaaccagtcaaagctgaactctttcatcacgcaatacagcaccggacaggtcagcgtggaaattgaatgggagctacagaaggaaaacagcaagcgctggaaccccgagatccagtacacctccaactactacaaatctacaagtgtggactttgctgttaatacagaaggcgtgtactctgaaccccgccccattggcacccgttacctcacccgtaatctgtaa

SEQ ID NO: 1620 - DNA, 2214 bp, Artificial Sequence
  Description of Artificial Sequence: Synthetic polynucleotide
atggctgccgatggttatcttccagattggctcgaggacaacctctctgagggcattcgcgagtggtgggcgctgaaacctggagccccgaagcccaaagccaaccagcaaaagcaggacgacggccggggtctggtgcttcctggctacaagtacctcggacccttcaacggactcgacaagggggagcccgtcaacgcggcggacgcagcggccctcgagcacgacaaggcctacgaccagcagctcaaagcgggtgacaatccgtacctgcggtataaccacgccgacgccgagtttcaggagcgtctgcaagaagatacgtcttttgggggcaacctcgggcgagcagtcttccaggccaagaagcgggttctcgaacctctcggtctggttgaggacggcgctaagacggctcctggaaagaagagaccagtagagcagtcaccccaagaaccagactcctcctcgggcatcggcaagaaaggccaacagcccgccagaaaaagactcaattttggccagactggcgactcagagtcagttccagaccctcaacctctcggagaacctccagcaacccccgctgctgtgggacctactacaatggcttcaggcggtggcgcaccaatggcagacaataacgaaggcgccgacggagtgggtagttcctcgggaaattggcattgcgattccacatggctgggcgacagagtcatcaccaccagcacccgaacctgggccctgcccacctacaacaaccacctctacaagcaaatctccaacgggacatcgggaggagccaccaacgacaacacctacttcggctacagcaccccctgggggtattttgactttaacagattccactgccacttttcaccacgtgactggcagcgactcatcaacaacaactggggattccggcccaagagactcagcttcaagctcttcaacatccaggtcaaggaggtcacgcagaatgaaggcaccaagaccatcgccaataacctcaccagcaccatccaggtgtttacggactcggagtaccagctgccgtacgttctcggctctgcccaccagggctgcctgcctccgttcccggcggacgtgttcatgattccccagtacggctacctaacactcaacaacggtagtcaggccgtgggacgctcctccttctactgcctggaatactttccttcgcagatgctgagaaccggcaacaacttccagtttacttacaccttcgaggacgtgcctttccacagcagctacgcccacagccagagcttggaccggctgatgaatcctctgattgaccagtacctgtactacttgtctcggactcaaacaacaggaggcacggcaaatacgcagactctgggcttcagccaaggtgggcctaatacaatggccaatcaggcaaagaactggctgccaggaccctgttaccgccaacaacgcgtctcaacgacaaccgggcaaaacaacaatagcaactttgcctggactgctgggaccaaataccatctgaatggaagaaattcattggctaatcctggcatcgctatggcaacacacaaggacgacgaggagcgtttttttcccagtaacgggatcctgatttttggcaaacaaaatgctgccagagacaatgcggattacagcgatgtcatgctcaccagcgaggaagaaatcaaaaccactaaccctgtggctacagaggaatacggtatcgtggcagataacttgcagcagcaaaacacggctcctcaaattggaactgtcaacagccagggggccttacccggtatggtctggcagaaccgggacgtgtacctgcagggtcccatctgggccaagattcctcacacggacggcaacttccacccgtctccgctgatgggcggctttggcctgaaacatcctccgcctcagatcctgatcaagaacacgcctgtacctgcggatcctccgaccaccttcaaccagtcaaagctgaactctttcatcacgcaatacagcaccggacaggtcagcgtggaaatcgagtgggagctgcagaaagaaaacagcaagcgctggaaccccgagatccagtacacctccaactactacaaatctacaaatgtggactttgctgtcaacacggagggggtttatagcgagcctcgccccattggcacccgttacctcacccgcaacctgtaa

SEQ ID NO: 1621 - DNA, 2211 bp, Artificial Sequence
  Description of Artificial Sequence: Synthetic polynucleotide
  misc_feature (715)..(715): n is a, c, g, or t
atggctgccgatggttatcttccagattggctcgaggacaacctctctgagggcattcgcgagtggtgggcgctgaaacctggagccccgaagcccaaagccaaccagcaaaagcaggacgacggccggggtctggtgcttcctggctacaagtacctcggacccttcaacggactcgacaagggggagcccgtcaacgcggcggacgcagcggccctcgagcacgacaaggcctacgaccagcagctcaaagcgggtgacaatccgtacctgcggtataaccacgccgacgccgagtttcaggagcgtctgcaagaagatacgtcttttgggggcaacctcgggcgagcagtcttccaggccaagaagcgggttctcgaacctctcggtctggttgaggaaggcgctaagacggctcctggaaagaaacgtccggtagagcagtcgccacaagagccagactcctcctcgggcatcggcaagacaggccagcagcccgctaaaaagaggctcaattttggtcagactggcgactcagagtcagtccccgacccacaacctctcggagaacctccagcaacccccgctgctgtgggacctactacaatggcttcaggcggtggcgcaccaatggcagacaataacgaaggcgccgacggagtgggtaatgcctcaggaaattggcattgcgattccacatggctgggcgacagantcatcaccaccagcacccgaacatgggccttgcccacctataacaaccacctctacaagcaaatctccagtgcttcaacgggggccagcaacgacaaccactacttcggctacagcaccccctgggggtattttgatttcaacagattccactgccatttctcaccacgtgactggcagcgactcatcaacaacaattggggattccggcccaagagactcaacttcaagctcttcaacatccaagtcaaggaggtcacgcagaatgaaggcaccaagaccatcgccaataacctcaccagcaccatccaggtgtttacggactcggagtaccagctgccgtacgttctcggctctgcccaccagggctgcctgcctccgttcccggcggacgtgttcatgattccccagtacggctacctaacactcaacaacggtagtcaggccgtgggacgctcctccttctactgcctggaatattttccatctcaaatgctgcgaactggaaacaattttgaattcagctacaccttcgaggacgtgcctttccacagcagctacgcacacagccagagcttggaccgactgatgaatcctctcatcgaccagtacctgtactacttgtctcggactcaaacaacaggaggcacggcaaatacgcagactctgggcttcagccaaggtgggcctaatacaatggccaatcaggcaaagaactggctgccaggaccctgttaccgccaacaacgcgtctcaacgacaaccgggcaaaacaacaatagcaactttgcctggactgctgggaccaaataccatctgaatggaagaaattcattggctaatcctggcatcgctatggcaacacacaaagacgacgaggagcgtttttttcccagtaacgggatcctgatttttggcaaacaaaatgctgccagagacaatgcggattacagcgatgtcatgctcaccagcgaggaagaaatcaaaaccactaaccctgtggctacagaggaatacggtatcgtggcagataacttgcagcagcaaaacacggctcctcaaattggaactgtcaacagccaggggaccttacccggtatggtctggcagaaccgggacgtgtacctgcagggtcccatctgggccaagattcctcacacggacggcaacttccacccgtctccgctgatgggcggctttggcctgaaacatcctccgcctcagatcctgatcaagaacacgcctgtacctgcggatcctccgaccaccttcaaccagtcaaagctgaactctttcatcacgcaatacagcaccggacaggtcagcgtggaaattgaatgggagctacagaaggaaaacagcaagcgctggaaccccgagatccagtacacctccaattactacaaatctacaagtgtggactttgctgttaatacagaaggcgtgtactctgaaccccgccccattggcacgcgtttcctcacccgtaatctgtaa

SEQ ID NO: 1622 - DNA, 2214 bp, Artificial Sequence
  Description of Artificial Sequence: Synthetic polynucleotide
atggctgccgatggttatcttccagattggctcgaggacaacctctctgagggcattcgcgagtggtgggcgctgaaacctggagccccgaagcccaaagccaaccagcaaaagcaggacgacggccggggtctggtgcttcctggctacaagtacctcggacccttcaacggactcgacaagggggagcccgtcaacgcggcggacgcagcggccctcgagcacgacaaggcctacgaccagcagctcaaagcgggtgacaatccgtacctgcggtataaccacgccgacgccgagtttcaggagcgtctgcaagaagatacgtcttttgggggcaacctcgggcgagcagtcttccaggccaagaagcgggttctcgaacctctcggtctggttgaggaaggcgctaagacggctcctggaaagaaacgtccggtagagcagtcgccacaagagccagactcctcctcgggcatcggcaagacaggccagcagcccgctaaaaagaggctcaattttggccagactggcgactcagagtcagttccagaccctcaacctctcggagaacctccagcagcgccctctggtgtgggacctaatacaatggctgcaggcggtggcgcaccaatggcagacaataacgaaggcgccgacggagtgggtagttcctcgggaaattggcattgcgattccacatggctgggcgacagagtcatcaccaccagcacccgaacctgggccctgcccacctacaacaaccacctctacaagcaaatctccaacgggacatcgggaggagccaccaacgacaacacctacttcggctacagcaccccctgggggtattttgactttaacagattccactgccacttttcaccacgtgactggcagcgactcatcaacaacaactggggattccggcccaagagactcagcttcaagctcttcaacatccaggtcaaggaggtcacgcagaatgaaggcaccaagaccatcgccaataacctcaccagcaccatccaggtgtttacggactcggagtaccagctgccgtacgtactaggatccgctcaccagggatgtctgcctccgttcccggcggacgtgttcatgattccccagtacggctacctaacactcaacaacggtagtcaggccgtgggacgctcctccttctactgcctggaatattttccatctcagatgctgagaacgggcaataactttaccttcagctacaccttcgaggacgtgcctttccacagcagctatgcccacagccagagcttggaccggctgatgaatcctctgattgaccagtacctgtactacttgtctcggactcaaacaacaggaggcacggcaaatacgcagactctgggcttcagccaaggtgggcctaatacaatggccaatcaggcaaagaactggctgccaggaccctgttaccgccaacaacgcgtctcaacgacaaccgggcaaaacaacaatagcaactttgcctggactgctgggaccaaataccatctgaatggaagaaattcattggctaatcctggcatcgctatggcaacacacaaagacgacgaggagcgtttttttcccagtaacgggatcctgatttttggcaaacaaaatgctgccagagacaatgcggattacagcgatgtcatgctcaccagcgaggaagaaatcaaaaccactaaccctgtggctacagaggaatacggtatcgtggcagataacttgcagcagcaaaacacggctcctcaaattggaactgtcaacagccagggggccttacccggtatggtctggcagaaccgggacgtgtacctgcagggtcccatctgggccaagattcctcacacggacggcaacttccacccgtctccgctaatgggaggatttggactgaagcacccacctcctcagatcctgatcaagaacacgccggtacctgcggatcctccgaccaccttcaaccagtcaaagctgtactctttcatcacgcaatacagcaccggacaggtcagcgtggaaattgaatgggagctgcagaaggaaaacagcaagcgctggaaccccgagatccaatacacctccaactactacaaatctacaagtgtggactttgctgttaatacagaaggcgtgtactctgaaccccgccccattggcacccgttacctcacccgtaatctgtaa

SEQ ID NO: 1623 - protein, 737 aa, Artificial Sequence
  Description of Artificial Sequence: Synthetic polypeptide
MAADGYLPDWLEDNLSEGIREWWDLKPGAPKPKANQQKQDDGRGLVLPGYKYLGPFNGLDKGEPVNAADAAALEHDKAYDQQLKAGDNPYLRYNHADVEFQERLQEDTSFGGNLGRAVFQAKKRVLEPFGLVEEGAKTAPGKKRPVEQSPQEPDSSSGIGKKGQQPARKRLNFGQTGDSESVPDPQPLGEPPAAPSGVGPNTMAAGGGAPMADNNEGADGVGNSSGNWHCDSTWMGDRVITTSTRTWALPTYNNHLYKQISNGTSGGSTNDNTYFGYSTPWGYFDFNRFHCHFSPRDWQRLINNNWGFRPKRLSFKLFNIQVKEVTQNEGTKTIANNLTSTIQVFTDSEYQLPYVLGSAHQGCLPPFPADVFMIPQYGYLTLNNGSQAVGRSSFYCLEYFPSQMLRTGNNFEFSYQFEDVPFHSSYAHSQSLDRLMNPLIDQYLYYLSRTQSTGGTARTQQLLFSQAGPNTMANQAKNWLPGPCYRQQRVSTTTGQNNNSNSAWTAGTKYHLNGRNSLANPGIAMATHKDDEERFFPSNGILIFGKQNAARDNADYSDVMLTSEEEIKTTNPVATEEYGIVADNLQQQNTAPQIGTVNSQGALPGMVWQNRDVYLQGPIWAKIPHTDGNFHPSPLMGGFGLKHPPPQILIKNTPVPADPPTTFNQSKLNSFITQYSTGQVSVEIEWELQKENSKRWNPEIQYTSNYYKSTSVDFAVNTEGVYSEPRPIGTRYLTRNL

SEQ ID NO: 1624 - protein, 737 aa, Artificial Sequence
  Description of Artificial Sequence: Synthetic polypeptide
MAADGYLPDWLEDNLSEGIREWWALKPGAPKPKANQQKQDDGRGLVLPGYKYLGPFNGLDKGEPVNAADAAALEHDKAYDQQLKAGDNPYLRYNHADAEFQERLQEDTSFGGNLGRAVFQAKKRVLEPLGLVEDGAKTAPGKKRPVEQSPQEPDSSSGIGKKGQQPARKRLNFGQTGDSESVPDPQPLGEPPATPAAVGPTTMASGGGAPMADNNEGADGVGSSSGNWHCDSTWLGDRVITTSTRTWALPTYNNHLYKQISNGTSGGATNDNTYFGYSTPWGYFDFNRFHCHFSPRDWQRLINNNWGFRPKRLSFKLFNIQVKEVTQNEGTKTIANNLTSTIQVFTDSEYQLPYVLGSAHQGCLPPFPADVFMIPQYGYLTLNNGSQAVGRSSFYCLEYFPSQMLRTGNNFQFTYTFEDVPFHSSYAHSQSLDRLMNPLIDQYLYYLSRTQTTGGTANTQTLGFSQGGPNTMANQAKNWLPGPCYRQQRVSTTTGQNNNSNFAWTAGTKYHLNGRNSLANPGIAMATHKDDEERFFPSNGILIFGKQNAARDNADYSDVMLTSEEEIKTTNPVATEEYGIVADNLQQQNTAPQIGTVNSQGALPGMVWQNRDVYLQGPIWAKIPHTDGNFHPSPLMGGFGLKHPPPQILIKNTPVPADPPTTFNQSKLNSFITQYSTGQVSVEIEWELQKENSKRWNPEIQYTSNYYKSTNVDFAVNTEGVYSEPRPIGTRYLTRNL

SEQ ID NO: 1625 - protein, 736 aa, Artificial Sequence
  Description of Artificial Sequence: Synthetic polypeptide
  misc_feature (239)..(239): Xaa can be any naturally occurring amino acid
MAADGYLPDWLEDNLSEGIREWWALKPGAPKPKANQQKQDDGRGLVLPGYKYLGPFNGLDKGEPVNAADAAALEHDKAYDQQLKAGDNPYLRYNHADAEFQERLQEDTSFGGNLGRAVFQAKKRVLEPLGLVEEGAKTAPGKKRPVEQSPQEPDSSSGIGKTGQQPAKKRLNFGQTGDSESVPDPQPLGEPPATPAAVGPTTMASGGGAPMADNNEGADGVGNASGNWHCDSTWLGDRXITTSTRTWALPTYNNHLYKQISSASTGASNDNHYFGYSTPWGYFDFNRFHCHFSPRDWQRLINNNWGFRPKRLNFKLFNIQVKEVTQNEGTKTIANNLTSTIQVFTDSEYQLPYVLGSAHQGCLPPFPADVFMIPQYGYLTLNNGSQAVGRSSFYCLEYFPSQMLRTGNNFEFSYTFEDVPFHSSYAHSQSLDRLMNPLIDQYLYYLSRTQTTGGTANTQTLGFSQGGPNTMANQAKNWLPGPCYRQQRVSTTTGQNNNSNFAWTAGTKYHLNGRNSLANPGIAMATHKDDEERFFPSNGILIFGKQNAARDNADYSDVMLTSEEEIKTTNPVATEEYGIVADNLQQQNTAPQIGTVNSQGTLPGMVWQNRDVYLQGPIWAKIPHTDGNFHPSPLMGGFGLKHPPPQILIKNTPVPADPPTTFNQSKLNSFITQYSTGQVSVEIEWELQKENSKRWNPEIQYTSNYYKSTSVDFAVNTEGVYSEPRPIGTRFLTRNL

SEQ ID NO: 1626 - protein, 737 aa, Artificial Sequence
  Description of Artificial Sequence: Synthetic polypeptide
MAADGYLPDWLEDNLSEGIREWWALKPGAPKPKANQQKQDDGRGLVLPGYKYLGPFNGLDKGEPVNAADAAALEHDKAYDQQLKAGDNPYLRYNHADAEFQERLQEDTSFGGNLGRAVFQAKKRVLEPLGLVEEGAKTAPGKKRPVEQSPQEPDSSSGIGKTGQQPAKKRLNFGQTGDSESVPDPQPLGEPPAAPSGVGPNTMAAGGGAPMADNNEGADGVGSSSGNWHCDSTWLGDRVITTSTRTWALPTYNNHLYKQISNGTSGGATNDNTYFGYSTPWGYFDFNRFHCHFSPRDWQRLINNNWGFRPKRLSFKLFNIQVKEVTQNEGTKTIANNLTSTIQVFTDSEYQLPYVLGSAHQGCLPPFPADVFMIPQYGYLTLNNGSQAVGRSSFYCLEYFPSQMLRTGNNFTFSYTFEDVPFHSSYAHSQSLDRLMNPLIDQYLYYLSRTQTTGGTANTQTLGFSQGGPNTMANQAKNWLPGPCYRQQRVSTTTGQNNNSNFAWTAGTKYHLNGRNSLANPGIAMATHKDDEERFFPSNGILIFGKQNAARDNADYSDVMLTSEEEIKTTNPVATEEYGIVADNLQQQNTAPQIGTVNSQGALPGMVWQNRDVYLQGPIWAKIPHTDGNFHPSPLMGGFGLKHPPPQILIKNTPVPADPPTTFNQSKLYSFITQYSTGQVSVEIEWELQKENSKRWNPEIQYTSNYYKSTSVDFAVNTEGVYSEPRPIGTRYLTRNL

SEQ ID NO: 1627 - DNA, 2208 bp, Artificial Sequence
  Description of Artificial Sequence: Synthetic polynucleotide
atggctgccgatggttatcttccagattggctcgaggacaacctctctgagggcattcgcgagtggtgggacttgaaacctggagccccgaaacccaaagccaaccagcaaaagcaggacgacggccggggtctggtgcttcctggctacaagtacctcggacccttcaacggactcgacaagggggagcccgtcaacgcggcggatgcagcggccctcgagcacgacaaagcctacgaccggcagctcgacagcggagacaacccgtacctcaagtacaaccacgccgacgcggagtttcaggagcgccttaaagaagatacgtcttttgggggcaacctcggacgagcagtcttccaggccaagaagagggttctcgaaccttttggtctggttgaggaaggtgctaagacggctcctggaaagaaacgtccggtagagcagtcgccacaagagccagactcctcctcgggcattggcaagacaggccagcagcccgctaaaaagagactcaattttggtcagactggcgactcagagtcagtccccgacccacaacctctcggagaacctccagcaacccccgctgctgtgggacctactacaatggcttcaggtggtggcgcaccagtggcagacaataacgaaggcgccgacggagtgggtagttcctcgggaaattggcattgcgattccacatggctgggcgacagagtcatcaccaccagcacccgaacatgggccttgcccacctataacaaccacctctacaagcaaatctccagtgcttcgacgggggccagcaacgacaaccactacttcggctacagcaccccctgggggtattttgatttcaacaggttccactgccatttctcaccacgtgactggcagcgactcatcaacaacaattggggattccggcccaaaagactcaacttcaagctgttcaacatccaggtcaaggaagtcacgacgaacgaaggcaccaagaccatcgccaataatctcaccagcaccgtgcaggtctttacggactcggagtaccagttaccgtacgtgctaggatccgctcaccagggatgtctgcctccgttcccggcggacgtcttcatggttcctcagtacggctatttaactttaaacaatggaagccaagccctgggacgttcctccttctactgtctggagtatttcccatcgcagatgctgagaacgggcaacaactttacctttagctacaccttcgaggacgtgcctttccacagcagctacgcgcacagccagagcctggacaggctgatgaatcccctcatcgaccagtacctgtactacctggtcagaacgcaaacgactggaactggagggacgcagactctggcattcagccaagcgggtcctagctcaatggccaaccaggctagaaattgggtgcccggaccttgctaccggcagcagcgcgtctccacgacaaccaaccagaacaacaacagcaactttgcctggacgggagctgccaagtttaagctgaacggccgagactctctaatgaatccgggcgtggcaatggcttcccacaaggatgacgacgaccgcttcttcccttcgagcggggtcctgatttttggcaagcaaggagccgggaacgatggagtggattacagccaagtgctgattacagatgaggaagaaatcaaggctaccaaccccgtggccacagaagaatatggagcagtggccatcaacaaccaggccgccaatacgcaggcgcagaccggactcgtgcacaaccagggggtgattcccggcatggtgtggcagaatagagacgtgtacctgcagggtcccatctgggccaaaattcctcacacggacggcaactttcacccgtctcccctgatgggcggctttggactgaagcacccgcctcctcaaattctcatcaagaacacaccggttccagcggacccgccgcttaccttcaaccaggccaagctgaactctttcatcacgcagtacagcaccggacaggtcagcgtggaaatcgagtgggagctgcagaaagaaaacagcaaacgctggaatccagagattcaatacacttccaactactacaaatctacaaatgtggactttgctgtcaacacggagggggtttatagcgagcctcgccccattggcacccgttacctcacccgcaacctgtaa

SEQ ID NO: 1628 - DNA, 2211 bp, Artificial Sequence
  Description of Artificial Sequence: Synthetic polynucleotide
  misc_feature (337)..(337): n is a, c, g, or t
atggctgccgatggttatcttccagattggctcgaggacactctctctgaaggaataagacagtggtggaagctcaaacctggcccaccaccaccaaagcccgcagagcggcataaggacgacagcaggggtcttgtgcttcctggctacaagtacctcggacccttcaacggactcgacaagggggagcccgtcaacgcggcggacgcagcgaccctcgagcacgacaaggcctacgaccagcagctcaaagcgggtgacaatccgtacctgcggtataaccacgccgacgccgagtttcaggagcgtctgcaagaagatacgtcttttgggggcnacctcgggcgagcagtcttccaggccaagaagcgggttctcgaacctctcggtctggttgaggaagctgctaagacggctcctggaaagaagagaccagtagagccatcaccccagcgttctccagactcctctacgggcatcggcaagaaaggccaacagcccgccagaaaaagactcaattttggtcagactggcgactcagagtcagttccagaccctcaacctctcggagaacctccagcagcgccctctggtgtgggacctaatacaatggctgcaggcggtggcgcaccaatggcagacaataacgaaggcgccgacggagtgggtagttcctcgggaaattggcattgcgattccacatggctgggcgacagagtcatcaccaccagcacccgaacctgggccctgcccacctacaacaaccacctctacaagcaaatctccagtgcttcaacgggggccagcaacgacaaccactacttcggctacagcaccccctgggggtattttgatttcaacagattccactgccatttctcaccacgtgactggcagcgactcatcaacaacaattggggattccggcccaagagactcaacttcaagctcttcaacatccaagtcaaggaggtcacgacgaatgatggcgtcacgaccatcgctaataaccttaccagcacggttcaagtcttctcggactcagactatcagctcccgtacgtgctcgggtcggctcacgagggctgcctcccgccgttcccagcggacgttttcatgattcctcagtacggctatttaactttaaacaatggaagccaagccctgggacgttcctccttctactgtctggagtatttcccatcgcagatgctgagaaccggcaacaactttcagttcagctacaccttcgaggacgtgcctttccacagcagctacgcgcacagccagagcctggacaggctgatgaatcccctcatcgaccagtacctgtactacctggtcagaacgcaaacgactggaactggagggacgcagactctggcattcagccaagcgggtcctagctcaatggccaaccaggctagaaattgggtgcccggaccttgctaccggcagcagcgcgtctccacgacaaccaaccagaacaacaacagcaactttgcctggacgggagctgccaagtttaagctgaacggccgagactctctaatgaatccgggcgtggcaatggcttcccacaaggatgacgacgaccgcttcttcccttcgagcggggtcctgatttttggcaagcaaggagccgggaacgatggagtggattacagccaagtgctgattacagatgaggaagaaatcaaggctaccaaccccgtagccacagaagaatatggagcagtggccatcaacaaccaggccgccaatacgcaggcgcagaccggactcgtgcacaaccagggggtgattcccggaatggtgtggcaagacagagacgtatacctgcagggtcctatttgggccaaaattcctcacacggatggacactttcacccgtctcctctcatgggcggctttggacttaagcacccgcctcctcagatcctcatcaaaaacacgcctgttcctgcgaatcctccggcagagttttcggctacaaagtttgcttcattcatcacccagtattccacaggacaagtgagcgtggagattgaatgggagctgcagaaagaaaacagcaaacgctggaatcccgaagtgcagtatacatctaactatgcaaaatctgccaacgttgatttcactgtggacaacaatggactttatactgagcctcgccccattggcacccgttacctcacccgtcccctgtaa

SEQ ID NO: 1629 - DNA, 2214 bp, Artificial Sequence
  Description of Artificial Sequence: Synthetic polynucleotide
  misc_feature (335)..(335): n is a, c, g, or t
atgactgacggttaccttccagattggctagaggacaacctctctgaaggcgttcgagagtggtgggcgctgcaacctggagccccgaagcccaaagccaaccagcaaaagcaggacgacggccggggtctggtgcttcctggctacaagtacctcggacccttcaacggactcgacaagggggagcccgtcaacgcggcggacgcagcggccctcgagcacgacaaggcctacgaccagcagctcaaagcgggtgacaatccgtacctgcggtataaccacgccgacgccgagtttcaggagcgtctgcaagaagatacgtcttttgggggcancctcgggcgagcagtcttccaggccaagaagcgggttctcgaacctctcggtctggttgaggaaggcgctaagacggctcctggaaagaaacgtccggtagagccatcaccccagcgttctccagactcctctacgggcatcggcaagaaaggccaacagcccgccagaaaaagactcaattttggtcagactggcgactcagagtcagttccagaccctcaacctctcggagaacctccagcagcgccctcaggtgtgggatctcttacaatggcttcaggtggtggcgcaccagtggcagacaataacgaaggtgccgatggagtgggtagttcctcgggaaattggcattgcgattcccaatggctgggggacagagtcatcaccaccagcacccgaacctgggccctgcccacctacaacaatcacctctacaagcaaatctccaacagcacatctggaggatcttcaaatgacaacgcctacttcggctacagcaccccctgggggtattttgacttcaacagattccactgccacttctcaccacgtgactggcagcgactcatcaacaacaactggggattccggcccaagagactcagcttcaagctcttcaacatccaggtcaaggaggtcacgcagaatgaaggcaccaagaccatcgccaataacctcaccagcaccatccaggtgtttacggactcggagtaccagctgccgtacgttctcggctctgcccaccagggctgcctgcctccgttcccggcggacgtgttcatgattccccagtacggctacctaacactcaacaacggtagtcaggccgtgggacgctcctccttctactgcctggaatactttccttcgcagatgctgagaaccggcaacaacttccagtttacttacaccttcgaggacgtgcctttccacagcagctacgcccacagccagagcttggaccggctgatgaatcctctgattgaccagtacctgtactacttgtctcggactcaaacaacaggaggcacggcaaatacgcagactctgggcttcagccaaggtgggcctaatacaatggccaatcaggcaaagaactggctgccaggaccctgttaccgccaacaacgcgtctcaacgacaaccgggcaaaacaacaatagcaactttgcctggactgctgggaccaaataccatctgaatggaagaaattcattggctaatcctggcatcgctatggcaacacacaaagacgacgaggagcgtttttttcccagtaacgggatcctgatttttggcaaacaaaatgctgccagagacaatgcggattacagcgatgtcatgctcaccagcgaggaagaaatcaaaaccactaaccctgtggctacagaggaatacggtatcgtggcagataacttgcagcagcaaaacacggctcctcaaattggaactgtcaacagccagggggccttacccggtatggtctggcagaaccgggacgtgtacctgcagggtcccatctgggccaagattcctcacacggacggcaacttccacccgtctccgctgatgggcggctttggcctgaaacatcctccgcctcagatcctgatcaagaacacgcctgtacctgcggatcctccgaccaccttaaaccaggccaagctgaactctttcatcacgcaatacagcaccggacaggtcagcgtggaaattgaatgggagctgcagaaggaaaacagcaagcgctggaacccagagattcagtacacttcaaactactacaaatctacaaatgtggactttgctgtcaatacagagggaacttatagtgaaccccgccccattggcaccagatttctgactcgtaatctgtaa

SEQ ID NO: 1630 - DNA, 2211 bp, Artificial Sequence
  Description of Artificial Sequence: Synthetic polynucleotide
  misc_feature (338)..(338): n is a, c, g, or t
atggctgccgatggttatcttccagattggctcgaggacactctctctgaaggaataagacagtggtggaagctcaaacctggcccaccaccaccaaagcccgcagagcggcataaggacgacagcaggggtcttgtgcttcctgggtacaagtacctcggccccttcaacggactcgacaagggggagcccgtcaacgcggcggacgcagcggccctcgagcacgacaaggcctacgaccagcagctcgaagcgggtgacaatccgtacctgcggtataaccacgccgacgccgagtttcaggagcgtctgcaagaagatacgtcttttgggggcancctcgggcgagcagtcttccaggccaagaagcgggttctcgaacctctcggtctggttgaggaaggcgctaagacggctcctggaaagaagagaccagtagagcagtcaccccaagaaccagactcctcctcgggcatcggcaggaaaggccaacagcccgccagaaaaagactcaattttggccagactggcgactcagagtcagttccagaccctcaacctctcggagaacctccagcagcgccctctggtgtgggacctaatacaatggcttcaggcggtggcgctccaatggcagacaataacgaaggcgccgacggagtgggtaatgcctcaggaaattggcattgcgattccacatggctgggcgacagagtcatcaccaccagcacccgcacctgggccttgcccacctacaataaccacctctacaagcaaatctccagtgcttcaacgggggccagcaacgacaaccactacttcggctacagcaccccctgggggtattttgatttcaacagattccactgccacttttcaccacgtgactggcagcgactcatcaacaacaattggggattccggcccaagagactcaacttcaaactcttcaacatccaggtcaaggaggtcacgcagaatgaaggcactaagaccatcgccaataaccttaccagcacgattcaggtatttacggactcggaataccagctgccgtacgtcctcggctccgcgcaccagggctgcctgcctccgttcccggcggacgtcttcatgattccccagtacggctaccttacactgaacaatggaagtcaagccgtaggccgttcctccttctactgcctggaatattttccatctcaaatgctgcgaactggcaacaacttccagtttacctacaccttcgaggacgtgcctttccacagcagctacgcccacagccagagcttggaccggctgatgaatcctctgattgaccagtacctgtactacttgtctcggactcagtccacaggaggaactcaaggtacccagcaattgttattttctcaagctgggcctgcaaacatgtcggctcaggctaagaactggctacctggaccttgctaccggcagcagcgagtctctacgacactgtcgcaaaacaacaacagcaactttgcttggactggtgccaccaaatatcacctgaacggaagagactctttggtaaatcccggtgtcgccatggcaacccacaaggacgacgaggaacgcttcttcccgtcgagtggagtcctgatgtttggaaaacagggtgctggaagagacaatgtggactacagcagcgttatgctaaccagcgaagaagaaattaaaaccactaaccctgtagccacagaacaatacggtgtggtggttgataacttgcagcaaaccaatacggggcctattgtgggaaatgtcaacagccaaggagccttacctggtatggtctggcagaaccgggacgtgtacctgcagggtcccatctgggccaagattcctcacacggacggcaacttccacccgtctccgctgatgggcggctttggcctgaaacatcctccgcctcagatcctcatcaaaaacacacctgtacctgcggatcctccaacggccttcaacaaggacaagctgaactctttcatcacccagtattctactggccaagtcagcgtggagatcgagtgggagctgcagaaggaaaacagcaagcgctggaacccggagatccagtacacttccaactattacaagtctaataatgttgaatttgctgttaatactgaaggtgtatatagtgaaccccgccccattggcaccagatacctgactcgtaatctgtaa

SEQ ID NO: 1631 - protein, 735 aa, Artificial Sequence
  Description of Artificial Sequence: Synthetic polypeptide
MAADGYLPDWLEDNLSEGIREWWDLKPGAPKPKANQQKQDDGRGLVLPGYKYLGPFNGLDKGEPVNAADAAALEHDKAYDRQLDSGDNPYLKYNHADAEFQERLKEDTSFGGNLGRAVFQAKKRVLEPFGLVEEGAKTAPGKKRPVEQSPQEPDSSSGIGKTGQQPAKKRLNFGQTGDSESVPDPQPLGEPPATPAAVGPTTMASGGGAPVADNNEGADGVGSSSGNWHCDSTWLGDRVITTSTRTWALPTYNNHLYKQISSASTGASNDNHYFGYSTPWGYFDFNRFHCHFSPRDWQRLINNNWGFRPKRLNFKLFNIQVKEVTTNEGTKTIANNLTSTVQVFTDSEYQLPYVLGSAHQGCLPPFPADVFMVPQYGYLTLNNGSQALGRSSFYCLEYFPSQMLRTGNNFTFSYTFEDVPFHSSYAHSQSLDRLMNPLIDQYLYYLVRTQTTGTGGTQTLAFSQAGPSSMANQARNWVPGPCYRQQRVSTTTNQNNNSNFAWTGAAKFKLNGRDSLMNPGVAMASHKDDDDRFFPSSGVLIFGKQGAGNDGVDYSQVLITDEEEIKATNPVATEEYGAVAINNQAANTQAQTGLVHNQGVIPGMVWQNRDVYLQGPIWAKIPHTDGNFHPSPLMGGFGLKHPPPQILIKNTPVPADPPLTFNQAKLNSFITQYSTGQVSVEIEWELQKENSKRWNPEIQYTSNYYKSTNVDFAVNTEGVYSEPRPIGTRYLTRNL

SEQ ID NO: 1632 - protein, 736 aa, Artificial Sequence
  Description of Artificial Sequence: Synthetic polypeptide
  misc_feature (113)..(113): Xaa can be any naturally occurring amino acid
MAADGYLPDWLEDTLSEGIRQWWKLKPGPPPPKPAERHKDDSRGLVLPGYKYLGPFNGLDKGEPVNAADAATLEHDKAYDQQLKAGDNPYLRYNHADAEFQERLQEDTSFGGXLGRAVFQAKKRVLEPLGLVEEAAKTAPGKKRPVEPSPQRSPDSSTGIGKKGQQPARKRLNFGQTGDSESVPDPQPLGEPPAAPSGVGPNTMAAGGGAPMADNNEGADGVGSSSGNWHCDSTWLGDRVITTSTRTWALPTYNNHLYKQISSASTGASNDNHYFGYSTPWGYFDFNRFHCHFSPRDWQRLINNNWGFRPKRLNFKLFNIQVKEVTTNDGVTTIANNLTSTVQVFSDSDYQLPYVLGSAHEGCLPPFPADVFMIPQYGYLTLNNGSQALGRSSFYCLEYFPSQMLRTGNNFQFSYTFEDVPFHSSYAHSQSLDRLMNPLIDQYLYYLVRTQTTGTGGTQTLAFSQAGPSSMANQARNWVPGPCYRQQRVSTTTNQNNNSNFAWTGAAKFKLNGRDSLMNPGVAMASHKDDDDRFFPSSGVLIFGKQGAGNDGVDYSQVLITDEEEIKATNPVATEEYGAVAINNQAANTQAQTGLVHNQGVIPGMVWQDRDVYLQGPIWAKIPHTDGHFHPSPLMGGFGLKHPPPQILIKNTPVPANPPAEFSATKFASFITQYSTGQVSVEIEWELQKENSKRWNPEVQYTSNYAKSANVDFTVDNNGLYTEPRPIGTRYLTRPL

SEQ ID NO: 1633 - protein, 737 aa, Artificial Sequence
  Description of Artificial Sequence: Synthetic polypeptide
  misc_feature (112)..(112): Xaa can be any naturally occurring amino acid
MTDGYLPDWLEDNLSEGVREWWALQPGAPKPKANQQKQDDGRGLVLPGYKYLGPFNGLDKGEPVNAADAAALEHDKAYDQQLKAGDNPYLRYNHADAEFQERLQEDTSFGGXLGRAVFQAKKRVLEPLGLVEEGAKTAPGKKRPVEPSPQRSPDSSTGIGKKGQQPARKRLNFGQTGDSESVPDPQPLGEPPAAPSGVGSLTMASGGGAPVADNNEGADGVGSSSGNWHCDSQWLGDRVITTSTRTWALPTYNNHLYKQISNSTSGGSSNDNAYFGYSTPWGYFDFNRFHCHFSPRDWQRLINNNWGFRPKRLSFKLFNIQVKEVTQNEGTKTIANNLTSTIQVFTDSEYQLPYVLGSAHQGCLPPFPADVFMIPQYGYLTLNNGSQAVGRSSFYCLEYFPSQMLRTGNNFQFTYTFEDVPFHSSYAHSQSLDRLMNPLIDQYLYYLSRTQTTGGTANTQTLGFSQGGPNTMANQAKNWLPGPCYRQQRVSTTTGQNNNSNFAWTAGTKYHLNGRNSLANPGIAMATHKDDEERFFPSNGILIFGKQNAARDNADYSDVMLTSEEEIKTTNPVATEEYGIVADNLQQQNTAPQIGTVNSQGALPGMVWQNRDVYLQGPIWAKIPHTDGNFHPSPLMGGFGLKHPPPQILIKNTPVPADPPTTLNQAKLNSFITQYSTGQVSVEIEWELQKENSKRWNPEIQYTSNYYKSTNVDFAVNTEGTYSEPRPIGTRFLTRNL

SEQ ID NO: 1634 - protein, 736 aa, Artificial Sequence
  Description of Artificial Sequence: Synthetic polypeptide
  misc_feature (113)..(113): Xaa can be any naturally occurring amino acid
MAADGYLPDWLEDTLSEGIRQWWKLKPGPPPPKPAERHKDDSRGLVLPGYKYLGPFNGLDKGEPVNAADAAALEHDKAYDQQLEAGDNPYLRYNHADAEFQERLQEDTSFGGXLGRAVFQAKKRVLEPLGLVEEGAKTAPGKKRPVEQSPQEPDSSSGIGRKGQQPARKRLNFGQTGDSESVPDPQPLGEPPAAPSGVGPNTMASGGGAPMADNNEGADGVGNASGNWHCDSTWLGDRVITTSTRTWALPTYNNHLYKQISSASTGASNDNHYFGYSTPWGYFDFNRFHCHFSPRDWQRLINNNWGFRPKRLNFKLFNIQVKEVTQNEGTKTIANNLTSTIQVFTDSEYQLPYVLGSAHQGCLPPFPADVFMIPQYGYLTLNNGSQAVGRSSFYCLEYFPSQMLRTGNNFQFTYTFEDVPFHSSYAHSQSLDRLMNPLIDQYLYYLSRTQSTGGTQGTQQLLFSQAGPANMSAQAKNWLPGPCYRQQRVSTTLSQNNNSNFAWTGATKYHLNGRDSLVNPGVAMATHKDDEERFFPSSGVLMFGKQGAGRDNVDYSSVMLTSEEEIKTTNPVATEQYGVVVDNLQQTNTGPIVGNVNSQGALPGMVWQNRDVYLQGPIWAKIPHTDGNFHPSPLMGGFGLKHPPPQILIKNTPVPADPPTAFNKDKLNSFITQYSTGQVSVEIEWELQKENSKRWNPEIQYTSNYYKSNNVEFAVNTEGVYSEPRPIGTRYLTRNL

SEQ ID NO: 1635 - DNA, 2211 bp, Artificial Sequence
  Description of Artificial Sequence: Synthetic polynucleotide
atggccgccgacggctacctgcccgactggctggaggacaacctgagcgagggcatccgcgagtggtgggccctgaagcccggcgccccccagcccaaggccaaccagcagcaccaggacaacgcccgcggcctggtgctgcccggctacaagtacctgggccccggcaacggcctggacaagggcgagcccgtgaacgccgccgacgccgccgccctggagcacgacaaggcctacgaccagcagctgaaggccggcgacaacccctacctgaagtacaaccacgccgacgccgagttccaggagcgcctgaaggaggacaccagcttcggcggcaacctgggccgcgccgtgttccaggccaagaagcgcctgctggagcccctgggcctggtggaggaggccgccaagaccgcccccggcaagaagcgccccgtggagcagagcccccaggagcccgacagcagcgccggcatcggcaagagcggcgcccagcccgccaagaagcgcctgaacttcggccagaccggcgacaccgagagcgtgcccgacccccagcccatcggcgagccccccgccgcccccagcggcgtgggcagcctgaccatggccagcggcggcggcgcccccgtggccgacaacaacgagggcgccgacggcgtgggcagcagcagcggcaactggcactgcgacagccagtggctgggcgaccgcgtgatcaccaccagcacccgcacctgggccctgcccacctacaacaaccacctgtacaagcagatcagcaacagcaccagcggcggcagcagcaacgacaacgcctacttcggctacagcaccccctggggctacttcgacttcaaccgcttccactgccacttcagcccccgcgactggcagcgcctgatcaacaacaactggggcttccgccccaagcgcctgaacttcaagctgttcaacatccaggtgaaggaggtgaccgacaacaacggcgtgaagaccatcgccaacaacctgaccagcaccgtgcaggtgttcaccgacagcgactaccagctgccctacgtgctgggcagcgcccacgagggctgcctgccccccttccccgccgacgtgttcatgatcccccagtacggctacctgaccctgaacgacggcagccaggccgtgggccgcagcagcttctactgcctggagtacttccccagccagatgctgcgcaccggcaacaacttccagttcagctacgagttcgagaacgtgcccttccacagcagctacgcccacagccagagcctggaccgcctgatgaaccccctgatcgaccagtacctgtactacctgagcaagaccatcaacggcagcggccagaaccagcagaccctgaagttcagcgtggccggccccagcaacatggccgtgcagggccgcaactacatccccggccccagctaccgccagcagcgcgtgagcaccaccgtgacccagaacaacaacagcgagttcgcctggcccggcgccagcagctgggccctgaacggccgcaacagcctgatgaaccccggccccgccatggccagccacaaggagggcgaggaccgcttcttccccctgagcggcagcctgatcttcggcaagcagggcaccggccgcgacaacgtggacgccgacaaggtgatgatcaccaacgaggaggagatcaagaccaccaaccccgtggccaccgagagctacggccaggtggccaccaaccaccagagcgcccaggcccaggcccagaccggctgggtgcagaaccagggcatcctgcccggcatggtgtggcaggaccgcgacgtgtacctgcagggccccatctgggccaagatcccccacaccgacggcaacttccaccccagccccctgatgggcggcttcggcatgaagcacccccccccccagatcctgatcaagaacacccccgtgcccgccgacccccccaccgccttcaacaaggacaagctgaacagcttcatcacccagtacagcaccggccaggtgagcgtggagatcgagtgggagctgcagaaggagaacagcaagcgctggaaccccgagatccagtacaccagcaactactacaagagcaacaacgtggagttcgccgtgaacaccgagggcgtgtacagcgagccccgccccatcggcacccgctacctgacccgcaacctgtaa

SEQ ID NO: 1636 - DNA, 2211 bp, Artificial Sequence
  Description of Artificial Sequence: Synthetic polynucleotide
atggctgccgatggttatcttccagattggctcgaggacactctctctgaaggaataagacagtggtggaagctcaaacctggcccaccaccaccaaagcccgcagagcggcataaggacgacagcaggggtcttgtgcttcctgggtacaagtacctcggacccttcaacggactcgacaagggagagccggtcaacgaggcagacgccgcggccctcgagcacgacaaggcctacgaccagcagctcaaggccggagacaacccgtacctcaagtacaaccacgccgacgccgagttccaggagcggctcaaagaagatacgtcttttgggggcaacctcggacgagcagtcttccaggccaagaagcgggttctcgaacctctcggtctggttgaggaaggcgctaagacggctcctggaaagaaacgtccggtagagcagtcgccacaagagccagactcctcctcgggcattggcaagacaggccagcagcccgctaaaaagagactcaattttggtcagactggcgactcagagtcagtccccgacccacaacctctcggagaacctccagcaacccccgctgctgtgggacctactacaatggcttcaggcggtggcgcaccaatggcggacaataacgaaggcgccgatggagtgggtagttcctcgggaaattggcattgcgattcccaatggctgggggacagagtcatcaccaccagcacccgaacatgggccttgcccacctataacaaccacctctacaagcaaatctccagtgcttcaacgggggccagcaacgacaaccactacttcggctacagcaccccctgggggtattttgacttcaacagattccactgccacttctcaccacgtgactggcagcgactcatcaacaacaactggggattccgacccaagagactcaacttcaagctctttaacattcaagtcaaggaggtcacgcagaatgaaggcaccaagaccatcgccaataacctcaccagcaccatccaggtgtttacggactcggagtaccagctgccgtacgttctcggctccgcccaccagggctgcctgcctccgttcccggcggacgtgttcatgattccccagtacggctacctaacactcaacaacggtagtcaggccgtgggacgctcctccttctactgcctggaatactttccttcgcagatgctgagaaccggcaacaacttccagtttacttacaccttcgaggacgtgcctttccacagcagctacgcccacagccagagcttggaccggctgatgaatcctctgattgaccagtacctgtactacttgtctcggactcaaacaacaggaggcacggcaaatacgcagactctgggcttcagccaaggtgggcctaatacaatggccaatcaggcaaagaactggctgccaggaccctgttaccgccaacaacgcgtctcaacgacaaccgggcaaaacaacaatagcaactttgcctggactgctgggaccaaataccatctgaatggaagaaattcattggctaatcctggcatcgctatggcaacacacaaagacgacaaggagcgtttttttcccagtaacgggatcctgatttttggcaaacaaaatgctgccagagacaatgcggattacagcgatgtcatgctcaccagcgaggaagaaatcaaaaccactaaccctgtggctacagaggaatacggtatcgtggcagataacttgcagcagcaaaacacggctcctcaaattggaactgtcaacagccagggggccttacccggtatggtctggcagaaccgggacgtgtacctgcagggtcccatctgggccaagattcctcacacggacggcaacttccacccgtctccgctgatgggcggctttggcctgaaacatcctccgcctcagatcctgatcaagaacacgcctgtacctgcggatcctccgaccaccttcaaccagtcaaagctgaactctttcatcacgcaatacagcaccggacaggtcagcgtggaaattgaatgggagctgcagaaagaaaacagcaaacgctggaacccagagattcaatacacttccaactactacaaatctacaagtgtggactttgctgttaatacagaaggcgtgtactctgaaccccaccccattggcacccgttacctcacccgtcccctgtaa

SEQ ID NO: 1637 - DNA, 2211 bp, Artificial Sequence
  Description of Artificial Sequence: Synthetic polynucleotide
atggctgccgatggttatcttccagattggctcgaggacaacctctctgagggcattcgcgagtggtgggcgctgaaacctggagccccgaagcccaaagccaaccagcaaaagcaggacgacggccggggtctggtgcttcctggctacaagtacctcggacccttcaacggactcgacaagggggagccggtcaacgcagcagacgcggcggccctcgagcacgacaaggcctacgaccagcagctcaaggccggagacaacccgtacctcaagtacaaccacgccgacgccgagttccaggagcggctcaaagaagatacgtcttttgggggcaacctcgggcgagcagtcttccaggccaaaaagaggcttcttgaacctcttggtctggttgaggaagcggctaagacggctcctggaaagaagaggcctgtagagcagtctcctcaggaaccggactcctccgcgggtattggcaaatcgggtgcacagcccgctaaaaagagactcaattttggtcagactggcgactcagagtcagtccccgacccacaacctctcggagaacctccagcaacccccgctgctgtgggacctactacaatggcttcaggcggtggcgcaccaatggcagacaataacgaaggcgccgacggagtgggtaatgcctcaggaaattggcattgcgattccacatggctgggcgacagagtcatcaccaccagcacccgaacctgggccctgcccacctacaataaccacctctacaagcaaatctccagtgcttcaacgggggccagcaacgacaaccactacttcggctacagcaccccctgggggtattttgatttcaacagattccactgccacttttcaccacgtgactggcagcgactcatcaacaacaattggggattccggcccaagagactcaacttcaaactcttcaacatccaagtcaaggaggtcacgcagaatgaaggcaccaagaccatcgccaataacctcaccagcaccatccaggtgtttacggactcggagtaccagctgccgtacgttctcggctctgcccaccagggctgcctgcctccgttcccggcggacgtgttcatgattccccagtacggctacctaacactcaacaacggtagtcaggccgtgggacgctcctccttctactgcctggaatactttccttcgcagatgctgagaaccggcaacaacttccagtttacttacaccttcgaggacgtgcctttccacagcagctacgcccacagccagagcttggaccggctgatgaatcctctgattgaccagtacctgtactacttgtctcggactcaaacaacaggaggcacggcaaatacgcagactctgggcttcagccaaggtgggcctaatacaatggccaatcaggcaaagaactggctgccaggaccctgttaccgccaacaacgcgtctcaacgacaaccgggcaaaacaacaatagcaactttgcctggactgctgggaccaaataccatctgaatggaagaaattcattggctaatcctggcatcgctatggcaacacacaaagacgacaaggagcgtttttttcccagtaacgggatcctgatttttggcaaacaaaatgctgccagagacaatgcggattacagcgatgtcatgctcaccagcgaggaagaaatcaaagccactaaccctgtggctacagaggaatacggtatcgtggcagataacttgcagcagcaaaacacggctcctcaaattggaactgtcaacagccagggggccttacccggtatggtttggcagaaccgggacgtgtacctgcagggtcccatctgggccaagattcctcacacggacggcaacttccacccgtctccgctgatgggcggctttggcctgaaacatcctccgcctcagatcctgatcaagaacacgcctgtacctgcggatcctccgaccaccttcaaccagtcaaagctgaactctttcatcacgcaatacagcaccggacaggtcagcgtggaaattgaatgggagctgcagaaggaaaacagcaagcgctggaaccccgagatccagtacacctccaactactacaaatctacaagtgtggactttgctgttaatacagaaggcgtgtactctgaaccccaccccattggcacccgttacctcacccgtcccctgtaa

SEQ ID NO: 1638 - DNA, 2214 bp, Artificial Sequence
  Description of Artificial Sequence: Synthetic polynucleotide
atggctgccgatggttatcttccagattggctcgaggacaacctctctgagggcattcgcgagtggtgggacttgaaacctggagccccgaagcccaaagccaaccagcaaaagcaggacgacggccggggtctggtgcttcctggctacaagtacctcggacccttcaacggactcgacaagggggagcccgtcaacgcggcggacgcagcggccctcgagcacgacaaggcctacgaccagcagctcaaagcgggtgacaatccgtacctgcggtataaccacgccgacgccgagtttcaggagcgtctgcaagaagatacgtcttttgggggcaacctcgggcgagcagtcttccaggccaagaagcgggttctcgaacctctcggtctggttgaggaaggcgctaatacggctcctggaaagaaacgtccggtagagcagtcgccacaagagccagactcctccgcgggtattggcaaatcgggtgcacagcccgctaaaaagagactcaatttcggtcagactggcgacacagagtcagtcccagaccctcaaccaatcggagaacctcccgcagccccctcaggtgtgggatctcttacaatggcttcaggtggtggcgcaccagtggcagacaataacgaaggtgccgatggagtgggtagttcctcgggaaattggcattgcgattcccaatggctgggggacagagtcatcaccaccagcacccgaacctgggccctgcccacctacaacaatcacctctacaagcaaatctccaacagcacatctggaggatcttcaaatgacaacgcctacttcggctacagcaccccctgggggtattttgacttcaacagattccactgccacttctcaccacgtgactggcagcgactcatcaacaacaactggggattccggcctaagcgactcaacttcaagctcttcaacattcaggtcaaagaggttacggacaacaatggagtcaagaccatcgccaataacctcaccagcaccatccaggtgtttacggactcggagtaccagctgccgtacgttctcggctccgcccaccagggctgcctgcctccgttcccggcggacgtgttcatgattccccagtacggctacctaacactcaacaacggtagtcaggccgtgggacgctcctccttctactgcctggaatactttccttcgcagatgctgagaaccggcaacaacttccagtttacttacaccttcgaggacgtgcctttccacagcagctacgcccacagccagagcttggaccggctgatgaatcctctgattgaccagtacctgtactacttgtctcggactcaaacaacaggaggcacggcaaatacgcagactctgggcttcagccaaggtgggcctaatacaatggccaatcaggcaaagaactggctgccaggaccctgttaccgccaacaacgcgtctcaacgacaaccgggcaaaacaacaatagcaactttgcctggactgctgggaccaaataccatctgaatggaagaaattcattggctaatcctggcatcgctatggcctcacacaaagacgacaaggagcgtttttttcccagtaacgggatcctgatttttggcaaacaaaatgctgccagagacaatgcggattacagcgatgtcatgctcaccagcgaggaagaaatcaaaaccactaaccctgtggctacagaggaatacggtatcgtggcagataacttgcagcagcaaaacacggctcctcaaattggaactgtcaacagtcaaggagccttacctggcatggtctggcagaaccgggacgtgtacctgcagggtcccatctgggccaagattcctcacacggacggcaacttccacccgtctccgctgatgggcggctttggcctgaaacatcctccgcctcagatcctgatcaagaacacgcctgtacctgcggatcctccgaccaccttcaaccagtcaaagctgaactctttcatcacgcaatacagcaccggacaggtcagcgtggaaattgaatgggagctgcagaaggaaaacagcaagcgctggaaccccgagatccagtacaccaccaactactacaaatctacaagtgtggactttgctgttaatacagaaggcgtgtactctgaaccccaccccattggcacccgttacctcacccgtcccctgtaa

SEQ ID NO: 1639 - DNA, 2211 bp, Artificial Sequence
  Description of Artificial Sequence: Synthetic polynucleotide
atggctgccgatggttatcttccagattggctcgaggacaacctctctgagggcattcgcgagtggtgggcgctgaaacctggagccccgaagcccaaagccaaccagcaaaagcaggacgacggccggggtctggtgcttcctggctacaagtacctcggacccttcaacggactcgacaaaggagagccggtcaacgaggcggacgcggcagccctcgaacacgacaaagcttacgaccagcagctcaaggccggtgacaatccgtacctgcggtataaccacgccgacgccgagtttcaggagcgtcttcaagaagatacgtcttttgggggcaacctcgggcgagcagtcttccaggccaagaagcgggttctcgaacctctcggtctggttgaggaaggcgctaagacggctcctggaaagaaacgtccggtagagcagtcgccacaagagccagactcctcctcgggcatcggcaagacaggccagcagcccgctaaaaagagactcaattttggtcagactggcgactcagagtcagtccccgacccacaacctctcggagaacctccagcaacccccgctgctgtgggacctactacaatggcttcaggcggtggcgcaccaatggcagacaataacgaaggcgccgacggagtgggtaatgcctcaggaaattggcattgcgattccacatggctgggcgacagagtcatcaccaccagcacccgcacctgggccttgcccacctacaataaccacctctacaagcaaatctccagtgcttcaacgggggccagcaacgacaaccactacttcggctacagcaccccctgggggtattttgactttaacagattccactgccacttttcaccacgtgactggcaaagactcatcaacaacaactggggattccggcccaagagactcaacttcaagctcttcaacatccaggtcaaggaggtcacgcagaatgaaggcaccaagaccatcgccaataaccttaccagcacgattcaggtctttacggactcggaataccagctcccgtacgtcctcggctctgcgcaccagggctgcctccctccgttcccggcggacgtgttcatgattccgcagtacggctacctaacactcaacaacggtagtcaggccgtgggacgctcctccttctactgcctggaatactttccttcgcagatgctgagaaccggcaacaacttccagtttacttacaccttcgaggacgtgcctttccacagcagctacgcccacagccagagcttggaccggctgatgaatcctctgattgaccagtacctgtactacttgtctcggactcaaacaacaggaggcacggcaaatacgcagactctgggcttcagccaaggtgggcctaatacaatggccaatcaggcaaagaactggctgccaggaccctgttaccgccaacaacgcgtctcaacgacaaccgggcaaaacaacaatagcaactttgcctggactgctgggaccaaataccatctgaatggaagaaattcattggctaatcctggcatcgctatggcaacacacaaagacgacaaggagcgtttttttcccagtaacgggatcctgatttttggcaaacaaaatgctgccagagacaatgcggattacagcgatgtcatgctcaccagcgaggaagaaatcaaaaccactaaccctgtggctacagaggaatacggtatcgtggcagataacttgcagcagcaaaacacggctcctcaaattggaactgtcaacagccagggggccttacccggtatggtctggcagaaccgggacgtgtacctgcagggtcccatctgggccaagattcctcacacggacggcaacttccacccgtctccgctgatgggcggctttggcctgaaacatcctccgcctcagatcctgatcaagaacacgcctgtacctgcggatcctccgaccaccttcaaccagtcaaagctgaactctttcatcacgcaatacagcaccggacaggtcagcgtggaaattgaatgggagctgcagaaggaaaacagcaagcgctggaaccccgagatccagtacacctccaactactacaaatctacaagtgtggactttgctgttaatacagaaggcgtgtactctgaaccccaccccattggcacccgttacctcacccgtcccctgtaa

SEQ ID NO: 1640 - DNA, 2211 bp, Artificial Sequence
  Description of Artificial Sequence: Synthetic polynucleotide
atggctgccgatggttatcttccagattggctcgaggacaacctctctgagggcattcgcgagtggtgggcgctgaaacctggagccccgaagcccaaagccaaccagcaaaagcaggacgacggccggggtctggtgcttcctggctacaagtacctcggacccttcaacggactcgacaaaggagagccggtcaacgaggcggacgcggcagccctcgaacacgacaaagcttacgaccagcagctcaaagcgggtgacaatccgtacctgcggtataaccacgccgacgccgagtttcaggagcgtctgcaagaagatacgtcttttgggggcaacctcgggcgagcagtcttccaggccaagaagagggttctcgaaccttttggtctggttgaggaaggtgctaagacggctcctggaaagaaacgtccggtagagcagtcgccacaagagccagactcctcctcgggcattggcaagacaggccagcagcccgctaaaaagagactcaattttggtcagactggcgactcagagtcagtccccgacccacaacctctcggagaacctccagcaacccccgctgctgtgggacctactacaatggcttcaggcggtggcgcaccaatggcagacaataacgaaggcgccgacggagtgggtaatgcctcaggaaattggcattgcgattcccaatggctgggcgacagagtcatcaccaccagcaccagaacctgggccttgcccacctataacaaccacctctacaagcaaatctccagtgcttcaacgggggccagcaacgacaaccactacttcggctacagcaccccctgggggtattttgatttcaacagattccactgccacttctcaccacgtgactggcagcgactcatcaacaacaactggggattccggcctaagcgactcaacttcaagctcttcaacattcaggtcaaagaggttacggacaacaatggagtcaagaccatcgccaataaccttaccagcacggttcaagtcttctcggactcggagtaccagttgccgtacgtcctcggctctgcgcaccagggctgcctccctccgttcccggcggacgtgttcatgattccccagtacggctacctaacactcaacaacggtagtcaggccgtgggacgctcctccttctactgcctggaatactttccttcgcagatgctgagaaccggcaacaacttccagtttacttacaccttcgaggacgtgcctttccacagcagctacgcgcacagccagagcttggaccggctgatgaatcctctgattgaccagtacctgtactacttgtctcggactcaaacaacaggaggcacggcaaatacgcagactctgggcttcagccaaggtgggcctaatacaatggccaatcaggcaaagaactggctgccaggaccctgttaccgccaacaacgcgtctcaacgacaaccgggcaaaacaacaatagcaactttgcctggactgctgggaccaaataccatctgaatggaagaaattcattggctaatcctggcatcgctatggcaacacacaaagacgacaaggagcgtttttttcccagtaacgggatcctgatttttggcaaacaaaatgctgccagagacaatgcggattacagcgatgtcatgctcaccagcgaggaagaaatcaaaaccactaaccctgtggctacagaggaatacggtatcgtggcagataacttgcagcagcaaaacacggctcctcaaattggaactgtcaacagccagggggccttacccggtatggtctggcagaaccgggacgtgtacctgcagggtcccatctgggccaagattcctcacacggacggcaacttccacccgtctccgctgatgggcggctttggcctgaaacatcctccgcctcagatcctgatcaagaacacgcctgtacctgcggatcctccgaccaccttcaaccagtcaaagctgaactctttcatcacgcaatacagcaccggacaggtcagcgtggaaattgaatgggagctgcagaaggaaaacagcaagcgctggaaccccgagatccagtacacctccaactactacaaatctacaagtgtggactttgctgttaatacagaaggcgtgtactctgaaccccaccccattggcacccgttacctcacccgtcccctgtaa

SEQ ID NO: 1641 - DNA, 2244 bp, Artificial Sequence
  Description of Artificial Sequence: Synthetic polynucleotide
  misc_feature (2241)..(2241): n is a, c, g, or t
atggctgccgatggttatcttccagattggctcgaggacactctctctgaaggaataagacagtggtggaagctcaaacctggcccaccaccaccaaagcccgcagagcggcataaggacgacagcaggggtcttgtgcttcctgggtacaagtacctcggacccttcaacggactcgacaagggagagccggtcaacgaggcagacgccgcggccctcgagcacgacaaagcctacgaccggcagctcgacagcggagacaacccgtacctcaagtacaaccacgccgacgcggagtttcaggagcgccttaaagaagatacgtcttttgggggcaacctcgggcgagcagtcttccaggccaagaagagggttctcgaaccttttggtctggttgaggaaggtgctaagacggctcctggaaagaaacgtccggtagagcagtcgccacaagagccagactcctcctcgggcattggcaagacaggccagcagcccgctaaaaagagactcaattttggtcagactggcgactcagagtcagtccccgacccacaacctctcggagaacctccagcaacccccgctgctgtgggacctactacaatggcttcaggcggtggcgcaccaatggcagacaataacgaaggcgccgacggagtgggtaatgcctcaggaaattggcattgcgattccacatggctgggcgacagagtcatcaccaccagcacccgaacatgggccttgcccacctataacaaccacctctacaagcaaatctccagtgcttcaacgggggccagcaacgacaaccactacttcggctacagcaccccctgggggtattttgacttcaacagattccactgccacttctcaccacgtgactggcagcgactcatcaacaacaactggggattccggcctaagcgactcaacttcaagctcttcaacattcaggtcaaagaggttacggacaacaatggagtcaagaccatcgccaataaccttaccagcacggtccaggtcttcacggactcagactatcagctcccgtacgtgctcgggtcggctcacgagggctgcctcccgccgttcccagcggacgttttcatgattcctcagtacggctacctaacactcaacaacggtagtcaggccgtgggacgctcctccttctactgcctggaatactttccttcgcagatgctgagaaccggcaacaacttccagtttacttacaccttcgaggacgtgcctttccacagcagctacgcgcacagccagagcttggaccggctgatgaatcctctgattgaccagtacctgtactacttgtctcggactcaaacaacaggaggcacggcaaatacgcagactctgggcttcagccaaggtgggcctaatacaatggccaatcaggcaaagaactggctgccaggaccctgttaccgccaacaacgcgtctcaacgacaaccgggcaaaacaacaatagcaactttgcctggactgctgggaccaaataccatctgaatggaagaaattcattggctaatcctggcatcgctatggcaacacacaaagacgacaaggagcgtttttttcccagtaacgggatcctgatttttggcaaacaaaatgctgccagagacaatgcggattacagcgatgtcatgctcaccagcgaggaagaaatcaaaaccactaaccctgtggctacagaggaatacggtatcgtggcagataacttgcagcagcaaaacacggctcctcaaattggaactgtcaacagccagggggccttacccggtatggtctggcagaaccgggacgtgtacctgcagggtcccatctgggccaagattcctcacacggacggcaacttccacccgtctccgctgatgggcggctttggcctgaaacatcctccgcctcagatcctgatcaagaacacgcctgtacctgcggatcctccgaccaccttcaaccagtcaaagctgaactctttcatcacgcaatacagcaccggacaggtcagcgtggaaattgaatgggagctgcagaaggaaaacagcaagcgctggaaccccgagatccagtacacctccaactactacaaatctacaagtgtggactttgctgttaatacagaaggcgtgtactctgaaccccaccccattggcaccagatacctgactcgtaatctgtaattgcttgttaatcaataaaccgtttaattnttt

SEQ ID NO: 1642 - DNA, 2217 bp, Artificial Sequence
  Description of Artificial Sequence: Synthetic polynucleotide
atggctgccgatggttatcttccagattggctcgaggacaacctctctgagggcattcgcgagtggtgggacttgaaacctggagccccgaaacccaaagccaaccagcaaaagcaggacgacggccggggtctggtgcttcctggctacaagtacctcggacccttcaacggactcgacaagggggagcccgtcaacgcggcggacgcagcggccctcgagcacgacaaggcctacgaccagcagctccaagcgggtgacaatccgtacctgcggtataaccacgccgacgccgagtttcaggagcgtctgcaagaagatacgtcttttgggggcaacctcggacgagcagtcttccaggcgaaaaagagggttctcgaacctctcggtctggttgaggaaggcgctaagacggctcctggaaagaagagaccggtagagccatcaccccagcgttctccagactcctctacgggcatcggcaagaaaggccaacagcccgccagaaaaagactcaattttggtcagactggcgactcagagtcagttccagaccctcaacctctcggagaacctccagcagcgccctctggtgtgggacctaatacaatggctgcaggcggtggcgcaccaatggcagacaataacgaaggcgccgacggagtgggtagttcctcgggaaattggcattgcgattcccaatggctgggggacagagtcatcaccaccagcacccgaacctgggccctgcccacctacaacaatcacctctacaagcaaatctccaacagcacatctggaggatcttcaaatgacaacgcctacttcggctacagcaccccctgggggtattttgacttcaaccgcttccactgccacttctcaccacgtgactggcagcgactcatcaacaacaactggggattccggcccaagagactcagcttcaaactcttcaacatccaggtcaaggaggtcacgcagaatgaaggcaccaagaccatcgccaataacctcaccagcaccatccaggtgtttacggactcggagtaccagctgccgtacgttctcggctctgcccaccagggctgcctgcctccgttcccggcggacgtgttcatgattcctcagtacggctacctaacgctcaacaatggcagccaggcagtgggacggtcatccttttactgcctggaatatttcccatcgcagatgctgagaacgggcaacaactttaccttcagctacacctttgaggacgttcctttccacagcagctacgctcacagccagagtctggaccgtctcatgaatcctctgattgaccagtacctgtactacttgtctcggactcaaacaacaggaggcacggcaaatacgcagactctgggcttcagccaaggtgggcctaatacaatggccaatcaggcaaagaactggctgccaggaccctgttaccgccaacaacgcgtctcaacgacaaccgggcaaaacaacaatagcaactttgcctggactgctgggaccaaataccatctgaatggaagaaattcattggctaatcctggcatcgctatggcaacacacaaagacgacaaggagcgtttttttcccagtaacgggatcctgatttttggcaaacaaaatgctgccagagacaatgcggattacagcgatgtcatgctcaccagcgaggaagaaatcaaaaccactaaccctgtggctacagaggaatacggtatcgtggcagataacttgcagcagcaaaacacggctcctcaaattggaactgtcaacagccagggggccttacccggtatggtctggcagaaccgggacgtgtacctgcagggtcccatctgggccaagattcctcacacggacggcaacttccacccgtctccgctgatgggcggctttggacttaagcacccgcctcctcagatcctcatcaaaaacacgcctgttcctgcggatcctccgaccaccttcaaccagtcaaagctgaactctttcatcacgcaatacagcaccggacaggtcagcgtggaaattgaatgggagctgcagaaggaaaacagcaagcgctggaaccccgagatccagtacacctccaactactacaaatctacaagtgtggactttgctgttaatacagaaggcgtgtactctgaaccccaccccattggcacccgttacctcacccgtcccctgtaa

SEQ ID NO: 1643 - DNA, 2214 bp, Artificial Sequence
  Description of Artificial Sequence: Synthetic polynucleotide
atggctgccgatggttatcttccagattggctcgaggacaacctctctgagggcattcgcgagtggtgggacttgaaacctggagccccgaagcccaaagccaaccagcaaaagcaggacgacggccggggtctggtgcttcctggctacaagtacctcggacccttcaacggactcgacaagggggagcccgtcaacgcggcggatgcagcggccctcgagcacgacaaagcctacgaccagcagctcaaagcgggtgacaatccgtacctgcggtataaccacgccgacgccgagtttcaggagcgtctgcaagaagatacgtcttttgggggcaacctcgggcgagcagtcttccaggccaagaagagggttctcgaaccttttggtctggttgaggaaggtgctaagacggctcctggaaagaaacgtccggtagagcagtcgccacaagagccagactcctcctcgggcattggcaagacaggccagcagcccgctaaaaagagactcaattttggtcagactggcgactcagagtcagtccccgacccacaacctctcggagaacctccagcaacccccgctgctgtgggacctactacaatggcttcaggcggtggcgcacccatgcaagacaataacgaaggcgccgacggagtgggtagttcctcgggaaattggcattgcgattccacatggctgggcgacagagtcatcaccaccagcacccgaacctgggccctgcccacctacaacaaccacctctacaagcaaatctccaacgggacatcgggaggagccaccaacgacaacacctacttcggctacagcaccccctgggggtattttgactttaacagattccactgccacttttcaccacgtgactggcagcgactcatcaacaacaactggggattccggcccaagagactcaacttcaagctcttcaacatccaggtcaaggaggtcacgcagaatgaaggcaccaagaccatcgccaataaccttaccagcacgattcaggtctttacggattcggaataccagctcccgtacgtcctcggctctgcgcaccagggctgcctccctccgttcccggcggacgtgttcatgattccgcagtacggctacctaacgctcaacaatggtagccaggcagtgggacggtcatccttttactgcctggaatatttcccatcgcagatgctgagaacgggcaacaactttaccttcagctacacctttgaggacgttcctttccacagcagctacgctcacagccagagtctggaccgtctcatgaatcctctgattgaccagtacctgtactacttgtctcggactcaaacaacaggaggcacggcaaatacgcagactctgggcttcagccaaggtgggcctaatacaatggccaatcaggcaaagaactggctgccaggaccctgttaccgccaacaacgcgtctcaacgacaaccgggcaaaacaacaatagcaactttgcctggactgctgggaccaaataccatctgaatggaagaaattcattggctaatcctggcatcgctatggcaacacacaaagacgacaaggagcgtttttttcccagtaacgggatcctgatttttggcaaacaaaatgctgccagagacaatgcggattacagcgatgtcatgctcaccagcgaggaagaaatcaaaaccactaaccctgtggctacagaggaatacggtatcgtggcagataacttgcagcagcaaaacacggctcctcaaattggaactgtcaacagccagggggccttacccggtatggtctggcagaaccgggacgtgtacctgcagggtcccatctgggccaagattcctcacacggacggcaacttccacccgtctccgctgatgggcggctttggcctgaaacatcctccgcctcagatcctgatcaagaacacgcctgtacctgcggatcctccgaccaccttcaaccagtcaaagctgaactctttcatcacgcaatacagcaccggacaggtcagcgtggaaattgaatgggagctgcagaaggaaaacagcaagcgctggaaccccgagatccagtacacctccaactactacaaatctacaagtgtggactttgctgttaatacagaaggcgtgtactctgaaccccaccccattggcacccgttacctcacccgtcccctgtaa

SEQ ID NO: 1644 - DNA, 2211 bp, Artificial Sequence
  Description of Artificial Sequence: Synthetic polynucleotide
atggctgccgatggttatcttccagattggctcgaggacaacctctctgagggcattcgcgagtggtgggcgctgaaacctggagccccgaagcccaaagccaaccagcaaaagcaggacgacggccggggtctggtgcttcctggctacaagtacctcggacccttcaacggactcgacaagggggagcccgtcaacgcggcggacgcagcggccctcgagcacgacaaggcctacgaccagcagctcaaagcgggtgacaatccgtacctgcggtataaccacgccgacgccgagtttcaggagcgtctgcaagaagatacgtcttttgggggcaacctcgggcgagcagtcttccaggccaagaagcgggttctcgaacctctcggtctggttgaggaaggcgctaagacggctcctggaaagaaacgtccggtagagcagtcgccacaagagccagactcctcctcgggcatcggcaagacaggccagcagcccgctaaaaagagactcaattttggtcagactggcgactcagagtcagtccccgacccacaacctctcggagaacctccagcaacccccgctgctgtgggacctactacaatggcttcaggcggtggcgcaccaatggcagacaataacgaaggcgccgacggagtgggtagttcctcgggaaattggcattgcgattccacatggctgggcgacagagtcatcaccaccagcacccgcacctgggccttgcccacctacaataaccacctctacaagcaaatctccagtgcttcaacgggggccagcaacgacaaccactacttcggctacagcaccccctgggggtattttgacttcaacagattccactgccacttctcaccacgtgactggcagcgactcatcaacaacaactggggattccggcctaagcgactcaacttcaagctcttcaacattcaggtcaaagaggttacggacaacaatggagtcaagaccatcgccaataaccttaccagcacggtccaggtcttcacggactcagactatcagctcccgtacgtgctcgggtcggctcacgagggctgcctcccgccgttcccagcggacgttttcatgattcctcagtacgggtatctgacgctcaacaatggcagccaggcagtgggacggtcatccttttactgcctggaatatttcccatcgcagatgctgagaacgggcaataactttaccttcagctacaccttcgaggacgtgcctttccacagcagctacgcgcacagccagagcctggaccggctgatgaatcctctgattgaccagtacctgtactacttgtctcggactcaaacaacaggaggcacggcaaatacgcagactctgggcttcagccaaggtgggcctaatacaatggccaatcaggcaaagaactggctgccaggaccctgttaccgccaacaacgcgtctcaacgacaaccgggcaaaacaacaatagcaactttgcctggactgctgggaccaaataccatctgaatggaagaaattcattggctaatcctggcatcgctatggcaacacacaaagacgacaaggagcgtttttttcccagtaacgggatcctgatttttggcaaacaaaatgctgccagagacaatgcggattacagcgatgtcatgctcaccagcgaggaagaaatcaaaaccactaaccctgtggctacagaggaatacggtatcgtggcagataacttgcagcagcaaaacacggctcctcaaattggaactgtcaacagccagggggccttacccggtatggtctggcagaaccgggacgtgtacctgcagggtcccatctgggccaagattcctcacacggacggcaacttccacccgtctccgctgatgggcggctttggcctgaaacatcctccgcctcagatcctgatcaagaacacgcctgtacctgcggatcctccgaccaccttcaaccagtcaaagctgaactctttcatcacgcaatacagcaccggacaggtcagcgtggaaattgaatgggagctgcagaaggaaaacagcaagcgctggaaccccgagatccagtacacctccaactactacaaatctacaagtgtggactttgctgttaatacagaaggcgtgtactctgaaccccaccccattggcacccgttacctcacccgtcccctgtaa

SEQ ID NO: 1645 - DNA, 2214 bp, Artificial Sequence
  Description of Artificial Sequence: Synthetic polynucleotide
atggctgccgatggttatcttccagattggctcgaggacaacctctctgagggcattcgcgagtggtgggacttgaaacctggagccccgaaacccaaagccaaccagcaaaagcaggacgacggccggggtctggtgcttcctggctacaagtacctcggacccttcaacggactcgacaagggggagcccgtcaacgcggcggatgcagcggccctcgagcacgacaaggcctacgaccagcagctcaaagcgggtgacaatccgtacctgcggtataaccacgccgacgccgagtttcaggagcgtctgcaagaagatacgtcttttgggggcaacctcgggcgagcagtcttccaggccaagaagcgggttctcgaacctctcggtctggttgaggaaggcgctaagacggctcctggaaagaagagaccggtagagccatcaccccagcgttctccagactcctctacgggcatcggcaagaaaggccaacagcccgccagaaaaagactcaattttggtcagactggcgactcagagtcagtccccgacccacaacctctcggagaacctccagcaacccccgctgctgtgggacctactacaatggcttcaggcggtggcgcaccaatggcagacaataacgaaggcgccgacggagtgggtaatgcctcaggaaattggcattgcgattccacatggctgggcgacagagtcatcaccaccagcacccgaacatgggccttgcccacctataacaaccacctctacaagcaaatctccagtgcttcaacgggggccagcaacgacaaccactacttcggctacagcaccccctgggggtattttgatttcaacagattccactgccatttctcaccacgtgactggcagcgactcatcaacaacaatttgggatcccggcccaagagactcaacttcaagctcttcatcatccaagtcaaggaggtcacgacgaatgatggcgtcacgaccatcgctaataaccttaccagcacggttcaagtcttctcggactcggagtaccagttgccgtacgtcctcggctctgcgcaccagggctgcctccctccgttcccggcggacgtgttcatgattccgcagtacggctacctaacgctcaacaatggcagccaggcagtgggacggtcatccttttactgcctggaatatttcccatcgcagatgctgagaacgggcaataactttaccttcagctacaccttcgaggacgtgcctttccacagcagctacgcgcacagccagagcctggaccggctgatgaatcctctcatcgaccagtacctgtattacctgaacagaactcagaatcagtccggaagtgcccaaaacaaggacttgctgtttagccgggggtctccagctggcatgtctgttcagcccaaaaactggctacctggaccctgttaccggcagcagcgcgtttctaaaacaaaaacagacaacaacaacagcaactttacctggactggtgcttcaaaatataaccttaatgggcgtgaatctataatcaaccctggcactgctatggcctcacacaaagacgacaaagacaagttctttcccatgagcggtgtcatgatttttggaaaggagagcgccggagcttcaaacactgcattggacaatgtcatgatcacagacgaagaggaaatcaaagccactaaccccgtggccaccgaaagatttgggactgtggcagtcaatctccagagcagcagcacagaccctgcgaccggagatgtgcatgttatgggagccttacctggaatggtgtggcaagacagagacgtatacctgcagggtcctatttgggccaaaattcctcacacggatggacactttcacccgtctcctctcatgggcggctttggacttaagcacccgcctcctcagatcctcatcaaaaacacgcctgttcctgcgaatcctccggcagagttttcggctacaaagtttgcttcattcatcacccagtattccacaggacaagtgagcgtggagattgaatgggagctgcagaaagaaaacagcaaacgctggaatcccgaagtgcagtatacatctaactatgcaaaatctgccaacgttgatttcactgtggacaacaatggactttatactgagcctcgccccattggcacccgttacctcacccgtcccctgtaa

SEQ ID NO: 1646 - DNA, 2211 bp, Artificial Sequence
  Description of Artificial Sequence: Synthetic polynucleotide
atggctgccgatggttatcttccagattggctcgaggacaacctctctgagggcattcgcgagtggtgggcgctgaaacctggagccccgaaacccaaagccaaccagcaaaagcaggacgacggccggggtctggtgcttcctggctacaagtacctcggacccttcaacggactcgacaagggggagcccgtcaacgcggcggacgcagcggccctcgagcacgacaaggcctacgaccagcagctcaaggcgggtgacaatccgtacctgcggtataaccacgccgacgccgagtttcaggagcgtctgcaagaagatacgtcttttgggggcaacctcgggcgagcagtcttccaggccaaaaagaggcttcttgaacctcttggtctggttgaggaagcggctaagacggctcctggaaagaaacgtccggtagagcagtcgccacaagagccagactcctcctcgggcattggcaagacaggccagcagcccgctaaaaagagactcaactttgggcagactggcgactcagagtcagtgcccgaccctcaaccaatcggagaacctccagcaacccccgctgctgtgggacctactacaatggcttcaggcggtggcgcaccaatggcggacaataacgaaggcgccgatggagtgggtaattcctcgggaaattggcattgcgattccacatggctgggcgacagagtcatcaccaccagcacccgaacctgggccctgcccacctacaacaatcacctctacaagcaaatctccagtgcttcaacgggggccagcaacgacaaccactacttcggctacagcaccccctgggggtattttgatttcaacagattccactgccacttttcaccacgtgactggcagcgactcatcaacaacaactggggattccggcccaagagactcaacttcaagctcttcaacatccaggtcaaggaggtcacgcagaatgaaggcaccaagaccatcgccaataacctcaccagcaccatccaggtgtttacggactcggagtaccagctgccgtacgttctcggctccgcccaccagggctgcctgcctccgttcccggcggacgtgttcatgattccgcagtacggctacctaacgctcaacaatggcagccaggcagtgggacggtcatccttttactgcctggaatatttcccatcgcagatgctgagaacgggcaacaactttaccttcagctacacctttgaggacgttcctttccacagcagctacgctcacagccagagtctggaccgtctcatgaatcctctgattgaccagtacctgtactacttgtctcggactcaaacaacaggaggcacggcaaatacgcagactctgggcttcagccaaggtgggcctaatacaatggccaatcaggcaaagaactggctgccaggaccctgttaccgccaacaacgcgtctcaacgacaaccgggcaaaacaacaatagcaactttgcctggactgctgggaccaaataccatctgaatggaagaaattcattggctaatcctggcatcgctatggcaacacacaaagacgacaaggagcgtttttttcccagtaacgggatcctgatttttggcaaacaaaatgctgccagagacaatgcggattacagcgatgtcatgctcaccagcgaggaagaaatcaaaaccactaaccctgtggctacagaggaatacggtatcgtggcagataacttgcagcagcaaaacacggctcctcaaattggaactgtcaacagccagggggccttacccggtatggtctggcagaaccgggacgtgtacctgcagggtcccatctgggccaagattcctcacacggacggcaacttccacccgtctccgctgatgggcggctttggcctgaaacatcctccgcctcagatcctgatcaagaacacgcctgtacctgcggatcctccgaccaccttcaaccagtcaaagctgaactctttcatcacgcaatacagcaccggacaggtcagcgtggaaattgaatgggagctgcagaaggaaaacagcaagcgctggaaccccgagatccagtacacctccaactactacaaatctacaagtgtggactttgctgttaatacagaaggcgtgtactctgatccccaccccattggcacccgttacctcacccgtcccctgtaa

SEQ ID NO: 1647 - DNA, 2211 bp, Artificial Sequence
  Description of Artificial Sequence: Synthetic polynucleotide
atggctgccgatggttatcttccagattggctcgaggacaacctctctgagggcattcgcgagtggtgggcgctgaaacctggagccccgaagcccaaagccaaccagcaagagcaggacgacggccggggtctggtgcttcctggctacaagtacctcggacccttcaacggactcgacaagggagagcccgtcaacgcggcggatgcagcggccctcgagcacgacaaagcctacgaccagcagctcaaagcgggtgacaatccgtacctgcggtataaccacgccgacgccgagtttcaggagcgtctgcaagaagatacgtcttttgggggcaacctcgggcgagcagtcttccaggccaagaagagggttctcgaaccttttggtctggttgaggaaggtgctaagacggctcctggaaagaaacgtccggtagagcagtcgccacaagagccagactcctcctcgggcattggcaagacaggccagcagcccgctaaaaagagactcaattttggtcagactggcgactcagagtcagttccagaccctcaacctctcggagaacctccagcagcgccctctggtgtgggacctaatacaatggctgcaggcggtggcgcaccaatggcagacaataacgaaggcgccgacggagtgggtagttcctcgggaaattggcattgcgattccacatggctgggcgacagagtcatcaccaccagcacccgaacctgggccctgcccacctacaacaaccacctctacaagcaaatctccagtgcttcaacgggggccagcaacgacaaccactacttcggctacagcaccccctgggggtattttgactttaacagattccactgccacttttcaccacgtgactggcagcgactcatcaacaacaactggggattccggcccaagagactcaacttcaagctcttcaacatccaggtcaaggaggtcacgcagaatgaaggcaccaagaccatcgccaataaccttaccagcacgattcaggtctttacggattcggaataccagctcccgtacgtcctcggctctgcgcaccagggctgcctccctccgttcccggcggacgtgttcatgattccgcagtacggctacctaacgctcaacaatggtagccaggcagtgggacggtcatcctttttctgcctggaatatttcccatcgcagatgctgagaacgggcaacaactttaccttcagctacacctttgaggacgttcctttccacagcagctacgctcacagccagagtctggaccgtctcatgaatcctctgattgaccagtacctgtactacttgtctcggactcaaacaacaggaggcacggcaaatacgcagactctgggcttcagccaaggtgggcctaatacaatggccaatcaggcaaagaactggctgccaggaccctgttaccgccaacaacgcgtctcaacgacaaccgggcaaaacaacaatagcaactttgcctggactgctgggaccaaataccatctgaatggaagaaattcattggctaatcctggcatcgctatggcaacacacaaagacgacaaggagcgtttttttcccagtaacgggatcctgatttttggcaaacaaaatgctgccagagacaatgcggattacagcgatgtcatgctcaccagcgaggaagaaatcaaaaccactaaccctgtggctacagaggaatacggtatcgtggcagataacttgcagcagcaaaacacggctcctcaaattggaactgtcaacagccagggggccttacccggtatggtctggcagaaccgagacgtgtacctgcagggtcccatctgggccaagattcctcacacggacggcaacttccacccgtctccgctgatgggcggctttggcctgaaacatcctccgcctcagatcctgatcaagaacacgcctgtacctgcggatcctccgaccaccttcaaccagtcaaagctgaactctttcatcacgcaatacagcaccggacaggtcagcgtggaaattgaatgggagctgcagaaggaaaacagcaagcgctggaaccccgagatccagtacacctccaactactacaaatctacaagtgtggactttgctgttaatacagaaggcgtgtactctgaaccccaccccattggcacccgttacctcacccgtcccctgtaa

SEQ ID NO: 1648 - DNA, 2211 bp, Artificial Sequence
  Description of Artificial Sequence: Synthetic polynucleotide
atggctgccgatggttatcttccagattggctcgaggacaacctctctgagggcattcgcgagtggtgggacttgaaacctggagccccgaagcccaaagccaaccagcaaaagcaggacgacggccggggtctggtgcttcctggctacaagtacctcggacccttcaacggactcgacaagggggagcccgtcaacgcggcggacgcagcggccctcgagcacgacaaggcctacgaccagcagctcaaagcgggtgacaatccgtacctgcggtataaccacgccgacgccgagtttcaggagcgtctgcaagaagatacgtcttttgggggcaacctcgggcgagcagtcttccaggccaagaagcgggttctcgaacctctcggtctggttgaggaaggcgctaagacggctcctggaaagaaacgtccggtagagcagtcaccacaagagccagactcctcctcgggcatcggcaagacaggccagcagcccgctaaaaagagactcaattttggtcagactggcgactcagagtcagtccccgacccacaacctctcggagaacctccagcaacccccgctgctgtgggacctactacaatggcttcaggcggtggcgcaccaatggcggacaataacgaaggcgccgacggagtgggtaatgcctcaggaaattggcattgcgattccacatggctgggcgacagagtcatcaccaccagcacccgaacatgggccttgcccacctataacaaccacctctacaagcaaatctccagtgcttcaacgggggccagcaacgacaaccactacttcggctacagcaccccctgggggtattttgatttcaacagattccactgccatttctcaccacgtgactggcagcgactcatcaacaacaattggggattccggcccaagagactcaacttcaagctcttcaacatccaagtcaaggaggtcacgacgaatgatggcgtcacgaccatcgctaataaccttaccagcacggttcaagtcttctcggactcggagtaccagttgccgtacgtcctcggctctgcgcaccagggctgcctccctccgttcccggcggacgtgttcatgattccgcagtacggctacctaacgctcaacaatggcagccaggcagtgggacggtcatccttttactgcctggaatatttcccatcgcagatgctgagaacgggcaataactttaccttcagctacaccttcgaggacgtgcctttccacagcagctacgcgcacagccagagcctggaccggctgatgaatcctctcatcgaccagtacctgtattacctgaacagaactcagaatcagtccggaagtgcccaaaacaaggacttgctgtttagccgggggtctccagctggcatgtctgttcagcccaaaaactggctacctggaccctgttaccggcagcagcgcgtttctaaaacaaaaacagacaacaacaacagcaactttacctggacaggtgcttcaaaatataaccttaatgggcgtgaatctataatcaaccctggcactgctatggcctcacacaaagacgacaaagacaagttctttcccatgagcggtgtcatgatttttggaaaggagagcgccggagcttcaaacactgcattggacaatgtcatgatcacagacgaagaggaaatcaaagccactaaccccgtggccaccgaaagatttgggactgtggcagtcaatctccagaacagcagcacagaccctgcgaccggagatgtgcatgttatgggagccttacctggaatggtgtggcaagacagagacgtatacctgcagggtcctatttgggccaaaattcctcacacggatggacactttcacccgtctcctctcatgggcggctttggacttaagcacccgcctcctcagatcctcatcaaaaacacgcctgttcctgcgaatcctccggcagagttttcggctacaaagtttgcttcattcatcacccagtattccacaggacaagtgagcgtggagattgaatgggagctgcagaaagaaaacagcaaacgctggaatcccgaagtgcagtatacatctaactatgcaaaatctgccaacgttgatttcactgtagacaacaatggactttatactgtgcctcgccccattggcacccgttacctcacccgtcccctgtaa

SEQ ID NO: 1649 - DNA, 2211 bp, Artificial Sequence
  Description of Artificial Sequence: Synthetic polynucleotide
atggctgccgatggttatcttccagattggctcgaggacaacctctctgagggcattcgcgagtggtgggcgctgaaacctggagccccgaagcccaaagccaaccagcaaaagcaggacgacggccggggtctggtgcttcctggctacaagtacctcggacccttcaacggactcgacaaaggagagccggtcaacgcggcggacgcggcggccctcgaacacgacaaggcttacgaccagcagctcaaggcgggtgacaacccctacctgcggtataaccacgccgacgccgagttccaggagcggctgcaagaagatacgtcttttgggggcaacctcgggcgagcagtcttccaggccaaaaagaggcttcttgaacctcttggtctggttgaggaaggcgctaagacggctcctggaaagaagaggcctgtagagcagtctcctcaagaaccggactcctcctcgggtattggcaaaacaggtgagcagcccgctaaaaagagactcaattttggtcagactggcgactcagagtcagtccccgacccacaacctctcggagaacctccagcaacccccgctgctgtgggacctactacaatggcttcaggcggtggcgcaccaatggcagacaataacgaaggcgccgacggagtgggtagtgcctcaggaaattggcattgcgattccacatggctgggcgacagagtcatcaccaccagcacccgaacctgggccctgcccacctataacaaccatctctacaagcaaatctccagtgcttcaacgggggccagcaacgacaaccactacttcggctacagcaccccctgggggtattttgacttcaacagattccactgccacttctcaccacgtgactggcagcgactcatcaacaacaactggggattccggcctaagcgactcaacttcaagctcttcaacattcaggtcaaagaggttacggacaacaatggagtcaagaccatcgccaataacctcaccagcaccatccaggtgttcacggactcagagtatcagctgccgtacgtgctcgggtcggctcaccagggctgcctccctccgttcccagcggacgtgttcatgattcctcagtacgggtatctgacactcaacaacggcagtcaggcagtgggacggtcatccttctactgcctggaatattttccatcgcagatgctgagaaccggcaacaactttccgttcagttacaccttcgaggacgtgcctttccacagcagctacgcgcacagccagagcctggaccggctgatgaatcctctgattgaccagtacctgtactacttgtctcggactcaaacaacaggaggcacggcaaatacgcagactctgggcttcagccaaggtgggcctaatacaatggccaatcaggcaaagaactggctgccaggaccctgttaccgccaacaacgcgtctcaacgacaaccgggcaaaacaacaatagcaactttgcctggactgctgggaccaaataccatctgaatggaagaaattcattggctaatcctggcatcgctatggcaacacacaaagacgacaaggagcgtttttttcccagtaacgggatcctgatttttggcaaacaaaatgctgccagagacaatgcggattacagcgatgtcatgctcaccagcgaggaagaaatcaaaaccactaaccctgtggctacagaggaatacggtatcgtggcagataacttgcagcagcaaaacacggctcctcaaattggaactgtcaacagccagggggccttacccggtatggtctggcagaaccgggacgtgtacctgcagggtcccatctgggccaagattcctcacacggacggcaacttccacccgtctccgctgatgggcggctttggcctgaaacatcctccgcctcagatcctgatcaagaacacgcctgtacctgcggatcctccgaccaccttcaaccagtcaaagctgaactctttcatcacgcaatacagcaccggacaggtcagcgtggaaattgaatgggagctgcagaaggaaaacagcaagcgctggaaccccgagatccagtacacctccaactactacaaatctacaagtgtggactttgctgttaatacagaaggcgtgtactctgaaccccaccccattggcacccgttacctcacccgtcccctgtaa

SEQ ID NO: 1650 - DNA, 2211 bp, Artificial Sequence
  Description of Artificial Sequence: Synthetic polynucleotide
atggctgccgatggttatcttccagattggctcgaggacaacctctctgagggcattcgcgagtggtgggcgctgaaacctggagccccgaagcccaaagccaaccagcaaaagcaggacgacggccggggtctggtgcttcctggctacaagtacctcggacccttcaacggactcgacaagggggagcccgtcaacgcggcggacgcagcggccctcgagcacgacaaggcctacgaccagcagctcaaagcgggtgacaatccgtacctgcggtataaccacgccgacgccgagtttcaggagcgtctgcaagaagatacgtcttttgggggcaacctcgggcgagcagtcttccaggccaagaagcgggttctcgaacctctcggtctggttgaggaaggcgctaagacggctcctggaaagaaacgtccggtagaacagtcgccacaagagccagactcctcctcgggcatcggcaagacaggccagcagcccgctaaaaagagactcaattttggtcagactggcgactcagagtcagtccccgatccacaacctctcggagaacctccagcaacccccgctgctgtgggacctactacaatggcttcaggcggtggcgcaccaatggcagacaataacgaaggcgccgacggagtgggtagttcctcgggaaattggcattgcgattcccaatggctgggggacagagtcatcaccaccagcacccgaacctgggccctgcccacctacaacaaccacctctacaagcaaatctccagtgcttcaacgggggccagcaacgacaaccactacttcggctacagcaccccctgggggtattttgatttcaacagattccactgccatttctcaccacgtgactggcagcgactcatcaacaacaactggggattccggcctaagcgactcaacttcaagctcttcaacattcaggtcaaagaggttacggacaacaatggagtcaagaccatcgccaataaccttaccagcacggtccaggtcttcacggactcggagtaccagttgccgtacgtcctcggctctgcgcaccaggactgcctccctccgttcccggcggacgtgttcatgattccgcagtacggctacctaacgctcaacaatggcagccaggcagtgggacggtcatccttttactgcctggaatatttcccatcgcagatgctgagaacgggcaacaactttaccttcagctacacctttgaggacgttcctttccacagcagctacgctcacagccagagtctggaccgtctcatgaatcctctgattgaccagtacctgtactacttgtctcggactcaaacaacaggaggcacggcaaatacgcagactctgggcttcagccaaggtgggcctaatacaatggccaatcaggcaaagaactggctgccaggaccctgttaccgccaacaacgcgtctcaacgacaaccggacaaaacaacaatagcaactttgcctggactgctgggaccaaataccatctgaatggaagaaattcattggctaatcctggcatcgctatggcaacacacaaagacgacaaggagcgtttttttcccagtaacgggatcctgatttttggcaaacaaaatgctgccagagacaatgcggattacagcgatgtcatgctcaccagcgaggaagaaatcaaaaccactaaccctgtggctacagaggaatacggtatcgtggcagataacttgcagcagcaaaacacggctcctcaaattggaactgtcaacagccagggggccttacccggtatggtctggcagaaccgggacgtgtacctgcagggtcccatctgggccaagattcctcacacggacggcaacttccacccgtctccgctgatgggcggctttggcctgaaacatcctccgcctcagatcctgatcaagaacacgcctgtacctgcggatcctccgaccaccttcaaccagtcaaagctgaactctttcatcacgcaatacagcaccggacaggtcagcgtggaaattgaatgggagctgcagaaggaaaacagcaagcgctggaaccccgagatccagtacacctccaactactacaaatctacaagtgtggactttgctgttaatacagaaggcgtgtactctgaaccccaccccattggcacccgttacctcacccgtcccctgtaa

SEQ ID NO: 1651 - DNA, 2211 bp, Artificial Sequence
  Description of Artificial Sequence: Synthetic polynucleotide
atggctgccgatggttatcttccagattggctcgaggacaacctctctgagggcattcgcgagtggtgggacttgaaacctggagccccgaagcccaaagccaaccagcaaaagcaggacgacggccggggtctggtgcttcctggctacaagtacctcggacccttcaacggactcgacaagggggagcccgtcaacgcggcggacgcagcggccctcgagcacgacaaggcctacgaccagcagctcaaagcgggtgacaatccgtacctgcggtataaccacgccgacgccgagtttcaggagcgtctgcaagaagatacgtcttttgggggcaacctcgggcgagcagtcttccaggccaagaagcgggttctcgaacctctcggtctggttgaggaaggcgctaagacggctcctggaaagaaacgtccggtagagcagtcaccacaagagccagactcctcctcgggcatcggcaagacaggccagcagcccgctaaaaagagactcaattttggtcagactggcgactcagagtcagtccccgacccacaacctctcggagaacctccagcaacccccgctgctgtgggacctactacaatggcttcaggcggtggcgcaccaatggcagacaataacgaaggtgccgacggagtgggtaatgcctcaggaaattggcattgcgattccacatggctgggcgactgagtcatcaccaccagcacccgcacctgggccttgcccacctacaataaccacctctacaagcaaatctccagtgcttcaacgggggccagcaacgacaaccactacttcggctacagcaccccctgggggtattttgatttcaacagattccactgccacttttcaccacgtgactggcagcgactcatcaacaacaattggggattccggcccaagagactcaacttcaaactcttcaacatccaagtcaaggaggtcacgcagaatgaaggcaccaagaccatcgccaataacctcaccagcaccatccaggtgtttacggactcggagtaccagctgccgtacgttctcggctctgcccaccagggctgcctgcctccgttcccggcggacgtgttcatgattccccagtacggctacctaacgctcaacaatggcagccaggcagtgggacggtcatccttttactgcctggaatactttccttcgcagatgctgagaaccggcaacaacttccagtttacttacaccttcgaggacgtgcctttccacagcagctacgcccacagccagagcttggaccggctgatgaatcctctgattgaccagtacctgtactacttgtctcggactcaaacaacaggaggcacggcaaatacgcagactctgggcttcagccaaggtgggcctaatacaatggccaatcaggcaaagaactggctgccaggaccctgttaccgccaacaacgcgtctcaacgacaaccgggcaaaacaacaatagcaactttgcctggactgctgggaccaaataccatctgaatggaagaaattcattggctaatcctggcatcgctatggcaacacacaaagacgacaaggagcgtttttttcccagtaacgggatcctgatttttggcaaacaaaatgctgccagagacaatgcggattacagcgatgtcatactcaccagcgaggaagaaatcaaaaccactaaccctgtggctacagaggaatacggtatcgtggcagataacttgcagcagcaaaacacggctcctcaaattggaactgtcaacagccagggggccttacccggtatggtctggcagaaccgggacgtgtacctgcagggtcccatctgggccaagattcctcacacggacggcaacttccacccgtctccgctgatgggcggctttggcctgaaacatcctccgcctcagatcctgatcaagaacacgcctgtacctgcggatcctccgaccaccttcaaccagtcaaagctgaactctttcatcacgcaatacagcaccggacaggtcagcgtggaaattgaatgggagctgcagaaggaaaacagcaagcgctggaaccccgagatccagtacacctccaactactacaaatctacaagtgtggactttgctgttaatacagaaggcgtgtactctgaaccccaccccattggcacccgttacctcacccgtcccctgtaa

SEQ ID NO: 1652 - DNA, 2211 bp, Artificial Sequence
  Description of Artificial Sequence: Synthetic polynucleotide
atggctgccgatggttatcttccagattggctcgaggacactctctctgaaggaataagacagtggtggaagctcaaacctggcccaccaccaccaaagcccgcagagcggcataaggacgacagcaggggtcttgtgcttcctgggtacaagtacctcggacccttcaacggactcgacaagggagagccggtcaacgaggcagacgccgcggccctcgagcacgacaaagcctacgaccggcagctcgacagcggagacaacccgtacctcaagtacaaccacgccgacgcggagtttcaggagcgccttaaagaagatacgtcttttgggggcaacctcgggcgagcagtcttccaggccaagaagagggttctcgaaccttttggtctggttgaggaaggtgctaagacggctcctggaaagaaacgtccggtagagcagtcgccacaagagccagactcctcctcgggcattggcaagacaggccagcagcccgctaaaaagagactcaattttggtcagactggcgactcagagtcagtccccgacccacaacctctcggagaacctccagcaacccccgctgctgtgggacctactacaatggcttcaggcggtggcgcaccaatggcagacaataacgaaggcgccgacggagtgggtaatgcctcaggaaattggcattgcgattccacatggctgggcgacagagtcatcaccaccagcacccgaacatgggccttgcccacctataacaaccacctctacaagcaaatctccagtacttcaacgggggccagtaacgacaaccactacttcggctacagcaccccctgggggtattttgacttcaacagattccactgccacttctcaccacgtgactggcagcgactcatcaacaacaactggggattccggcctaagcgactcaacttcaagctcttcaacattcaggtcaaagaggttacggacaacaatggagtcaagaccatcgccaataaccttaccagcacggtccaggtcttcacggactcggagtaccagttgccgtacgtcctcggctctgcgcaccagggctgcctgcctccgttcccggcggacgtgttcatgattccgcagtacggctacctaacgctcaacaatggcagccaggcagtgggacggtcatccttttactgcctggaatatttcccatcgcagatgctgagaacgggcaacaactttaccttcagctacacttttgaggacgttcctttccacagcagctacgctcacagccagagtctggaccgtctcatgaatcctctgattgaccagtacctgtactacttgtctcggactcaaacaacaggaggcacggcaaatacgcagactctgggcttcagccaaggtgggcctaatacaatggccaatcaggcaaagaactggctgccaggaccctgttaccgccaacaacgcgtctcaacgacaaccggacaaaacaacaatagcaactttgcctggactgctgggaccaaataccatctgaatggaagaaattcattggctaatcctggcatcgctatggcaacacacaaagacgacaaggagcgtttttttcccagtaacgggatcctgatttttggcaaacaaaatgctgccagagacaatgcggattacagcgatgtcatgctcaccagcgaggaagaaatcaaaaccactaaccctgtggctacagaggaatacggtatcgtggcagataacttgcagcagcaaaacacggctcctcaaattggaactgtcaacagccagggggccttacccggtatggtctggcagaaccgggacgtgtacctgcagggtcccatctgggccaagattcctcacacggacggcaacttccacccgtctccgctgatgggcggctttggcctgaaacatcctccgcctcagatcctgatcaagaacacgcctgtacctgcggatcctccgaccaccttcaaccagtcaaagctgaactctttcatcacgcaatacagcaccggacaggtcagcgtggaaattgaatgggagctgcagaaggaaaacagcaagcgctggaaccccgagatccagtacacctccaactactacaaatctacaagtgtggactttgctgttaatacagaaggcgtgtactctgaaccccaccccattggcacccgttacctcacccgtcccctgtaa

SEQ ID NO: 1653 - DNA, 2208 bp, Artificial Sequence
  Description of Artificial Sequence: Synthetic polynucleotide
atggctgccgatggttatcttccagattggctcgaggacaacctctctgagggcattcgcgagtggtgggacttgaaacctggagccccgaagcccaaagccaaccagcaaaagcaggacgacggccggggtctggtgcttcctggctacaagtacctcggacccttcaacggactcgacaagggggagcccgtcaacgcggcggatgcagcggccctcgagcacgacaaggcctacgaccggcagctcgacagcggagacaacccgtacctgcggtataaccacgccgacgcggagtttcaggagcgccttaaagaagatacgtcttttgggggcaacctcgggcgagcagtcttccaggccaagaagagggttctcgaaccttttggtctggttgaggaaggtgctaagacggctcctggaaagaaacgtccggtagagcagtcgccacaagagccagactcctcctcgggcattggcaagacaggccagcagcccgctaaaaagagactcaattttggtcagactggcgactcagagtcagtccccgacccacaacctctcggagaacctccagcaacccccgctgctgtgggacctactacaatggcttcaggcggtggcgcaccaatggcagacaataacgaaggcgccgacggagtgggtaatgcctcaggaaattggcattgcgattccacatggctgggcgacagagtcatcaccaccagcacccgcacctgggccttgcccacctacaataaccacctctacaagcaaatctccagtgcttcaacgggggccagcaacgacaaccactacttcggctacagcaccccctgggggtattttgactttaacagattccactgccacttttcaccacgtgactggcaaagactcatcaacaacaactggggattccggcccaagagactcaacttcaagctcttcaacatccaggtcaaggaggtcacgcagaatgaaggcaccaagaccatcgccaataaccttaccagcacgattcaggtctttacggactcggaataccagctcccgtacgtcctcggctctgcgcaccagggctgcctccctccgttcccggcggacgtgttcatgattccgcagtacggctacctaacactcaacaacggtagtcaggccgtgggacgctcctccttctactgcctggaatactttccttcgcagatgctgagaaccggcaacaacttccagtttacttacaccttcgaggacgtgcctttccacagcagctacgcccacagccagagcttggaccggctgatgaatcctctgattgaccagtacctgtactacttgtctcggactcaaacaacaggaggcacggcaaatacgcagactctgggcttcagccaaggtgggcctaatacaatggccaatcaggcaaagaactggctgccaggaccctgttaccgccaacaacgcgtctcaacgacaaccgggcaaaacaacaatagcaactttgcctggactgctgggaccaaataccatctgaatggaagaaattcactggctaatcctggcatcgctatggcaacacacaaagacgacaggagcgtttttttccagtaccgggatcctgattttggcaaacaaaatgctgccagagacaatgcggattacagcgatgtcatgctcaccagcgaggaagaaatcaaaaccactaaccctgtggctacagaggaatacggtatcgtggcagataacttgcagcagcaaaacacggctcctcaaattggaactgtcaacagccagggggccttacccggtatggtctggcagaaccgggacgtgtacctgcagggtcccatctgggccaagattcctcacacggacggcaacttccacccgtctccgctgatgggcggctttggcctgaaacatcctccgcctcagatcctgatcaagaacacgcctgtacctgcggatcctccgaccaccttcaaccagtcaaagctgaactctttcatcacgcaatacagcaccggacaggtcagcgtggaaattgaatgggagctgcagaaggaaaacagcaagcgctggaaccccgagatccagtacacctccaactactacaaatctacaagtgtggactttgctgttaatacagaaggcgtgtactctgaaccccaccccattggcacccgttacctcacccgtcccctgtaa

SEQ ID NO: 1654 - DNA, 2211 bp, Artificial Sequence
  Description of Artificial Sequence: Synthetic polynucleotide
atggctgccgatggttatcttccagattggctcgaggacaacctctctgagggcattcgcgagtggtgggcgctgaaacctggagccccgaagcccaaagccaaccagcaaaagcaggacgacggccggggtctggtgcttcctggctacaagtacctcggacccttcaacggactcgacaagggggagcccgtcaacgcggcggatgcagcagccctcgaacacgacaaagcttacgaccagcagctcaaggccggtgacaacccctacctcaagtataaccacgccgacgccgagtttcaggagcgtcttcaaggagatacgtcttttgggggcaacctcggacgagcagtcttccaggccaagaagcgggttctcgaacctcttggtctggttgaggaagcggctaagacggctcctggaaagaagaggcctgtagagcagtctcctcaggaaccggactcctccgcgggtattggcaaatcgggtgcacagcccgctaaaaagagactcaatttcggtcagactggcgacacagagtcagtcccagaccctcaacctctcggagaacctccagcagcgccctctggtgtgggacctaatacaatggctgcaggcggtggcgcaccaatggcagacaataacgaaggtgccgatggagtgggtagttcctcgggaaattggcattgcgattcccaatggctgggggacagagtcatcaccaccagcacccgaacctgggccctgcccacctacaacaaccacctctacaagcaaatctccagtgcttcaacgggggccagcaacgacaaccactacttcggctacagcaccccttgggggtattttgacttcaacagattccactgccacttttcaccacgtgactggcagcgactcatcaacaacaactggggattccggcctaagcgactcaacttcaagctcttcaacattcaggtcaaagaggttacggacaacaatggagtcaagaccatcgccaataaccttaccagcacggtccaggtcttcacggactcagactatcagctcccgtacgtgctcgggtcggctcacgagggctgcctccctccgttcccggcggacgtgttcatgattccgcagtacggctacctaacgctcaacaatggcagccaggcagtgggacggtcatccttttactgcctggaatactttccttcgcagatgctgagaaccggcaacaacttccagtttacttacaccttcgaggacgtgcctttccacagcagctacgctcacagccagagtctggaccgtctcatgaatcctctgattgaccagtacctgtactacttgtctcggactcaaacaacaggaggcacggcaaatacgcagactctgggcttcagccaaggtgggcctaatacaatggccaatcaggcaaagaactggctgccaggaccctgttaccgccaacaacgcgtctcaacgacaaccgggcaaaacaacaatagcaactttgcctggactgctgggaccaaataccatctgaatggaagaaattcattggctaatcctggcatcgctatggcaacacacaaagacgacaaggagcgtttttttcccagtaacgggatcctgatttttggcaaacaaaatgctgccagagacaatgcggattacagcgatgtcatgctcaccagcgaggaagaaatcaaaaccactaaccctgtggctacagaggaatacggtatcgtagcagataacttgcagcagcaaaacacggctcctcaaattggaactgtcaacagccagggggccttacccggtatggtctggcagaaccgggacgtgtacctgcagggtcccatctgggccaagattcctcacacggacggcaacttccacccgtctccgctgatgggcggctttggcctgaaacatcctccgcctcagatcctgatcaagaacacgcctgtacctgcggatcctccgaccaccttcaaccagtcaaagctgaactctttcatcacgcaatacagcaccggacaggtcagcgtggaaattgaatgggagctgcagaaggaaaacagcaagcgctggaaccccgagatccagtacacctccaactactacaaatctacaagtgtggactttgctgttaatacagaaggcgtgtactctgaaccccaccccattggcacccgttacctcacccgtcccctgtaa

SEQ ID NO: 1655 - DNA, 2211 bp, Artificial Sequence
  Description of Artificial Sequence: Synthetic polynucleotide
atggctgccgatggttatcttccagattggctcgaggacactctctctgaaggaataagacagtggtggaagctcaaacctggcccaccaccaccaaagcccgcagagcggcataaggacgacagcaggggtcttgtgcttcctgggtacaagtacctcggacccttcaacggactcgacaagggagagccggtcaacgaggcagacgccgcggccctcgagcacgacaaagcctacgaccggcagctcgacagcggagacaacccgtacctcaagtacaaccacgccgacgcggagtttcaggagcgccttaaagaagatacgtcttttgggggcaacctcgggcgagcagtcttccaggccaagaagagggttctcgaaccttttggtctggttgaggaagcggctaagacggctcctggaaagaaacgtccggtagagcagtcgccacaagagccagactcctcctcgggcattggcaagacaggccagcagcccgctaaaaagagactcaattttggtcagactggcgactcagagtcagtccccgacccacaacctctcggagaacctccagcaacccccgctgctgtgggacctactacaatggcttcaggcggtggcgcaccaatggcagacaataacgaaggcgccgacggagtgggtaatgcctcaggaaattggcattgcgattccacatggctgggcgacagagtcatcaccaccagcacccgaacatgggccttgcccacctataacaaccacctctacaagcaaatctccagtgcttcaacgggggccagcaacgacaaccactacttcggctacagcaccccctgggggtattttgacttcaacagattccactgccacttctcaccacgtgactggcagcgactcatcaacaacaactggggattccggcctaagcgactcaacttcaagctcttcaacattcaggtcaaagaggttacggacaacaatggagtcaagaccatcgccaataaccttaccagcacggtccaggtcttcacggactcagactatcagctcccgtacgtgctcgggtcggctcacgagggctgcctcccgccgttcccagcggacgttttcatgattcctcagtacggctacctaacactcaacaacggtagtcaggccgtgggacgctcctccttctactgcctggaatactttccttcgcagatgctgagaacgggcaacaactttaccttcagctacacctttgaggacgttcctttccacagcagctacgctcacagccagagtctggaccgtctcatgaatcctctgattgaccagtacctgtactacttgtctcggactcaaacaacaggaggcacggcaaatacgcagactctgggcttcagccaaggtgggcctaatacaatggccaatcaggcaaagaactggctgccaggaccctgttaccgccaacaacgcgtctcaacgacaaccgggcaaaacaacaatagcaactttgcctggactgctgggacaaaataccatctgaatggaagaaattcattggctaatcctggcatcgctatggcaacacacaaagacgacaaggagcgtttttttcccagtaacgggattctgatttttggcaaacaaaatgctgccagagacaatgcggattacagcgatgtcatgctcaccagcgaggaagaaatcaaaaccactaaccctgtggctacagaggaatacggtatcgtggcagataacttgcagcagcaaaacacggctcctcaaattggaactgtcaacagccagggggccttacccggtatggtctggcagaaccgggacgtgtacctgcagggtcccatctgggccaagattcctcacacggacggcaacttccacccgtctccgctgatgggcggctttggacttaagcacccgcctcctcagatcctcatcaaaaacacgcctgttcctgcggatcctccgaccaccttcaaccagtcaaagctgaactctttcatcacgcaatacagcaccggacaggtcagcgtggaaattgaatgggagctgcagaaggaaaacagcaagcgctggaaccccgagatccagtacacctccaactactacaaatctacaagtgtggactttgctgttaatacagaaggcgtgtactctgaaccccaccccattggcacccgttacctcacccgtcccctgtaa

SEQ ID NO: 1656 - DNA, 2211 bp, Artificial Sequence
  Description of Artificial Sequence: Synthetic polynucleotide
atggctgccgatggttatcttccagattggctcgaggacaacctctctgagggcattcgcgagtggtgggcgctgaaacctggagccccgaagcccaaagccaaccagcaaaagcaggacgacggccggggtctggtgcttcctggctacaagtacctcggacccttcaacggactcgacaaaggagagccggtcaacgcggcggacgcagcggccctcgagcacgacaaggcctacgaccagcagctcaaagcgggtgacaatccgtacctgcggtataaccacgccgacgccgagtttcaggagcgtctgcaagaagatacgtcttttgggggcaacctcgggcgagcagtcttccaggccaagaagcgggttctcgaacctctcggtctggttgaggaaggcgctaagacggctcctggaaagaaacgtccggtagagcagtcgccacaagagccagactcctcctcgggcatcggcaagacaggccagcagcccgctaaaaagagactcaattttggtcagactggcgactcagagtcagtccccgacccacaacctctcggagaacctccagcaacccccgctgctgtgggacctactacaatggcttcaggcggtggcgcaccaatggcagacaataacgaaggcgccgacggagtgggtagttcctcgggaaattggcattgcgattccacatggctgggcgacagagtcatcaccaccagcacccgcacctgggccttgcccacctacaataaccacctctacaagcaaatctccagtgcttcaacgggggccagcaacgacaaccactacttcggctacagcaccccctgggggtattttgacttcaacagattccactgccacttctcaccacgtgactggcagcgactcatcaacaacaactggggattccggcctaagcgactcaacttcaagctcttcaacattcaggtcaaagaggttacggacaacaatggagtcaagaccatcgccaataaccttaccagcacggtccaggtcttcacggactcggagtaccagttgccgtacgtcctcggctctgcgcaccagggctgcctccctccgttcccggcggacgtgttcatgattccgcagtacggctacctaacgctcaacaatggcagccaggcagtgggacggtcatccttttactgcctggaatatttcccatcgcagatgctgagaacgggcaacaactttaccttcagctacacctttgaggacgttcctttccacagcagctacgctcacagccagagtctggaccgtctcatgaatcctctgattgaccagtacctgtactacttgtctcggactcaaacaacaggaggcacggcaaatacgcagactctgggcttcagccaaggtgggcctaatacaatggccaatcaggcaaagaactggctgccaggaccctgttaccgccaacaacgcgtctcaacgacaaccgggcaaaacaacaatagcaactttgcctggactgctgggaccaaataccatctgaatggaagaaattcattggctaatcctggcatcgctatggcaacacacaaagacgacaaggagcgtttttttcccagtaacgggatcctgatttttggcaaacaaaatgctgccagagacaatgcggattacagcgatgtcatgctcaccagcgaggaagaaatcaaaaccactaaccctgtggctacagaggaatacggtatcgtggcagataacttgcagcagcaaaacacggctcctcaaattggaactgtcaacagccagggggccttacccggtatggtctggcagaaccgggatgtgtacctgcagggtcccatctgggccaagattcctcacacggacggcaacttccacccgtctccgctgatgggcggctttggcctgaaacatcctccgcctcagatcctgatcaagaacacgcctgtacctgcggatcctccgaccaccttcaaccagtcaaagctgaactctttcatcacgcaatacagcaccggacaggtcagcgtggaaattgaatgggagctgcagaaggaaaacagcaagcgctggaaccccgagatccagtacacctccaactactacaaatctacaagtgtggactttgctgttaatacagaaggcgtgtactctgaaccccaccccattggcacccgttacctcacccgtcccctgtaa

SEQ ID NO: 1657 - DNA, 2214 bp, Artificial Sequence
  Description of Artificial Sequence: Synthetic polynucleotide
atggctgccgatggttatcttccagattggctcgaggacaaccttagtgaaggaattcgcgagtggtgggcgctgaaacctggagccccgaagcccaaagccaaccagcaaaagcaggacgacggccggggtctggtgcttcctggctacaagtacctcggacccttcaacggactcgacaagggggagcccgtcaacgcggcggacgcagcggccctcgagcacgacaaggcctacgaccagcagctcaaagcgggtgacaatccgtacctgcggtataaccacgccgacgccgagtttcaggagcgtctgcaagaagatacgtcttttgggggcaacctcgggcgagcagtcttccaggccaagaagcgggttctcgaacctctcggtctggttgaggaaggcgctaagacggctcctggaaagaaacgtccggtagagcagtcgccacaagagccagactcctcctcgggcatcggcaagacaggccagcagcccgctaaaaagagactcaatttcggtcagactggcgacacagagtcagtcccagaccctcaaccaatcggagaacctcccgcagccccctcaggtgtgggatctcttacaatggcttcaggtggtggcgcaccagtggcagacaataacgaaggtgccgatggagtgggtagttcctcgggaaattggcattgcgattcccaatggctgggggacagagtcatcaccaccagcaccagaacctgggccttgcccacctacaataaccacctctacaagcaaatctccaacagcacatctggaggatcttcaaatgacaacgcctacttcggctacagcaccccctgggggtattttgactttaacagattccactgccacttttcaccacgtgactggcagcgactcatcaacaacaactggggattccgacccaagagactcaacttcaagctcttcaacatccaggtcaaggaggtcacgcagaacgaaggcaccaagaccatcgccaataacctcaccagcaccatccaggtgtttacggactcggagtaccagctgccgtacgttctcggctccgcccaccagggctgcctgcctccgttcccggcggacgtgttcatgattccccagtacggctacctaacgctcaacaacggtagtcaggccgtgggacgctcctccttctactgcctggaatactttccttcgcagatgctgagaaccggcaacaacttccagtttacttacaccttcgaggacgtgcctttccacagcagctacgcgcacagccagagcttggaccggctgatgaatcctctgattgaccagtacctgtactacttgtctcggactcaaacaacaggaggcacggcaaatacgcagactctgggcttcagccaaggtgggcctaatacaatggccaatcaggcaaagaactggctgccaggaccctgttaccgccaacaacgcgtctcaacgacaaccgggcaaaacaacaatagcaactttgcctggactgctgggaccaaataccatctgaatggaagaaattcattggctaatcctggcatcgctatggcaacacacaaagacgacaaggagcgtttttttcccagtaacgggatcctgatttttggcaaacaaaatgctgccagagacaatgcggattacagcgatgtcatgctcaccagcgaggaagaaatcaaaaccactaaccctgtggctacagaggaatacggtatcgtggcagataacttgcagcagcaaaacacggctcctcaaattggaactgtcaacagccagggggccttacccggtatggtctggcagaaccgggacgtgtacctgcagggtcccatctgggccaagattcctcacacggacggcaacttccacccgtctccgctgatgggcggctttggcctgaaacatcctccgcctcagatcctgatcaagaacacgcctgtacctgcggatcctccgaccaccttcaaccagtcaaagctgaactctttcatcacgcaatacagcaccggacaggtcagcgtggaaattgaatgggagctgcagaaggaaaacagcaagcgctggaaccccgagatccagtacacctccaactactacaaatctacaagtgtggactttgctgttaatacagaaggcgtgtactctgaaccccaccccattggcactcgttacctcacccgtcccctgtaa

SEQ ID NO: 1658 - DNA, 2211 bp, Artificial Sequence
  Description of Artificial Sequence: Synthetic polynucleotide
atggctgccgatggttatcttccagattggctcgaggacaacctctctgagggcattcgcgagtggtgggcgctgaaacctggagccccgaagcccaaagccaaccagcaaaagcaggacgacggccggggtctggtgcttcctggctacaagtacctcggacccttcaacggactcgacaagggggagcccgtcaacgcggcggatgcagcagccctcgaacacgacaaagcttacgaccagcagctcaaggccggtgacaacccctacctcaagtataaccacgccgacgccgagtttcaggagcgtcttcaaggagatacgtcttttgggggcaacctcggacgagcagtcttccaggccaagaagcgggttctcgaacctcttggtctggttgaggaagcggctaagacggctcctggaaagaagaggcctgtagagcagtctcctcaggaaccggactcctccgcgggtattggcaaatcgggtgcacagcccgctaaaaagagactcaatttcggtcagactggcgacacagagtcagtcccagaccctcaacctctcggagaacctccagcagcgccctctggtgtgggacctaatacaatggctgcaggcggtggcgcaccaatggcagacaataacgaaggtgccgatggagtgggtagttcctcgggaaattggcattgcgattcccaatggctgggggacagagtcatcaccaccagcacccgaacctgggccctgcccacctacaacaaccacctctacaagcaaatctccagtgcttcaacgggggccagcaacgacaaccactacttcggctacagcaccccttgggggtattttgacttcaacagattccactgccacttctcaccacgtgactggcagcgactcatcaacaacaactggggattccggcctaagcgactcaacttcaagctcttcaacattcaggtcaaagaggttacggacaacaatggagtcaagaccatcgccaataaccttaccagcacggtccaggtcttcacggactcggagtaccagttgccgtacgtcctcggctctgcgcaccagggctgcctccctccgttcccggcggacgtgttcatgattccgcagtacggctacctaacgctcaacaatggcagccaggcagtgggacggtcatccttttactgcctggaatatttcccatcgcagatgctgagaacgggcaacaactttaccttcagctacacctttgaggacgttcctttccacagcagctacgctcacagccagagtctggaccgtctcatgaatcctctgattgaccagtacctgtactacttgtctcggactcaaacaacaggaggcacggcaaatacgcagactctgggcttcagccaaggtgggcctaatacaatggccaatcaggcaaagaactggctgccaggaccctgttaccgccaacaacgcgtctcaacgacaaccgggcaaaacaacaatagcaactttgcctggactgctgggaccaaataccatctgaatggaagaaattcattggctaatcctggcatcgctatggcaacacacaaagacgacaaggagcgtttttttcccagtaacgggatcctgatttttgacaaacaaaatgctgccagagacaatgcggattacagcgatgtcatgctcaccagcgaggaagaaatcaaaaccactaaccctgtggctacagaggaatacggtatcgtggcagataacttgcagcagcaaaacacggctcctcaaattggaactgtcaacagccagggggccttacccggtatggtctggcagaaccgggatgtgtacctgcagggtcccatctgggccaagattcctcacacggacggcaacttccacccgtctccgctgatgggcggctttggcctgaaacatcctccgcctcagatcctgatcaagaacacgcctgtacctgcggatcctccgaccaccttcaaccagtcaaagctgaactctttcatcacgcaatacagcaccggacaggtcagcgtggaaattgaatgggagctgcagaaggaaaacagcaagcgctggaaccccgagatccagtacacctccaactactacaaatctacaagtgtggactttgctgttaatacagaaggcgtgtactctgaaccccaccccattggcacccgttacctcacccgtcccctgtaa

SEQ ID NO: 1659 - DNA, 2211 bp, Artificial Sequence
  Description of Artificial Sequence: Synthetic polynucleotide
atggctgccgatggttatcttccagattggctcgaggacactctctctgaaggaataagacagtggtggaagctcaaacctggcccaccaccaccaaagcccgcagagcggcataaggacgacagcaggggtcttgtgcttcctgggtacaagtacctcggacccttcaacggactcgacaagggagagccggtcaacgaggcagacgccgcggccctcgagcacgacaaagcctacgaccggcagctcgacagcggagacaacccgtacctcaagtacaaccacgccgacgcggagtttcaggagcgccttaaagaagatacgtcttttgggggcaacctcggacgagcagtcttccaggcgaaaaagagggttcttgaacctctgggcctggttgaggaacctgttaagacggctccgggaaaaaagaggccggtagagcactctcctgtggagccagactcctcctcgggaaccggaaaggcgggccagcagcctgcaagaaaaagattgaattttggtcagactggcgactcagagtcagtccccgacccacaacctctcggagaacctccagcaacccccgctgctgtgggacctaatacgatggctacaggcagtggcgcaccaatggcagacaataacgagggcgccgacggagtgggtaattcctcgggaaattggcattgcgattccacatggatgggcgacagagtcatcaccaccagcaccagaacctgggccctgcccacttacaacaaccatctctacaagcaaatctccagtgcttcaacgggggccagcaacgacaaccactacttcggctacagcaccccctgggggtattttgacttcaacagattccactgccacttctcaccacgtgactggcagcgactcatcaacaacaactggggattccggcctaagcgactcaacttcaagctcttcaacattcaggtcaaagaggttacggacaacaatggagtcaagaccatcgccaataaccttaccagcaccatccaggtctttacggactcggaataccagctgccgtacgttctcggctctgcccaccagggctgcctgcctccgttcccggcggacgtgttcatgattccccagtacggctacctaacactcaacaacggtagtcaggccgtgggacgctcctccttctactgcctggaatatttcccatcgcagatgctgagaacgggcaacaactttaccttcagctacacctttgaggacgttcctttccacagcagctacgctcacagccagagtctggaccgtctcatgaatcctctgattgaccagtacctgtactacttgtctcggactcaaacaacaggaggcaaggcaaatacgcagactctgggcttcagccaaggtgggcctaatacaatggccaatcaggcaaagaactggctgccaggaccctgttaccgccaacaacgcgtctcaacgacaaccgggcaaaacaacaatagcaactttgcctggactgctgggaccaaataccatctgaatggaagaaattcattggctaatcctggcatcgctatggcaacacacaaagacgacaaggagcgtttttttcccagtaacgggatcctgatttttggcaaacaaaatgctgccagagacaatgcggattacagcgatgtcatgctcaccagcgaggaagaaatcaaaaccactaaccctgtggctacagaggaatacggtatcgtggcagataacttgcagcagcaaaacacggctcctcaaattggaactgtcaacagccagggggccttacccggtatggtctggcagaaccgggacgtgtacctgcagggtcccatctgggccaagattcctcacacggacggcaacttccacccgtctccgctgatgggcggctttggcctgaaacatcctccgcctcagatcctgatcaagaacacgcctgtacctgcggatcctccgaccaccttcaaccagtcaaagctgaactctttcatcacgcaatacagcaccggacaggtcagcgtggaaattgaatgggagctgcagaaggaaaacagcaagcgctggaaccccgagatccagtacacctccaactactacaaatctacaagtgtggactttgctgttaatacagaaggcgtgtactctgaaccccaccccattggcacccgttacctcacccgtcccctgtaa

SEQ ID NO: 1660 - DNA, 2211 bp, Artificial Sequence
  Description of Artificial Sequence: Synthetic polynucleotide
atggctgccgatggttatcttccagattggctcgaggacaacctctctgagggcattcgcgagtggtgggcgctgaaacctggagccccgaagcccaaagccaaccagcaaaagcaggacgacggccggggtctggtgcttcctggctacaagtacctcggacccttcaacggactcgacaagggggagcccgtcaacgcggcggacgcagcggccctcgagcacgacaaggcctacgaccagcagctcaaagcgggtgacaatccgtacctgcggtataaccacgccgacgccgagtttcaggagcgtctgcaagaagatacgtcttttgggggcaacctcgggcgagcagtcttccaggccaagaagcgggttctcgaaccttttggtctggttgaggaaggtgctaagacggctcctggaaagaaacgtccggtagagcagtcgccacaagagccagactcctcctcgggcatcggcaagacaggccagcagcccgctaaaaagagactcaattttggtcagactggcgactcagagtcagtccccgacccacaacctctcggagaacctccagcaacccccgctgctgtgggacctactacaatggcttcaggcggtggcgcaccaatggcggacaataacgaaggcgccgacggagtgggtaatgcctcaggaaattggcattgcgattccacatggctgggcgacagagtcatcaccaccagcacccgcacctgggccttgcccacctacaataaccacctctacaagcaaatctccagtgcttcaacgggggccagcaacgacaaccactacttcggctacagcaccccctgggggtattttgacttcaacagattccactgccacttttcaccacgtgactggcaaagactcatcaacaacaactggggattccggcctaagcgactcaacttcaagctcttcaacattcaggtcaaagaggttacggacaacaatggagtcaagaccatcgccaataaccttaccagcacggtccaggtcttcacggactcggagtaccagttgccgtacgtcctcggctctgcgcaccagggctgcctccctccgttcccggcggacgtgttcatgattccgcagtacggctacctaacgctcaacaatggcagccaggcagtgggacggtcatccttttactgcctggaatatttcccatcgcagatgctgagaacgggcaacaactttaccttcagctacacctttgaggacgttcctttccacagcagctacgctcacagccagagtctggaccgtctcatgaatcctctgattgaccagtacctgtactacttgtctcggactcaaacaacaggaggcacgggaaatacgcagactctgggcttcagccaaggtgggcctaatacaatggccaatcaggcaaagaactggctgccaggaccctgttaccgccaacaacgcgtctcaacgacaaccgggcaaaacaacaatagcaactttgcctggactgctgggaccaaataccatctgaatggaagaaattcattggctaatcctggcatcgctatggcaacacacaaagacgacaaggagcgtttttttcccagtaacgggatcctgatttttggcaaacaaaatgctgccagagacaatgcggattacagcgatgtcatgctcaccagcgaggaagaaatcaaaaccactaaccctgtggctacagaggaatacggtatcgtggcagataacttgcagcagcaaaacacggctcctcaaattggaactgtcaacagccagggggccttacccggtatggtctggcagaaccgggacgtgtacctgcagggtcccatctgggccaagattcctcacacggacggcaacttccacccgtctccgctgatgggcggctttggcctgaaacatcctccgcctcagatcctgatcaagaacacgcctgtacctgcggatcctccgaccaccttcaaccagtcaaagctgaactctttcatcacgcaatacagcaccggacaggtcagcgtggaaattgaatgggagctgcagaaggaaaacagcaagcgctggaaccccgagatccagtacacctccaactactacaaatctacaagtgtggactttgctgttaatacagaaggcgtgtactctgaaccccaccccattggcacccgttacctcacccgtcccctgtaa

SEQ ID NO: 1661 - DNA, 2211 bp, Artificial Sequence
  Description of Artificial Sequence: Synthetic polynucleotide
atggctgccgatggttatcttccagattggctcgaggacaacctctctgagggcattcgcgagtggtgggacttgaaacctggagccccgaaacccaaagccaaccagcaaaagcaggacgacggccggggtctggtgcttcctggctacaagtacctcggacccttcaacggactcgacaagggggagcccgtcaacgcggcggacgcagcggccctcgagcacgacaaggcctacgaccagcagctcaaagcgggtgacaatccgtacctgcggtataaccacgccgacgccgagtttcaggagcgtctgcaagaagatacgtcttttgggggcaacctcgggcgagcagtcttccaggccaagaagcgggttctcgaacctctcggtctggttgaggaaggcgctaagacggctcctggaaagaagaggcctgtagagcagtcgccacaagagccagactcctcctcgggcatcggcaagacaggccagcagcccgctaaaaagagactcaattttggtcagactggcgactcagagtcagtccccgatccacaacctctcggagaacctccagcaacccccgctgctgtgggacctactacaatggcttcaggcggtggcgcaccaatggcagacaataacgaaggcgccgacggagtgggtagttcctcgggaaattggcattgcgattccacatggctgggcgacagagtcatcaccaccagcacccgaacatgggccttgcccacctataacaaccacctctacaagcaaatctccagtgcttcaacgggggccagcaacgacaaccactacttcggctacagcaccccctgggggtattttgacttcaacagattccactgccacttctcaccacgtgactggcagcgactcatcaacaacaactggggattccggcctaagcgactcaacttcaagctcttcaacatccaggtcaaggaggtcacgcagaatgaaggcaccaagaccatcgccaataacctcaccagcaccatccaggtgtttacggactcggagtaccagcttccgtacgtcctcggctctgcgcaccagggctgcctccctccgttcccggcggacgtgttcatgattccgcagtacggctacctaacgctcaacaatggcagccaggcagtgggacggtcatccttttactgcctggaatatttcccatcgcagatgctgagaacgggcaacaactttaccttcagctacacctttgaggacgttcctttccacagcagctacgcgcacagccagagcttggaccggctgatgaatcctctgattgaccagtacctgtactacttgtctcggactcaaacaacaggaggcacggcaaatacgcagactctgggcttcagccaaggtgggcctaatacaatggccaatcaggcaaagaactggctgccaggaccctgttaccgccaacaacgcgtctcaacgacaaccgggcaaaacaacaatagcaactttgcctggactgctgggaccaaataccatctgaatggaagaaattcattggctaatcctggcatcgctatggcaacacacaaagacgacaaggagcgtttttttcccagtaacgggatcctgatttttggcaaacaaaatgctgccagagacaatgcggattacagcgatgtcatgctcaccagcgaggaagaaatcaaaaccactaaccctgtggctacagaggaatacggtatcgtggcagataacttgcagcagcaaaacacggctcctcaaattggaactgtcaacagccagggggccttacccggtatggtctggcagaaccgggacgtgtacctgcagggtcccatctgggccaagattcctcacacggacggcaacttccacccgtctccgctgatgggcggctttggcctgaaacatcctccgcctcagatcctgatcaagaacacgcctgtacctgcggatcctccgaccaccttcaaccagtcaaagctgaactctttcatcacgcaatacagcaccggacaggtcagcgtggaaattgaatgggagctgcagaaggaaaacagcaagcgctggaaccccgagatccagtacacctccaactactacaaatctacaagtgtggactttgctgttaatacagaaggcgtgtactctgaaccccaccccattggcacccgttacctcacccgtcccctgtaa

SEQ ID NO: 1662 - DNA, 2211 bp, Artificial Sequence
  Description of Artificial Sequence: Synthetic polynucleotide
atggctgccgatggttatcttccagattggctcgaggacaacctctctgagggcattcgcgagtggtgggcgctgaaacctggagccccgaagcccaaagccaaccagcaaaagcaggacgacggccggggtctggtgcttcctggctacaagtacctcggacccttcaacggactcgacaagggggagcccgtcaacgcggcggatgcagcggccctcgagcacgacaaggcctacgaccagcagctcaaagcgggtgacaatccgtacctgcggtataaccacgccgacgccgagtttcaggagcgtctgcaagaagatacgtcttttgggggcaacctcgggcgagcagtcttccaggccaagaagcgggttctcgaacctctcggtctggttgaggaaggcgctaagacggctcctggaaagaaacgtccggtagagcagtcgccacaagagccagactcctcctcgggcatcggcaagacaggccagcagcccgctaaaaagagactcaattttggtcagactggcgactcagagtcagtccccgacccacaacctctcggagaacctccagcaacccccgctgctgtgggacctactacaatggctgcaggcggtggcgcaccaatggcagacaataacgaaggcgccgacggagtgggtagttcctcgggaaattggcattgcgattccacatggatgggcgacagagtcatcaccaccagcacccgaacctgggccttgcccacctataacaaccatctctacaagcaaatctccagtgcttcaacgggggccagcaacgacaaccactacttcggctacagcaccccctgggggtattttgacttcaacagattccactgccacttctcaccacgtgactggcagcgactcatcaacaacaactggggattccggcccaagagactcagcttcaagctcttcaacatccaggtcaaggaggtcacgcagaatgaaggcaccaagaccatcgccaataacctcaccagcaccatccaggtgtttacggactcggagtaccagctgccgtacgtcctcggctctgcgcaccagggctgcctccctccgttcccggcggacgtgttcatgattccgcagtacggctacctaacgctcaacaatggcagccaggcagtgggacggtcatccttttactgcctggaatatttcccatcgcagatgctgagaacgggcaacaactttaccttcagctacacctttgaggacgttcctttccacagcagctacgctcacagccagagcttggaccggctgatgaatcctctgattgaccagtacctgtactacttgtctcggactcaaacaacaggaggcacggcaaatacgcagactctgggtttcagccaaggtgggcctaatacaatggccaatcaggcaaagaactggctgcaaggaccctgttaccgccaacaacgcgtctcaacgacaaccgggcaaaacaacaatagcaactttgcctggactgctgggaccaaataccatctgaatggaagaaattcattggctaatcctggcatcgctatggcaacacacaaagacgacaaggagcgtttttttcccagtaacgggatcctgatttttggcaaacaaaatgctgccagagacaatgcggattacagcgatgtcatgctcaccagcgaggaagaaatcaaaaccactaaccctgtggctacagaggaatacggtatcgtggcagataacttgcagcagcaaaacacggctcctcaaattggaactgtcaacagccagggggccttacccggtatggtctggcagaacctggacgtgtacctgcagggtcccatctgggccaagattcctcacacggacggcaacttccacccgtctccgctgatgggcggctttggcctgaaacatcctccgcctcagatcctgatcaagaacacgcctgtacctgcggatcctccgaccaccttcaaccagtcaaagctgaactctttcatcacgcaatacagcaccggacaggtcagcgtggaaattgaatgggagctgcagaaggaaaacagcaagcgctggaaccccgagatccagtacacctccaactactacaaatctacaagtgtggactttgctgttaatacagaaggcgtgtactctgaaccccaccccattggcacccgttacctcacccgtcccctgtaa

SEQ ID NO: 1663 - DNA, 2214 bp, Artificial Sequence
  Description of Artificial Sequence: Synthetic polynucleotide
atggctgccgatggttatcttccagattggctcgaggacaacctctctgagggcattcgcgagtggtgggcgctgaaacctggagccccgaagcccaaagccaaccagcaaaagcaggacgacggccggggtctggtgcttcctggctacaagtacctcggacccttcaacggactcgacaagggagagcccgtcaacgcggcggacgcagcggccctcgagcacgacaaggcctacgaccagcagctcaaagcgggtgacaatccgtacctgcggtataaccacgccgacgccgagtttcaggagcgtctgcaagaagatacgtcttttgggggcaacctcgggcgagcagtcttccaggccaagaagcgggttctcgaacctctcggtctggttgaggaaggcgctaagacggctcctggaaagaagagaccggtagagccatcaccccagcgttctccagactcctcctcgggcatcggcaagacaggccagcagcccgctaaaaagagactcaattttggtcagactggcgactcagagtcagtccccgacccacaacctctcggagaacctccagcaacccccgctgctgtgggacctactacaatggcttcaggtggtggcgcaccaatggcagacaataacgaaggcgccgacggagtgggtaatgcctcaggaaattggcattgcgattcccaatggctgggcgacagagtcatcaccaccagcacccgaacatgggccttgcccacctataacaaccacctctacaagcaaatctccagtgcttcaacgggggccagcaacgacaaccactacttcggctacagcaccccctgggggtattttgacttcaacagattccactgccacttttcaccacgtgactggcagcgactcatcaacaacaactggggattccggcctaagcgactcaacttcaagctcttcaacattcaggtcaaagaggttacggacaacaatggagtcaagaccatcgccaataaccttaccagcacggtccaggtcttcacggactcagactatcagctcccgtacgtgctcgggtcggctcacgagggctgcctcccgccgttcccagcggacgttttcatgattccccagtacggctacctaacactcaacaacggtagtcaggccgtgggacgctcctccttctactgcctggaatactttccttcgcagatgctgagaaccggcaacaacttccagtttacttacaccttcgaggacgtgcctttccacagcagctacgctcacagccagagcttggaccggctgatgaatcctctgattgaccagtacctgtactacttgtctcggactcaaacaacaggaggcacggcaaatacgcagactttgggcttcagccaaggtgggcctaatacaatggccaatcaggcaaagaactgggtgccaggaccctgttaccgccaacaacgggtttcaacggcaaccgggcaaaacaacaatagcaactttgcctggactgctgggaccaaataccatctgaaaggaagaaattcattggctaatcctggcatcgctatggcaacacacaaagacgacaaggagcgtttttttcccagtaacgggatcctgatttttggcaaacaaaatgctgccagagacaatgcggattacagcgatgtcatgctcaccagcgaggaagaaatcaaaaccactaaccctgtggctacagaggaatacggtatcgtggcagataacttgcagcagcaaaacacggctcctcaaattggaactgtcaacagccagggggccttacccggtatggtctggcagaaccgggacgtgtacctgcagggtcccatctgggccaagattcctcacacggacggcaacttccacccgtctccgctgatgggcggctttggcctgaaacatcctccgcctcagatcctgatcaagaacacgcctgtacctgcggatcctccgaccaccttcaaccagtcaaagctgaactctttcatcacgcaatacagcaccggacaggtcagcgtggaaattgaatgggagctgcagaaggaaaacagcaaacgctggaacccagagattcaatacacttccaactactacaaatctacaagtgtggactttgctgttaatacagaaggcgtgtactctgaaccccaccccattggcacccgttacctcacccgtcccctgtaa

SEQ ID NO: 1664 - DNA, 2214 bp, Artificial Sequence
  Description of Artificial Sequence: Synthetic polynucleotide
  misc_feature (676)..(676): n is a, c, g, or t
  misc_feature (697)..(697): n is a, c, g, or t
  misc_feature (715)..(715): n is a, c, g, or t
  misc_feature (748)..(748): n is a, c, g, or t
  misc_feature (750)..(750): n is a, c, g, or t
  misc_feature (757)..(757): n is a, c, g, or t
  misc_feature (763)..(763): n is a, c, g, or t
atggctgccgatggttatcttccagattggctcgaggacactctctctgaaggaataagacagtggtggaagctcaaacctggcccaccaccaccaaagcccgcagagcggcataaggacgacagcaggggtcttgtgcttcctgggtacaagtacctcggacccttcaacggactcgacaagggagagccggtcaacgaggcagacgccgcggccctcgagcacgacaaagcctacgaccggcagctcgacagcggagacaacccgtacctcaagtacaaccacgccgacgcggagtttcaggagcgccttaaagaagatacgtcttttgggggcaacctcggacgagcagtcttccaggcgaaaaagagggttcttgaacctctcggtctggttgaggaaggcgctaagacggctcctggaaagaaacgtccggtagagcagtcgccacaagagccagactcctcctcgggcatcggcaagacaggccagcagcccgctaaaaagagactcaattttggtcagactggcgactcagagtcagtccccgacccacaacctctcggagaacctccagcaacgccctctggtgtgggacctaatacaatggctgcaggcggtggcgctccaatggcagacaataacgaaggcgccgacggagtgggtagttcctcangaaattggcattgcgattccncatggctgggcgacagantcatcaccaccagcacccgaacctgggccctgncnacctacnacaacnacctctacaagcaaatctccaacagcacatctggaggagccaccaacgacaacacctacttcggctacagcaccccctgggggtattttgactttaacagattccactgccacttttcaccacgtgactggcagcgactcatcaacaacaactggggattccggcctaagcgactcaacttcaagctcttcaacatccaggtcaaggaggtcacgcagaatgaaggcaccaagaccatcgccaataacctcaccagcaccatccaggtgtttacggactcggagtaccagctgccgtacgttctcggctctgcccaccagggctgcctgcctccgttcccggcggacgtgttcatgattccccagtacggctacctaacactcaacaacggtagtcaggccgtgggacgctcctccttctactgcctggaatactttccttcgcagatgctgagaaccggcaacaacttccagtttacttacaccttcgaggacgtgcctttccacagcagctacgcccacagccagagcttggaccggctgatgaatcctctgattgaccagtacctgtactacttgtctcggactcaaacaacaggaggcacggcaaatacgcagactctgggcttcagccaaggtgggcctaatacaatggccaatcaggcaaagaactggctgccaggaccctgttaccgccaacaacgcgtctcaacgacaaccgggcaaaacaacaatagcaactttgcctggactgctgggaccaaataccatctgaatggaagaaattcattggctaatcctggcatcgctatggcaacacacaaagacgacaaggagcgtttttttcccagtaacgggatcctgatttttggcaaacaaaatgctgccagagacaatgcggattacagcgatgtcatgctcaccagcgaggaagaaatcaaaaccactaaccctgtggctacagaggaatacggtatcgtggcagataacttgcagcagcaaaacacggctcctcaaattggaactgtcaacagccagggggccttacccggtatggtttggcagaaccgggacgtgtacctgcagggtcctatctgggccaagattcctcacacggacggaaactttcatccctcgccgctgatgggaggctttggactgaaacacccgcctcctcagatcctgattaagaatacacctgttcccgcggatcctccaactaccttcagtcaagctaagctggcgtcgttcatcacgcaatacagcacaggacaagtgagtgtggaaattgaatgggagctgcagaaagaaaacagcaagcgctggaatcccgaagtgcagtacacatccaattatgcaaaatctgccaacgttgattttactgtggacaacaatggactttatactgagcctcgccccattggcacccgttaccttacccgtcccctgtaa

SEQ ID NO: 1665 - DNA, 2214 bp, Artificial Sequence
  Description of Artificial Sequence: Synthetic polynucleotide
atggctgccgatggttatcttccagattggctcgaggacaacctctctgagggcattcgcgagtggtgggacttgaaacctggagccccgaagcccaaagccaaccagcaaaagcaggacgacggccggggtctggtgcttcctggctacaagtacctcggacccttcaacggactcgacaagggggagcccgtcaacgcggcggacgcagcggccctcgagcacgacaaggcctacgaccagcagctcaaagcgggtgacaatccgtacctgcggtataaccacgccgacgccgagtttcaggagcgtctgcaagaagatacgtcttttgggggcaacctcgggcgagcagtcttccaggccaagaagcgggttctcgaacctctcggtctggttgaggaaggcgctaagacggctcctggaaagaagagaccggtagagccatcaccccagcgttctccagactcctctacgggcatcggcaagaaaggccagcagcccgcgaaaaagagactcaactttgggcagactggcgactcagagtcagtgcccgaccctcaaccaatcggagaaccccccgcaggcccctctggtgtgggatctcttacaatggcttcaggtggtggcgcaccagtggcagacaataacgaaggtgccgatggagtgggtagttcctcgggaaattggcattgcgattcccaatggctgggggacagagtcatcaccaccagcacccgaacatgggccttgcccacctataacaaccacctctacaagcaaatctccagtgcttcaacgggggccagcaacgacaaccactacttcggctacagcaccccctgggggtattttgactttaacagattccactgccacttctcaccacgtgactggcagcgactcatcaacaacaactggggattccggcccaagagactcaacttcaagctcttcaacatccaggtcaaggaggtcacggacaatgatggagtcaagaccatcgccaataaccttaccagcacgattcaggtctttacggactcggaataccagttgccgtacgtcctcggctctgcgcaccagggctgcctgcctccgttcccggcggacgtgttcatgattccgcagtacggctacctaacgctcaacaatggcagccaggcagtgggacggtcatccttttactgcctggaatatttcccatcgcagatgctgagaacgggcaacaactttaccttcagctacacttttgaggacgttcctttccacagcagctacgctcacagccagagtctggaccgtctcatgaatcctctgattgaccagtacctgtactacttgtctcggactcaaacaacaggaggcacggcaaatacgcagactctgggcttcagccaaggtgggcctaatacaatggccaatcacgcaaagaactggctgccaggaccctgttaccgccaacaacgcgtctcaacgacaaccggacaaaacaacaatagcaactttgcctggactgctgggaccaaataccatctgaatggaagaaattcattggctaatcctggcatcgctatggcaacacacaaagacgacaaggagcgtttttttcccagtaacgggatcctgatttttggcaaacaaaatgctgccagagacaatgcggattacagcgatgtcatgctcaccagcgaggaagaaatcaaaaccactaaccctgtggctacagaggaatacggtatcgtggcagataacttgcagcagcaaaacacggctcctcaaattggaactgtcaacagccagggggccttacccggtatggtctggcagaaccgggacgtgtacctgcagggtcccatctgggccaagattcctcacacggacggcaacttccacccgtctccgctgatgggcggctttggcctgaaacatcctccgcctcagatcctgatcaagaacacgcctgtacctgcggatcctccgaccaccttcaaccagtcaaagctgaactctttcatcacgcaatacagcaccggacaggtcagcgtggaaattgaatgggagctgcagaaggaaaacagcaagcgctggaaccccgagatccagtacacctccaactactacaaatctacaagtgtggactttgctgttaatacagaaggcgtgtactctgaaccccaccccattggcacccgttacctcacccgtcccctgtaa

SEQ ID NO: 1666 - DNA, 2211 bp, Artificial Sequence
  Description of Artificial Sequence: Synthetic polynucleotide
atggctgccgatggttatcttccagattggctcgaggacactctctctgaaggaataagacagtggtggaagctcaaacctggcccaccaccaccaaagcccgcagagcggcacaaggacgacagcaggggtcttgtgcttcctgggtacaagtacctcggacccttcaacggactcgacaagggagagccggtcaacgaggcagacgccgcggccctcgagcacgacaaagcctacgaccggcagctcgacagcggagacaacccgtacctcaagtacaaccacgccgacgcggagtttcaggagcgccttaaagaagatacgtcttttgggggcaacctcggacgagcagtcttccaggcgaaaaagagggttcttgaacctctgggcctggttgaggaacctgttaagacggctccgggaaaaaagaggccggtagagcactctcctgtggagccagactcctcctcgggaaccggaaaggcgggccagcagcctgctaaaaagagactcaattttggtcagactggcgactcagagtcagtccccgacccacaacctctcggagaacctccagcaacccccgctgctgtgggacctactacaatggcttcaggtggtggcgcaccaatggcagacaataacgaaggcgccgacggagtgggtaatgcctcaggaaattggcattgcgattccacatggctgggcgacagagtcatcaccaccagcacccgcacctgggccttgcccacctacaataaccacctctacaagcaaatctccagtgcttcaacgggggccagcaacgacaaccactacttcggctacagcaccccctgggggtattttgacttcaacagattccactgccacttctcaccacgtgactggcagcgactcatcaacaacaactggggattccggcccaagagactcaacttcaaactcttcaacatccaagtcaaggaggtcacgcagaatgaaggcaccaagaccatcgccaataacctcaccagcaccatccaggtgtttacggactcggagtaccagctgccgtacgttctcggctctgcccaccagggctgcctgcctccgttcccggcggacgtgttcatgattccccagtacggctacctaacactcaacaacggtagtcaggccgtgggacgctcctccttctactgcctggaatactttccttcgcagatgctgagaaccggcaacaacttccagtttacttacaccttcgaggacgtgcctttccacagcagctacgcgcacagccagagcttggaccggctgatgaatcctctgattgaccagtacctgtactacttgtctcggactcaaacaacaggaggcacggcaaatacgcagactctgggcttcagccaaggtgggcctaatacaatggccaatcaggcaaagaactggctgccaggaccctgttaccgccaacaacgcgtctcaacgacaaccgggcaaaacaacaatagcaactttgcctggactgctgggaccaaataccatctgaatggaagaaattcattggctaatcctggcatcgctatggcaacacacaaagacgacaaggagcgtttttttcccagtaacgggatcctgatttttggcaaacaaaatgctgccagagacaatgcggattacagcgatgtcatgctcaccagcgaggaagaaatcaaaaccactaaccctgtggctacagaggaatacggtatcgtggcagataacttgcagcagcaaaacacggctcctcaaattggaactgtcaacagccagggggccttacccggtatggtctggcagaaccgggacgtgtacctgcagggtcccatctgggccaagattcctcacacggacggcaacttccacccgtctccgctgatgggcggctttggcctgaaacatcctccgcctcagatcctgatcaagaacacgcctgtacctgcggatcctccgaccaccttcaaccagtcaaagctgaactctttcatcacgcaatacagcaccggacaggtcagcgtggaaattgaatgggagctgcagaaggaaaacagcaagcgctggaaccccgagatccagtacacctccaactactacaaatctacaagtgtggactttgctgttaatacagaaggcgtgtactctgaaccccaccccattggcacccgttacctcacccgtcccctgtaa

SEQ ID NO: 1667 - DNA, 2211 bp, Artificial Sequence
  Description of Artificial Sequence: Synthetic polynucleotide
atggctgccgatggttatcttccagattggctcgaggacaacctctctgagggcattcgcgagtggtgggcgctgaaacctggagccccgaagcccaaagccaaccagcaaaagcaggacgacggccggggtctggtgcttcctggctacaagtacctcggacccttcaacggactcgacaagggggagcccgtcaacgcggcggatgcagcggccctcgagcacgacaaggcctacgaccagcagctccaagcgggtgacaatccgtacctgcggtataaccacgccgacgccgagtttcaggagcgtcttcaaggagatacgtcttttgggggcaacctcggacgagcagtcttccaggccaagaagcgggttctcgaacctctcggtctggttgaggaaggcgctaagacggctcctggaaagaaacgtccggtagagcagtcgccacaagagccagactcctcctcgggcatcggcaagacaggccagcagcccgctaaaaagagactcaattttggtcagactggcgactcagagtcagtccccgacccacaacctctcggagaacctccagcaacccccgctgctgtgggacctactacaatggcttcaggcggtggcgcaccaatggcggacaataacgaaggcgccgatggagtgggtaatgcctcaggaaattggcattgcgattccacatggctgggcgacagagtcatcaccaccagcacccgcacctgggccttgcccacctacaataaccacctctacaagcaaatctccagtgcttcaacgggggccagcaacgacaaccactacttcggctacagcaccccctgggggtattttgacttcaacagattccactgccacttctcaccacgtgactggcagcgactcatcaacaacaactggggattccggcctaagcgactcaacttcaagctcttcaacattcaggtcaaagaggttacggacaacaatggagtcaagaccatcgccaataacctcaccagcaccatccaggtgtttacggactcggagtaccagctgccgtacgttctcggctctgcccaccagggctgcctgcctccgttcccggcggacgtgttcatgattccccagtacggctacctaacactcaacaacggtagtcaggccgtgggacgctcctccttctactgcctggaatactttccttcgcagatgctgagaaccggcaacaacttccagtttacttacaccttcgaggacgtgcctttccacagcagctacgcccacagccagagcttggaccggctgatgaatcctctgattgaccagtacctgtactacttgtctcggactcaaacaacaggaggcacggcaaatacgcagactctgggcttcagccaaggtgggcctaatacaatggccaatcaggcaaagaactggctgccaggaccctgttaccgccaacaacgcgtctcaacgacaaccgggcaaaacaacaatagcaactttgcctggactgctgggaccaaataccatctgaatggaagaaattcattggctaatcctggcatcgctatggcaacacacaaagacgacaaggagcgtttttttcccagtaacgggatcctgatttttggcaaacaaaatgctgccagagacaatgcggattacagcgatgtcatgctcaccagcgaggaagaaatcaaaaccactaaccctgtggctacagaggaatacggtatcgtggcagataacttgcagcagcaaaacacggctcctcaaattggaactgtcaacagccagggggccttacccggtatggtctggcagaaccgggacgtgtacctgcagggtcccatctgggccaagattcctcacacggacggcaacttccacccgtctccgctgatgggcggctttggcctgaaacatcctccgcctcagatcctgatcaagaacacgcctgtacctgcggatcctccgaccaccttcaaccagtcaaagctgaactctttcatcacgcaatacagcaccggacaggtcagcgtggaaattgaatgggagctgcagaaggaaaacagcaagcgctggaaccccgagatccagtacacctccaactactacaaatctacaagtgtggactttgctgttaatacagaaggcgtgtactctgaaccccaccccattggcacccgttacctcacccgtcccctgtaa

SEQ ID NO: 1668 - DNA, 2217 bp, Artificial Sequence
  Description of Artificial Sequence: Synthetic polynucleotide
atggctgccgatggttatcttccagattggctcgaggacactctctctgaaggaataagacagtggtggaagctcaaacctggcccaccaccaccaaagcccgcagagcggcataaggacgacagcaggggtcttgtgcttcctgggtacaagtacctcggacccttcaacggactcgacaagggggagcccgtcaacgcggcggatgcagcggccctcgagcacgacaaggcctacgaccagcagctcaaagcgggtgacaatccgtacctgcggtataaccacgccgacgcggagtttcaggagcgccttaaagaagatacgtcttttgggggcaacctcggacgagcagtcttccaggcgaaaaagagggttcttgaacctctcggtctggttgaggaaggcgctaagacggctcctggaaagaagagaccggtagagccatcaccccagcgttctccagactcctctacgggcatcggcaagaaaggccaacagcccgccagaaaaagactcaattttggtcagactggcgactcagagtcagttccagaccctcaacctctcggagaacctccagcagcgccctctggtgtgggacctaatacaatggctgcaggcggtggcgcaccaatggcagacaataacgaaggcgccgacggagtgggtagttcctcgggaaattggcattgcgattcccaatggctgggggacagagtcatcaccaccagcaccagaacctgggccctgcccacctacaacaatcacctctacaagcaaatctccaacagcacatctggaggatcttcaaatgacaacgcctacttcggctacagcaccccctgggggtattttgacttcaaccgcttccactgccacttctcaccacgtgactggcagcgactcatcaacaacaactggggattccggcccaagagactcaacttcaagctcttcaacattcaggtcaaagaggttacggacaacaatggagtcaagaccatcgccaataaccttaccagcacggtccaggtctttacggactcggagtaccagttgccgtacgtcctcggctctgcgcaccagggctgcctccctccgttcccggcggacgtgttcatgattccccagtacggctacctaacactcaacaacggtagtcaggccgtgggacgctcctccttctactgcctggaatatttcccttctcagatgctgagaacgggcaacaactttaccttcagctacacctttgaggacgttcctttccacagcagctacgctcacagccagagtctggaccgtctcatgaatcctctgattgaccagtacctgtactacttgtctcggactcaaacaacaggaggcacggcaaatacgcagactctgggcttcagccaaggtgggcctaatacaatggccaatcaggcaaagaactggctgccaggaccctgttaccgccaacaacgcgtctcaacgacaaccgggcaaaacaacaatagcaactttgcctggactgctgggaccaaataccatctgaatggaagaaattcattggctaatcctggcatcgctatggcaacacacaaagacgacaaggagcgtttttttcccagtaacgggatcctgatttttggcaaacaaaatgctgccagagacaatgcggattacagcgatgtcatgctcaccagcgaggaagaaatcaaaaccactaaccctgtggctacagaggaatacggtatcgtggcagataacttgcagcagcaaaacacggctcctcaaattggaactgtcaacagccagggggccttacccggtatggtctggcagaaccgggacgtgtacctgcagggtcccatctgggcaaagattccacacacggacggacattttcacccctctcccctcatgggtggattcggacttaaacaccctcctccacagattctcatcaagaacaccccggtacctgcgaatcctccgaccaccttcaaccagtcaaagctgaactctttcatcacgcaatacagcacaggacaagtgagtgtggaaattgaatgggagctgcagaaagaaaacagcaagcgctggaatcccgaagtgcagtacacatccaattatgcaaaatctgccaacgttgattttactgtggacaacaatggactttatactgagcctcgccccattggcacccgttaccttacccgtcccctgtaa

SEQ ID NO: 1669 - DNA, 2211 bp, Artificial Sequence
  Description of Artificial Sequence: Synthetic polynucleotide
atggctgccgatggttatcttccagattggctcgaggacaacctctctgagggcattcgcgagtggtgggcgctgaaacctggagccccgaaacccaaagccaaccagcaaaagcaggacgacggccggggtctggtgcttcctggctacaagtacctcggacccttcaacggactcgacaagggggagcccgtcaacgcggcggacgcagcggccctcgagcacgacaaggcctacgaccagcagctcaaggcgggtgacaatccgtacctgcggtataaccacgccgacgccgagtttcaggagcgtctgcaagaagatacgtcttttgggggcaacctcgggcgagcagtcttccaggccaaaaagaggcttcttgaacctcttggtctggttgaggaaggggctaagacggctcctggaaagaaacgtccggtagagcagtcgccacaagagccagactcctcctcgggcattggcaagacaggccagcagcccgctaaaaagagactcaactttgggcagactggcgactcagagtcagtgcccgatcctcaacctctcggagaacctccagcaacccccgctgctgtgggacctactacaatggcttcaggcggtggcgcaccaatggcggacaataacgaaggcgccgatggagtgggtaattcctcgggaaattggcattgcgattccacatggatgggcgacagagtcatcaccaccagcacccgaacctgggccctgcccacctacaacaatcacctctacaagcaaatctccagtgcttcaacgggggccagcaacgacaaccactacttcggctacagcaccccctgggggtattttgatttcaacagattccactgccatttttcaccacgtgactggcagcgactcatcaacaacaactggggattccggcccaagagactcaacttcaagctcttcaacatccaggtcaaggaggtcacgcagaatgaaggcaccaagaccatcgccaataaccttaccagcacgattcaggtctttacggattcggaataccagctcccgtacgtcctcggctctgcgcaccagggctgcctccctccgttcccggcggacgtgttcattattccgcagtacggctacctaacgctcaacaatggtagccaggcagtgggacggtcatccttttactgcctggaatatttcccatcgcagatgctgagaacgggcaacaactttaccttcagctacacctttgaggacgttcctttccacagcagctacgctcacagccagagtctggaccgtctcatgaatcctctgattgaccagtacctgtactacttgtctcggactcaaacaacaggaggcacggcaaatacgcagactctgggcttcagccaaggtgggcctaatacaatggccaatcaggcaaagaactggctgccaggaccctgttaccgccaacaacgcgtctcaacgacaaccgggcaaaacaacaatagcaactttgcctggactgctgggaccaaataccatctgaatggaagaaattcattggctaatcctggcatcgctatggcaacacacaaagacgacaaggagcgtttttttcccagtaacgggatcctgatttttggcaaacaaaatgctgccagagacaatgcggattacagcgatgtcatgctcaccagcgaggaagaaatcaaaaccactaaccctgtggctacagaggaatacggtatcgtggcagataacttgcagcagcaaaacacggctcctcaaattggaactgtcaacagccagggggccttacccggtatggtctggcagaaccgggacgtgtacctgcagggtcccatctgggccaagattcctcacacggacggcaacttccacccgtctccgctgatgggcggctttggcctgaaacatcctccgcctcagatcctgatcaagaacacgccagtacctgcggatcctccgaccaccttcaaccagtcaaagctgaactctttcatcacgcaatacagcaccggacaggtcagcgtggaaattgaatgggagctgcagaaggaaaacagcaagcgctggaaccccgagatccagtacacctccaactactacaaatctacaagtgtggactttgctgttaatacagaaggcgtgtactctgaaccccaccccattggcacccgttacctcacccgtcccctgtaa

SEQ ID NO: 1670 - DNA, 2211 bp, Artificial Sequence
  Description of Artificial Sequence: Synthetic polynucleotide
atggctgccgatggttatcttccagattggctcgaggacaacctctctgagggcattcgcgagtggtgggcgctgaaacctggagccccgaaacccaaagccaaccagcaaaagcaggacgacggccggggtctggtgcttcctggctacaagtacctcggacccttcaacggactcgacaagggggagcccgtcaacgcggcggatgcagcggccctcgagcacgacaaggcctacgaccagcagctcaaggcgggtgacaatccgtacctgcggtataaccacgccgacgccgagtttcaggagcgtctgcaagaagatacgtcttttgggggcaacctcgggcgagcagtcttccaggccaaaaagagggttcttgaaccttttggtctggttgaggaagctgctaagacggctcctggaaagaaacgtccggtagagcagtcgccacaagagccagactcctcctcgggcattggcaagacaggccagcagcccgctaaaaagagactcaattttggtcagactggcgactcagagtcagtgcccgaccctcaacctctcggagaacctccagcaacccccgctgctgtgggacctactacaatggcttcaggcggtggcgcaccaatggcagacaataacgaaggcgccgatggagtgggtaatgcctcaggaaattggcattgcgattccacatggctgggcgacagagtcatcaccaccagcacccgaacctgggccctgcccacctacaacaatcacctctacaagcaaatctccagtgcttcaacgggggccagcaacgacaaccactacttcggctacagcaccccctgggggtattttgactttaacagattccactgccacttttcaccacgtgactggcagcgactcatcaacaacaactggggattccggcccaagagactcaacttcaagctcttcaacatccaggtcaaggaggtcacgcagaatgaaggcaccaagaccatcgccaataacctcaccagcaccattcaggtctttacggattcggaataccagctcccgtacgtcctcggctctgcccaccagggctgcctccctccgttcccggcggacgtgttcatgattccgcagtacggctacctaacgctcaacaatggtagccaggcagtgggacggtcatccttttactgcctggaatatttcccatcgcagatgctgagaacgggcaacaactttaccttcagctacacctttgaggacgttcctttccacagcagctacgctcacagccagagtctggaccgtctcatgaatcctctgattgaccagtacctgtactacttgtctcggactcaaacaacaggaggcacggcaaatacgcagactctgggcttcagccaaggtgggcctaatacaatggccaatcacgcaaagaactggctgccaggaccctgttaccgccaacaacgcgtctcaacgacaaccgggcaaaacaacaatagcaactttgcctggactgctgggaccaaataccatctgaatggaagaaattcattggctaatcctggcatcgctatggcaacacacaaagacgacaaggagcgtttttttcccagtaacgggatcctgatttttggcaaacaaaatgctgccagagacaatgcggattacagcgatgtcatgctcaccagcgaggaagaaatcaaaaccactaaccctgtggctacagaggaatacggtatcgtggcagataacttgcagcagcaaaacacggctcctcaaattggaactgtcaacagccagggggccttacccggtatggtctggcagaaccgggacgtgtacctgcagggtcccatctgggccaagattcctcacacggacggcaacttccacccgtctccgctgatgggcggctttggcctgaaacatcctccgcctcagatcctgatcaagaacacgcctgtacctgcggatcctccgaccaccttcaaccagtcaaagctgaactctttcatcacgcaatacagcaccggacaggtcagcgtggaaattgaatgggagctgcagaaggaaaacagcaagcgctggaaccccgagatccagtacacctccaactactacaaatctacaagtgtggactttgctgttaatacagaaggcgtgtactctgaaccccaccccattggcacccgttacctcacccgtcccctgtaa

SEQ ID NO: 1671 - DNA, 2211 bp, Artificial Sequence
  Description of Artificial Sequence: Synthetic polynucleotide
atggctgccgatggttatcttccagattggctcgaggacaacctctctgagggcattcgcgagtggtgggcgctgaaacctggagccccgaagcccaaagccaaccagcaaaagcaggacgacggccggggtctggtgcttcctggctacaagtacctcggacccttcaacggactcgacaaaggagagcccgtcaacgaggcggacgcggcggccctcgaacacgacaaggcttacgaccagcagctcaaggccggtgacaacccctacctgcggtacaaccacgccgacgccgagttccaggagcggctgcaagaagatacgtcttttgggggcaacctcgggcgagcagtcttccaggccaagaagaggcttcttgaacctcttggtctggttgaggaagcggctaagacggctcctggaaagaagaggcctgtagagcagtctcctcaggaaccggactcctccgcgggtattggcaaatcaggtgcacagcccgctaaaaagagactcaattttggtcagactggcgactcagagtcagtccccgacccacaacctctcggagaacctccagcaacccccgctgctgtgggacctactacaatggcttcaggcggtggcgcaccaatggcagacaataacgaaggcgccgatggagtgggtaatgcctcaggaaattggcattgcgattccacatggctgggcgacagagtcatcaccaccagcacccgaacctgggccctgcccacctataacaaccatctctacaagcaaatctccagtgcttcaacgggggccagtaacgacaaccactacttcggctacagcaccccctgggggtattttgactttaacagattccactgccacttctcaccacgtgactggcagcgactcatcaacaacaactggggattccggcccaagcgactcaacttcaagctcttcaacattcaggtcaaagaggttacggacaacgatggagtcaagaccatcgccaataaccttaccagcaccattcaggtgtttacggactcggaataccagctgccgtacgttctcggctccgcccaccagggctgcctgcctccgttcccggcggacgtgttcatgattccccagtacggctacctaacactcaacaacggtagtcaggccgtgggacgctcctccttctactgcctggaatactttccttcgcagatgctgagaactggcaacaacttccagtttacttacaccttcgaggacgtgcctttccacagcagctacgcccacagccagagcttggaccggctgatgaatcctctgattgaccagtacctgtactacttgtctcggactcaaacaacaggaggcacggcaaatacgcagactctgggcttcagccaaggtgggcctaatacaatggccaatcaggcaaagaactggctgccaggaccctgttaccgccaacaacgcgtctcaacgacaaccgggcaaaacaacaatagcaactttgcctggactgctgggaccaaataccatctgaatggaagaaattcattggctaatcctggcatcgctatggcaacacacaaagacgacaaggagcgtttttttcccagtaacgggatcctgatttttggcaaacaaaatgctgccagagacaatgcggattacagcgatgtcatgctcaccagcgaggaagaaatcaaaaccactaaccctgtggctacagaggaatacggtatcgtggcagataacttgcagcagcaaaacacggctcctcaaattggaactgtcaacagccagggggccttacccggtatggtctggcagaaccgggacgtgtacctgcagggtcccatctgggccaagattcctcacacggacggcaacttccacccgtctccgctgatgggcggctttggcctgaaacatcctccgcctcagatcctgatcaagaacacgcctgtacctgcggatcctccgaccaccttcaaccagtcaaagctgaactctttcatcacgcaatacagcaccggacaggtcagcgtggaaattgaatgggagctgcagaaggaaaacagcaagcgctggaaccccgagatccagtacacctccaactactacaaatctacaagtgtggactttgctgttaatacagaaggcgtgtactctgaaccccaccccattggcacccgttacctcacccgtcccctgtaa

SEQ ID NO: 1672 - DNA, 2211 bp, Artificial Sequence
  Description of Artificial Sequence: Synthetic polynucleotide
atggctgccgatggttatcttccagattggctcgaggacaacctctctgagggcattcgcgagtggtgggcgctgaaacctggagccccgaagcccaaagccaaccagcaaaagcaggacgacggccggggtctggtgcttcctggctacaagtacctcggacccttcaacggactcgacaagggggagcccgtcaacgcggcggatgcagcggccctcgagcacgacaaagcctacgaccagcagctcaaagcgggtgacaatccgtacctgcggtataaccacgccgacgccgagtttcaggagcgtctgcaagaagatacgtcttttgggggcaacctcgggcgagcagtcttccaggccaagaagagggttctcgaacctttgggtctggttgaggaaggggctaagacggctcctggaaagaaaaggccggtagagcagtctcctcaggaaccggactcctccgcgggtattggcaagacaggtgcacagcccgctaaaaagagactcaattttggtcagactggcgactcagagtcagtccccgacccacaacctctcggagaacctccagcaacccccgctgctgtgggacctactacaatggcttcaggcggtggcgcaccaatggcagacaataacgaaggcgccgacggagtgggtagtgcctcgggaaattggcattgcgattccacatggctgggcgacagagtcatcaccaccagcacccgaacctgggccctgcccacctataacaaccatctctacaagcaaatctccagtgcttcaacgggggccagtaacgacaaccactacttcggctacagcaccccctgggggtattttgacttcaacagattccactgccacttctcaccacgtgactggcagcgactcatcaacaacaactggggattccggcccaagcgactcaacttcaagctcttcaacattcaggtcaaagaggttacggacaacaatggagtcaagaccatcgccaataaccttaccagcacgatccaggtctttacggactcggagtaccagctgccgtacgtcctcggctctgcgcaccagggctgcctgcctccgttcccggcggacgtgttcatgattccgcagtacggctacctaacgctcaacaatggtagccaggcagtgggacggtcatccttttactgcctggaatatttcccatcgcagatgctgagaacgggcaacaactttaccttcagctacacctttgaggacgttcctttccacagcagctacgctcacagccagagtctggaccgtctcatgaatcctctgattgaccagtacctgtactacttgtctcggactcaaacaacaggaggcacggcaaatacgcagactctgggcttcagccaaggtgggcctaatacaatggccaatcaggcaaagaactggctgccaggaccctgttaccgccaacaacgcgtctcaacgacaaccgggcaaaacaacaatagcaactttgcctggactgctgggaccaaataccatctgaatggaagaaattcattggctaatcctggcatcgctatggcaacacacaaagacgacaaggagcgtttttttcccagtaacgggatcctgatttttggcaaacaaaatgctgccagagacaatgcggattacagcgatgtcatgctcaccagcgaggaagaaatcaaaaccactaaccctgtggctacagaggaatacggtatcgtggcagataacttgcagcagcaaaacacggctcctcaaattggaactgtcaacagccagggggccttacccggtatggtctggcagaaccgggacgtgtacctgcagggtcccatctgggccaagattcctcacacggacggcaacttccacccgtctccgctgatgggcggctttggcctgaaacatcctccgcctcagatcctgatcaagaacacgcctgtacctgcggatcctccgaccaccttcaaccagtcaaagctgaactctttcatcacgcaatacagcaccggacaggtcagcgtggaaattgaatgggagctgcagaaggaaaacagcaagcgctggaaccccgagatccagtacacctccaactactacaaatctacaagtgtggactttgctgttaatacagaaggcgtgtactctgaaccccaccccattggcacccgttacctcacccgtcccctgtaa

SEQ ID NO: 1673 - DNA, 2211 bp, Artificial Sequence
  Description of Artificial Sequence: Synthetic polynucleotide
atggctgccgatggttatcttccagattggctcgaggacaacctctctgagggcattcgcgagtggtgggacttgaaacctggagccccgaagcccaaagccaaccagcaaaagcaggacgacggccggggtctggtgcttcctggctacaagtacctcggacccttcaacggactcgacaagggggagcccgtcaacgcggcggacgcagcggccctcgagcacgacaaggcctacgaccagcagctcaaagcgggtgacaatccgtacctgcggtataaccacgccgacgccgagtttcaggagcgtctgcaagaagatacgtcttttgggggcaacctcggacgagcagtcttccaggccaaaaagaggcttcttgaacctcttggtctggttgaggaagcggctaagacggctcctggaaagaagaggcctgtagagcagtctcctcaggaaccggactcctccgcgggtattggcaaatcgggtgcacagcccgctaaaaagagactcaatttcggtcagactggcgacacagagtcagtcccagaccctcaaccaatcggagaacctccagcagcgccctctggtgtgggacctaatacaatggctgcaggcggtggcgcaccaatggcagacaataacgaaggtgccgatggagtgggtagttcctcgggaaattggcattgcgattcccaatggctgggggacagagtcatcaccaccagcacccgaacctgggccctgcccacctataacaaccacctctacaagcaaatctccagtgcttcaacgggggccagcaacgacaaccactactttggctacagcaccccttgggggtattttgacttcaacagattccactgccacttttcaccacgtgactggcaaagactcatcaacaacaactggggattccgacccaagagactcaacttcaagctcttcaacatccaggtcaaggaggtcacgcagaatgaaggcaccaagaccatcgccaataacctcaccagcaccatccaggtgtttacggactcggagtaccagctgccgtacgttctcggctctgcccaccagggctgcctgcctccgttcccggcggacgtgttcatgattccccagtacggctacctaacactcaacaacggtagtcaggccgtgggacgctcctccttctactgcctggaatactttccttcgcagatgctgagaaccggcaacaacttccagtttacttacaccttcgaggacgtgcctttccacagcagctacgcgcacagccagagcttggaccggctgatgaatcctctgattgaccagtacctgtactacttgtctcggactcaaacaacaggaggcacggcaaatacgcagactctgggcttcagccaaggtgggcctaatacaatggccaatcacgcaaagaactggctgccaggaccctgttaccgccaacaacgcgtctcaacgacaaccgggcaaaacaacaatagcaactttgcctggactgctgggaccaaataccatctgaatggaagaaattcattggctaatcctggcatcgctatggcaacacacaaagacgacaaggagcgtttttttcccagtaacgggatcctgatttttggcaaacaaaatgctgccagagacaatgcggattacagcgatgtcatgctcaccagcgaggaagaaatcaaaaccactaaccctgtggctacagaggaatacggtatcgtggcagataacttgcagcagcaaaacacggctcctcaaattggaactgtcaacagccagggggccttacccggtatggtctggcagaaccgggacgtgtacctgcagggtcccatctgggccaagattcctcacacggacggcaacttccacccgtctccgctgatgggcggctttggcctgaaacatcctccgcctcagatcctgatcaagaacacgcctgtacctgcggatcctccgaccaccttcaaccagtcaaagctgaactctttcatcacgcaatacagcaccggacaggtcagcgtggaaattgaatgggagctgcagaaggaaaacagcaagcgctggaaccccgagatccagtacacctccaactactacaaatctacaagtgtggactttgctgttaatacagaaggcgtgtactctgaaccccaccccattggcacccgttacctcacccgtcccctgtaa

SEQ ID NO: 1674 - DNA, 2214 bp, Artificial Sequence
  Description of Artificial Sequence: Synthetic polynucleotide
atggctgccgatggttatcttccagattggctcgaggacaaccttagtgaaggaattcgcgagtggtgggcgctgaaacctggagccccgaagcccaaagccaaccagcaaaagcaggacgacggccggggtctggtgcttcctggctacaagtacctcggacccttcaacggactcgacaagggggagcccgtcaacgcggcggacgcagcggccctcgagcacgacaaggcctacgaccagcagctcaaagcgggtgacaatccgtacctgcggtataaccacgccgacgccgagtttcaggagcgtctgcaagaagatacgtcttttgggggcaacctcgggcgagcagtcttccaggccaagaagcgggttctcgaacctctcggtctggttgaggaaggcgctaagacggctcctggaaagaaacgtccggtagagcagtcgccacaagagccagactcctcctcgggcatcggcaagacaggccagcagcccgctaaaaagagactcaatttcggtcagactggcgacacagagtcagtcccagaccctcaaccaatcggagaacctcccgcagccccctcaggtgtgggatctcttacaatggcttcaggtggtggcgcaccagtggcagacaataacgaaggtgccgatggagtgggtagttcctcgggaaattggcattgcgattcccaatggctgggggacagagtcatcaccaccagcaccagaacctgggccttgcccacctacaataaccacctctacaagcaaatctccaacagcacatctggaggatcttcaaatgacaacgcctacttcggctacagcaccccctgggggtattttgactttaacagattccactgccacttttcaccacgtgactggcagcgactcatcaacaacaactggggattccgacccaagagactcaacttcaagctcttcaacatccaggtcaaggaggtcacgcagaacgaaggcaccaagaccatcgccaataacctcaccagcaccatccaggtgtttacggactcggagtaccagctgccgtacgttctcggctccgcccaccagggctgcctgcctccgttcccggcggacgtgttcatgattccccagtacggctacctaacgctcaacaacggtagtcaggccgtgggacgctcctccttctactgcctggaatactttccttcgcagatgctgagaaccggcaacaacttccagtttacttacaccttcgaggacgtgcctttccacagcagctacgcgcacagccagagcttggaccggctgatgaatcctctgattgaccagtacctgtactacttgtctcggactcaaacaacaggaggcacggcaaatacgcagactctgggcttcagccaaggtgggcctaatacaatggccaatcaggcaaagaactggctgccaggaccctgttaccgccaacaacgcgtctcaacgacaaccgggcaaaacaacaatagcaactttgcctggactgctgggaccaaataccatctgaatggaagaaattcattggctaatcctggcatcgctatggcaacacacaaagacgacaaggagcgtttttttcccagtaacgggatcctgatttttggcaaacaaaatgctgccagagacaatgcggattacagcgatgtcatgctcaccagcgaggaagaaatcaaaaccactaaccctgtggctacagaggaatacggtatcgtggcagataacttgcagcagcaaaacacggctcctcaaattggaactgtcaacagccagggggccttacccggtatggtctggcagaaccgggacgtgtacctgcagggtcccatctgggccaagattcctcacacggacggcaacttccacccgtctccgctgatgggcggctttggcctgaaacatcctccgcctcagatcctgatcaagaacacgcctgtacctgcggatcctccgaccaccttcaaccagtcaaagctgaactctttcatcacgcaatacagcaccggacaggtcagcgtggaaattgaatgggagctgcagaaggaaaacagcaagcgctggaaccccgagatccagtacacctccaactactacaaatctacaagtgtggactttgctgttaatacagaaggcgtgtactctgaaccccaccccattggcacccgttacctcacccgtcccctgtaa

SEQ ID NO: 1675 - DNA, 2214 bp, Artificial Sequence
  Description of Artificial Sequence: Synthetic polynucleotide
atggctgccgatggttatcttccagattggctcgaggacaaccttagtgaaggaattcgcgagtggtgggcgctgaaacctggagccccgaagcccaaagccaaccagcaaaagcaggacgacggccggggtctggtgcttcctggctacaagtacctcggacccttcaacggactcgacaagggggagcccgtcaacgcggcggacgcagcggccctcgagcacgacaaggcctacgaccagcagctcaaagcgggtgacaatccgtacctgcggtataaccacgccgacgcggagtttcaggagcgccttaaagaagatacgtcttttgggggcaacctcgggcgagcagtcttccaggccaagaagagggttctcgaaccttttggtctggttgaggaaggtgctaagacggctcctggaaagaaacgtccggtagagcagtcgccacaagagccagactcctcctcgggcatcggcaagacaggccagcagcccgctaaaaagagactcaattttggtcagactggcgactcagagtcagttccagaccctcaacctctcggagaacctccagcagcgccctctggtgtgggacctaatacaatggctgcaggcggtggcgcaccaatggcagacaataacgaaggtgccgatggagtgggtagttcctcgggaaattggcattgcgattcccaatggctggggaacagagtcatcaccaccagcacccgaacctgggccctgcccacctacaacaatcacctctacaagcaaatctccaacagcacatctggaggatcttcaaatgacaacgcctacttcggctacagcaccccctgggggtattttgacttcaacagattccactgccacttctcaccacgtgactggcagcgactcatcaacaacaactggggattccggcccaagagactcaacttcaagctcttcaacattcaggtcaaagaggttacggacaacaatggagtcaagaccatcgccaataaccttaccagcacggtccaggtcttcacggactcggagtaccagttgccgtacgtcctcggctctgcgcaccagggctgcctccctccgttcccggcggacgtgttcatgattccgcaatacggctacctgacgctcaacaacggtagccaagccgtgggacgttcatccttttactgcctggaatatttcccttctcagatgctgagaaccggcaacaacttccagtttacttacaccttcgaggacgtgcctttccacagcagctacgcgcacagccagagcttggaccggctgatgaatcctctgattgaccagtacctgtactacttgtctcggactcaaacaacaggaggcacggcaaatacgcagactctgggcttcagccaaggtgggcctaatacaatggccaatcaggcaaagaactggctgccaggaccctgttaccgccaacaacgcgtctcaacgacaaccgggcaaaacaacaatagcaactttgcctggactgctgggaccaaataccatctgaatggaagaaattcattggctaatcctggcatcgctatggcaacacacaaagacgacaaggagcgtttttttcccagtaacgggatcctgatttttggcaaacaaaatgctgccagagacaatgcggattacagcgatgtcatgctcaccagcgaggaagaaatcaaaaccactaaccctgtggctacagaggaatacggtatcgtggcagataacttgcagcagcaaaacacggctcctcaaattggaactgtcaacagccagggggccttacccggtatggtctggcagaaccgggacgtgtacctgcagggtcccatctgggccaagattcctcacacggacggcaacttccacccgtctccgctgatgggcggctttggcctgaaacatcctccgcctcagatcctgatcaagaacacgcctgtacctgcggatcctccgaccaccttcaaccagtcaaagctgaactctttcatcacgcaatacagcaccggacaggtcagcgtggaaattgaatgggagctgcagaaggaaaacagcaagcgctggaaccccgagatccagtacacctccaactactacaaatctacaagtgtggactttgctgttaatacagaaggcgtgtactctgaaccccaccccattggcacccgttacctcacccgtcccctgtaa

SEQ ID NO: 1676 - DNA, 2211 bp, Artificial Sequence
  Description of Artificial Sequence: Synthetic polynucleotide
atggctgccgatggttatcttccagattggctcgaggacaacctctctgagggcattcgcgagtggtgggacttgaaacctggagccccgaagcccaaagccaaccagcaaaagcaggacgacggccggggtctggtgcttcctggctacaagtacctcggacccttcaacggactcgacaggggggagcccgtcaacgcggcggacgcagcggccctcgagcacgacaaggcctacgaccagcagctcaaagcgggtgacaatccgtacctgcggtataaccacgccgacgccgagtttcaggagcgtctgcaagaagatacgtcttttgggggcaacctcgggcgagcagtcttccaggccaagaagcgggttctcgaacctctcggtctggttgaggaaggcgctaagacggctcctggaaagaaacgtccggtagagcagtcgccacaagagccagactcctcctcgggcatcggcaagacaggccagcagcccgctaaaaagagactcaattttggtcagactggcgactcagagtcagtccccgacccacaacctctcggagaacctccagcaacccccgctgctgtgggacctactacaatggcttcaggcggtggcgcaccaatggcagacaataacgaaggcgccgacggagtgggtaatgcctcaggaaattggcattgcgattccacatggctgggcgacagagtcatcaccaccagcacccgaacctgggccttgcccacctataacaaccacctctacaagcaaatctccagtgcttcaacgggggccagcaacgacaaccactacttcggctacagcaccccctgggggtattttgacttcaacagattccactgccacttctcaccacgtgactggcagcgactcatcaacaacaactggggattccggcctaagcgactcaacttcaagctcttcaacattcaggtcaaagaggttacggacaacaatggagtcaagaccatcgccaataacctcaccagcaccatccaggtgtttacggactcggagtaccagctgccgtacgttctcggctctgcccaccagggctgcctgcctccgttcccggcggacgtgttcatgattccccagtacggctacctaacactcaacaacggtagtcaggccgtgggacgctcctccttctactgcctggaatactttccttcgcagatgctgagaaccggcaacaacttccagtttacttacaccttcgaggacgtgcctttccacagcagctacgcccacagccagagcttggaccggctgatgaatcctctgattgaccagtacctgtactacttgtctcggactcaaacaacaggaggcacggcaaatacgcagactctgggcttcagccaaggtgggcctaatacaatggccaatcaggcaaagaactggctgccaggaccctgttaccgccaacaacgcgtctcaacgacaaccgggcaaaacaacaatagcaactttgcctggactgctgggaccaaataccatctgaatggaagaaattcattggctaatcctggcatcgctatggcaacacacaaagacgacaaggagcgtttttttcccagtaacgggatcctgatttttggcaaacaaaatgctgccagagacaatgcggattacagcgatgtcatgctcaccagcgaggaagaaatcaaaaccactaaccctgtggctacagaggaatacggtatcgtggcagataacttgcagcagcaaaacacggctcctcaaattggaactgtcaacagccagggggccttacccggtatggtctggcagaaccgggacgtgtacctgcagggtcccatctgggccaagattcctcacacggacggcaacttccacccgtctccgctgatgggcggctttggcctgaaacatcctccgcctcagatcctgatcaagaacacgcctgtacctgcggatcctccgaccaccttcaaccagtcaaagctgaactctttcatcacgcaatacagcaccggacaggtcagcgtggaaattgaatgggagctgcagaaggaaaacagcaagcgctggaaccccgagatccagtacacctccaactactacaaatctacaagtgtggactttgctgttaatacagaaggcgtgtactctgaaccccaccccattggcacccgttacctcacccgtcccctgtaa

SEQ ID NO: 1677 - DNA, 2211 bp, Artificial Sequence
  Description of Artificial Sequence: Synthetic polynucleotide
atggctgccgatggttatcttccagattggctcgaggacaacctctctgagggcattcgcgagtggtgggacttgaaacctggagccccgaagcccaaagccaaccagcaaaagcaggacgacggccggggtctggtgcttcctggctacaagtacctcggacccttcaacggactcgacaagggggagcccgtcaacgcggcggacgcagcggccctcgagcacgacaaggcctacgaccagcagctcaaagcgggtgacaatccgtacctgcggtataaccacgccgacgccgagtttcaggagcgtctgcaagaagatacgtcttttgggggcaacctcgggcgagcagtcttccaggccaagaagcgggttctcgaacctctcggtctggttgaggaaggcgctaagacggctcctggaaagaaacgtccggtagagcagtcgccacaagagccagactcctcctcgggcatcggcaagaaaggccaacagcccgccagaaaaagactcaattttggtcagactggcgactcagagtcagttccagaccctcaacctctcggagaacctcccgcagccccctcaggtgtgggatctcttacaatggcttcaggcggtggcgcaccaatggcagacaataacgaaggcgccgacggagtgggtaatgcctcaggaaattggcattgcgattccacatggctgggcgacagagtcatcaccaccagcacccgaacatgggccttgcccacttacaacaaccatctctacaagcaaatctccagtgcttcaacgggggccagcaacgacaaccactacttcggctacagcaccccctgggggtattttgatttcaacagattccactgccacttttcaccacgtgactggcaaagactcatcaacaacaactggggattccgacccaagagactcaacttcaagctctttaacattcaagtcaaagaggtcacgcagaatgaaggcaccaagaccatcgccaataaccttaccagcacggtccaggtcttcacggactcagactatcagctcccgtacgttctcggctccgcccaccagggctgcctgcctccgttcccggcggacgtgttcatgattccccagtacggctacctaacactcaacaacggtagtcaggccgtgggacgctcctccttctactgcctggaatactttccttcgcagatgctgagaaccggcaacaacttccagtttacttacacctttgaggacgttcctttccacagcagctacgctcacagccagagtctggaccgtctcatgaatcctctgattgaccagtacctgtactacttgtctcggactcaaacaacaggaggcacggcaaatacgcagactctgggcttcagccaaggtgggcctaatacaatggccaatcaggcaaagaactggctgccaggaccctgttaccgccaacaacgcgtctcaacgacaaccgggcaaaacaacaatagcaactttgcctggactgctggaaccaaataccatctgaatggaagaaattcattgtctaatcctggcatcgctatggcgacacacaaagacgacaaggagcgtttttttcccagtaacgggatcctgatttttggcaaacaaaatgctgccagagacaatgcggattacagcgatgtcatgctcaccagcgaggaagaaatcaaaaccactaaccctgtggctacagaggaatacggtatcgtggcagataacttgcagcagcaaaacacggctcctcaaattggaactgtcaacagccagggggccttacccggtatggtctggcagaaccgggacatgtacctgcagggtcccatctgggccaagattcctcacacggacggcaacttccacccgtctccgctgatgggcggctttggcctgaaacatcctccgcctcagatcctgatcaagaacacgcctgtacctgcggatcctccgaccaccttcaaccagtcaaagctgaactctttcatcacgcaatacagcaccggacaggtcagcgtggaaattgaatgggagctgcagaaggaaaacagcaagcgctggaaccccgagatccagtacacctccaactactacaaatctacaagtgtggactttgctgttaatacagaaggcgtgtactctgaaccccaccccattggcacccgttacctcacccgtcccctgtaa

SEQ ID NO: 1678 - DNA, 2211 bp, Artificial Sequence
  Description of Artificial Sequence: Synthetic polynucleotide
atggctgccgatggttatcttccagattggctcgaggacaacctctctgagggcattcgcgagtggtgggcgctgaaacctggagccccgaagcccaaagccaaccagcaaaagcaggacgacggccggggtctggtgcttcctggctacaagtacctcggacccttcaacggactcgacaagggggagcccgtcaacgcggcggatgcagcggccctcgagcacgacaaggcctacgaccagcagctcaaagcgggtgacaatccgtacctgcggtataaccacgccgacgccgagtttcaggagcgtctgcaggaagatacgtcttttgggggcaacctcgggcgagcagtcttccaggccaagaagagggttctcgaaccttttggtctggttgaggaaggcgctaagacggctcctggaaagaaacgtccggtagagcagtcgccacaagagccagactcctcctcgggcatcggcaagacaggccagcagcccgctaaaaagagactcaattttggtcagactggcggctcagagtcagtccccgacccacaacctctcggagaacctccagcaacccccgctgctgtgggacctactacaatggctgcaggcggtggcgcaccaatggcagacaataacgaaggcgccgacggagtgggtagttcctcgggaaattggcattgcgattccacatggctgggcgacagagtcatcaccaccagcaccagaacctgggccttgcccacctataacaaccacctctacaagcaaatctccagtgcttcaacgggggccagcaacgacaaccactacttcggctacagcaccccctgggggtattttgatttcaacagattccactgccatttctcaccacgtgactggcagcgactcatcaacaacaactggggattccggcccaagagactcaacttcaaactcttcaacattcaggtcaaagaggttacggacaacaatggagtcaagaccatcgccaataaccttaccagcacggtccaggtgtttacggactcggagtaccagctgccgtacgttctcggctctgcccaccagggctgcctccctccgttcccggcggacgtgttcatgattccgcagtacggctacctaacgctcaacaatggcagccaggcagtgggacggtcatccttttactgcctggaatatttcccttctcagatgctgagaacgggcaacaactttaccttcagctacacctttgaggaagtgcctttccacagcagctacgcgcacagccagagcctggaccggctgatgaatcctctgattgaccagtacctgtactacttgtctcggactcaaacaacaggaggcacggcaaatacgcagactctgggcttcagccaaggtgggcctaatacaatggccaatcaggcaaagaactggctgccaggaccctgttaccgccaacaacgcgtctcaacgacaaccgggcaaaacaacaatagcaactttgcctggactgctgggaccaaataccatctgaatggaagaaattcattggctaatcctggcatcgctatggcctcacacaaagacgacaaggagcgtttttttcccagtaacgggatcctgatttttggcaaacaaaatgctgccagagacaatgcggattacagcgatgtcatgctcaccagcgaggaagaaatcaaaaccactaaccctgtggctacagaggaatacggtatcgtggcagataacttgcagcagcaaaacacggctcctcaaattggaactgtcaacagccagggggccttacccggtatggtctggcagaaccgggacgtgtacctgcagggtcccatctgggccaagattcctcacacggacggcaacttccacccgtctccgctgatgggcggctttggcctgaaacatcctccgcctcagatcctgatcaagaacacgcctgtacctgcggatcctccgaccaccttcaaccagtcaaagctgaactctttcatcacgcaatacagcaccggacaggtcagcgtggaaattgaatgggagctgcagaaggaaaacagcaagcgctggaaccccgagatccagtacacctccaactactacaaatctacaagtgtggactttgctgttaatacagaaggcgtgtactctgaaccccaccccattggcacccgttacctcacccgtcccctgtaa

SEQ ID NO: 1679 - protein, 736 aa, Artificial Sequence
  Description of Artificial Sequence: Synthetic polypeptide
MAADGYLPDWLEDTLSEGIRQWWKLKPGPPPPKPAERHKDDSRGLVLPGYKYLGPFNGLDKGEPVNEADAAALEHDKAYDQQLKAGDNPYLKYNHADAEFQERLKEDTSFGGNLGRAVFQAKKRVLEPLGLVEEGAKTAPGKKRPVEQSPQEPDSSSGIGKTGQQPAKKRLNFGQTGDSESVPDPQPLGEPPATPAAVGPTTMASGGGAPMADNNEGADGVGSSSGNWHCDSQWLGDRVITTSTRTWALPTYNNHLYKQISSASTGASNDNHYFGYSTPWGYFDFNRFHCHFSPRDWQRLINNNWGFRPKRLNFKLFNIQVKEVTQNEGTKTIANNLTSTIQVFTDSEYQLPYVLGSAHQGCLPPFPADVFMIPQYGYLTLNNGSQAVGRSSFYCLEYFPSQMLRTGNNFQFTYTFEDVPFHSSYAHSQSLDRLMNPLIDQYLYYLSRTQTTGGTANTQTLGFSQGGPNTMANQAKNWLPGPCYRQQRVSTTTGQNNNSNFAWTAGTKYHLNGRNSLANPGIAMATHKDDKERFFPSNGILIFGKQNAARDNADYSDVMLTSEEEIKTTNPVATEEYGIVADNLQQQNTAPQIGTVNSQGALPGMVWQNRDVYLQGPIWAKIPHTDGNFHPSPLMGGFGLKHPPPQILIKNTPVPADPPTTFNQSKLNSFITQYSTGQVSVEIEWELQKENSKRWNPEIQYTSNYYKSTSVDFAVNTEGVYSEPHPIGTRYLTRPL

SEQ ID NO: 1680 - protein, 736 aa, Artificial Sequence
  Description of Artificial Sequence: Synthetic polypeptide
MAADGYLPDWLEDNLSEGIREWWALKPGAPKPKANQQKQDDGRGLVLPGYKYLGPFNGLDKGEPVNAADAAALEHDKAYDQQLKAGDNPYLKYNHADAEFQERLKEDTSFGGNLGRAVFQAKKRLLEPLGLVEEAAKTAPGKKRPVEQSPQEPDSSAGIGKSGAQPAKKRLNFGQTGDSESVPDPQPLGEPPATPAAVGPTTMASGGGAPMADNNEGADGVGNASGNWHCDSTWLGDRVITTSTRTWALPTYNNHLYKQISSASTGASNDNHYFGYSTPWGYFDFNRFHCHFSPRDWQRLINNNWGFRPKRLNFKLFNIQVKEVTQNEGTKTIANNLTSTIQVFTDSEYQLPYVLGSAHQGCLPPFPADVFMIPQYGYLTLNNGSQAVGRSSFYCLEYFPSQMLRTGNNFQFTYTFEDVPFHSSYAHSQSLDRLMNPLIDQYLYYLSRTQTTGGTANTQTLGFSQGGPNTMANQAKNWLPGPCYRQQRVSTTTGQNNNSNFAWTAGTKYHLNGRNSLANPGIAMATHKDDKERFFPSNGILIFGKQNAARDNADYSDVMLTSEEEIKATNPVATEEYGIVADNLQQQNTAPQIGTVNSQGALPGMVWQNRDVYLQGPIWAKIPHTDGNFHPSPLMGGFGLKHPPPQILIKNTPVPADPPTTFNQSKLNSFITQYSTGQVSVEIEWELQKENSKRWNPEIQYTSNYYKSTSVDFAVNTEGVYSEPHPIGTRYLTRPL

SEQ ID NO: 1681 - protein, 737 aa, Artificial Sequence
  Description of Artificial Sequence: Synthetic polypeptide
MAADGYLPDWLEDNLSEGIREWWDLKPGAPKPKANQQKQDDGRGLVLPGYKYLGPFNGLDKGEPVNAADAAALEHDKAYDQQLKAGDNPYLRYNHADAEFQERLQEDTSFGGNLGRAVFQAKKRVLEPLGLVEEGANTAPGKKRPVEQSPQEPDSSAGIGKSGAQPAKKRLNFGQTGDTESVPDPQPIGEPPAAPSGVGSLTMASGGGAPVADNNEGADGVGSSSGNWHCDSQWLGDRVITTSTRTWALPTYNNHLYKQISNSTSGGSSNDNAYFGYSTPWGYFDFNRFHCHFSPRDWQRLINNNWGFRPKRLNFKLFNIQVKEVTDNNGVKTIANNLTSTIQVFTDSEYQLPYVLGSAHQGCLPPFPADVFMIPQYGYLTLNNGSQAVGRSSFYCLEYFPSQMLRTGNNFQFTYTFEDVPFHSSYAHSQSLDRLMNPLIDQYLYYLSRTQTTGGTANTQTLGFSQGGPNTMANQAKNWLPGPCYRQQRVSTTTGQNNNSNFAWTAGTKYHLNGRNSLANPGIAMASHKDDKERFFPSNGILIFGKQNAARDNADYSDVMLTSEEEIKTTNPVATEEYGIVADNLQQQNTAPQIGTVNSQGALPGMVWQNRDVYLQGPIWAKIPHTDGNFHPSPLMGGFGLKHPPPQILIKNTPVPADPPTTFNQSKLNSFITQYSTGQVSVEIEWELQKENSKRWNPEIQYTTNYYKSTSVDFAVNTEGVYSEPHPIGTRYLTRPL

SEQ ID NO: 1682 - protein, 736 aa, Artificial Sequence
  Description of Artificial Sequence: Synthetic polypeptide
MAADGYLPDWLEDNLSEGIREWWALKPGAPKPKANQQKQDDGRGLVLPGYKYLGPFNGLDKGEPVNEADAAALEHDKAYDQQLKAGDNPYLRYNHADAEFQERLQEDTSFGGNLGRAVFQAKKRVLEPLGLVEEGAKTAPGKKRPVEQSPQEPDSSSGIGKTGQQPAKKRLNFGQTGDSESVPDPQPLGEPPATPAAVGPTTMASGGGAPMADNNEGADGVGNASGNWHCDSTWLGDRVITTSTRTWALPTYNNHLYKQISSASTGASNDNHYFGYSTPWGYFDFNRFHCHFSPRDWQRLINNNWGFRPKRLNFKLFNIQVKEVTQNEGTKTIANNLTSTIQVFTDSEYQLPYVLGSAHQGCLPPFPADVFMIPQYGYLTLNNGSQAVGRSSFYCLEYFPSQMLRTGNNFQFTYTFEDVPFHSSYAHSQSLDRLMNPLIDQYLYYLSRTQTTGGTANTQTLGFSQGGPNTMANQAKNWLPGPCYRQQRVSTTTGQNNNSNFAWTAGTKYHLNGRNSLANPGIAMATHKDDKERFFPSNGILIFGKQNAARDNADYSDVMLTSEEEIKTTNPVATEEYGIVADNLQQQNTAPQIGTVNSQGALPGMVWQNRDVYLQGPIWAKIPHTDGNFHPSPLMGGFGLKHPPPQILIKNTPVPADPPTTFNQSKLNSFITQYSTGQVSVEIEWELQKENSKRWNPEIQYTSNYYKSTSVDFAVNTEGVYSEPHPIGTRYLTRPL

SEQ ID NO: 1683 - protein, 736 aa, Artificial Sequence
  Description of Artificial Sequence: Synthetic polypeptide
MAADGYLPDWLEDNLSEGIREWWALKPGAPKPKANQQKQDDGRGLVLPGYKYLGPFNGLDKGEPVNEADAAALEHDKAYDQQLKAGDNPYLRYNHADAEFQERLQEDTSFGGNLGRAVFQAKKRVLEPFGLVEEGAKTAPGKKRPVEQSPQEPDSSSGIGKTGQQPAKKRLNFGQTGDSESVPDPQPLGEPPATPAAVGPTTMASGGGAPMADNNEGADGVGNASGNWHCDSQWLGDRVITTSTRTWALPTYNNHLYKQISSASTGASNDNHYFGYSTPWGYFDFNRFHCHFSPRDWQRLINNNWGFRPKRLNFKLFNIQVKEVTDNNGVKTIANNLTSTVQVFSDSEYQLPYVLGSAHQGCLPPFPADVFMIPQYGYLTLNNGSQAVGRSSFYCLEYFPSQMLRTGNNFQFTYTFEDVPFHSSYAHSQSLDRLMNPLIDQYLYYLSRTQTTGGTANTQTLGFSQGGPNTMANQAKNWLPGPCYRQQRVSTTTGQNNNSNFAWTAGTKYHLNGRNSLANPGIAMATHKDDKERFFPSNGILIFGKQNAARDNADYSDVMLTSEEEIKTTNPVATEEYGIVADNLQQQNTAPQIGTVNSQGALPGMVWQNRDVYLQGPIWAKIPHTDGNFHPSPLMGGFGLKHPPPQILIKNTPVPADPPTTFNQSKLNSFITQYSTGQVSVEIEWELQKENSKRWNPEIQYTSNYYKSTSVDFAVNTEGVYSEPHPIGTRYLTRPL

SEQ ID NO: 1684 - protein, 736 aa, Artificial Sequence
  Description of Artificial Sequence: Synthetic polypeptide
MAADGYLPDWLEDTLSEGIRQWWKLKPGPPPPKPAERHKDDSRGLVLPGYKYLGPFNGLDKGEPVNEADAAALEHDKAYDRQLDSGDNPYLKYNHADAEFQERLKEDTSFGGNLGRAVFQAKKRVLEPFGLVEEGAKTAPGKKRPVEQSPQEPDSSSGIGKTGQQPAKKRLNFGQTGDSESVPDPQPLGEPPATPAAVGPTTMASGGGAPMADNNEGADGVGNASGNWHCDSTWLGDRVITTSTRTWALPTYNNHLYKQISSASTGASNDNHYFGYSTPWGYFDFNRFHCHFSPRDWQRLINNNWGFRPKRLNFKLFNIQVKEVTDNNGVKTIANNLTSTVQVFTDSDYQLPYVLGSAHEGCLPPFPADVFMIPQYGYLTLNNGSQAVGRSSFYCLEYFPSQMLRTGNNFQFTYTFEDVPFHSSYAHSQSLDRLMNPLIDQYLYYLSRTQTTGGTANTQTLGFSQGGPNTMANQAKNWLPGPCYRQQRVSTTTGQNNNSNFAWTAGTKYHLNGRNSLANPGIAMATHKDDKERFFPSNGILIFGKQNAARDNADYSDVMLTSEEEIKTTNPVATEEYGIVADNLQQQNTAPQIGTVNSQGALPGMVWQNRDVYLQGPIWAKIPHTDGNFHPSPLMGGFGLKHPPPQILIKNTPVPADPPTTFNQSKLNSFITQYSTGQVSVEIEWELQKENSKRWNPEIQYTSNYYKSTSVDFAVNTEGVYSEPHPIGTRYLTRNL

SEQ ID NO: 1685 - protein, 738 aa, Artificial Sequence
  Description of Artificial Sequence: Synthetic polypeptide
MAADGYLPDWLEDNLSEGIREWWDLKPGAPKPKANQQKQDDGRGLVLPGYKYLGPFNGLDKGEPVNAADAAALEHDKAYDQQLQAGDNPYLRYNHADAEFQERLQEDTSFGGNLGRAVFQAKKRVLEPLGLVEEGAKTAPGKKRPVEPSPQRSPDSSTGIGKKGQQPARKRLNFGQTGDSESVPDPQPLGEPPAAPSGVGPNTMAAGGGAPMADNNEGADGVGSSSGNWHCDSQWLGDRVITTSTRTWALPTYNNHLYKQISNSTSGGSSNDNAYFGYSTPWGYFDFNRFHCHFSPRDWQRLINNNWGFRPKRLSFKLFNIQVKEVTQNEGTKTIANNLTSTIQVFTDSEYQLPYVLGSAHQGCLPPFPADVFMIPQYGYLTLNNGSQAVGRSSFYCLEYFPSQMLRTGNNFTFSYTFEDVPFHSSYAHSQSLDRLMNPLIDQYLYYLSRTQTTGGTANTQTLGFSQGGPNTMANQAKNWLPGPCYRQQRVSTTTGQNNNSNFAWTAGTKYHLNGRNSLANPGIAMATHKDDKERFFPSNGILIFGKQNAARDNADYSDVMLTSEEEIKTTNPVATEEYGIVADNLQQQNTAPQIGTVNSQGALPGMVWQNRDVYLQGPIWAKIPHTDGNFHPSPLMGGFGLKHPPPQILIKNTPVPADPPTTFNQSKLNSFITQYSTGQVSVEIEWELQKENSKRWNPEIQYTSNYYKSTSVDFAVNTEGVYSEPHPIGTRYLTRPL

SEQ ID NO: 1686 - protein, 737 aa, Artificial Sequence
  Description of Artificial Sequence: Synthetic polypeptide
MAADGYLPDWLEDNLSEGIREWWDLKPGAPKPKANQQKQDDGRGLVLPGYKYLGPFNGLDKGEPVNAADAAALEHDKAYDQQLKAGDNPYLRYNHADAEFQERLQEDTSFGGNLGRAVFQAKKRVLEPFGLVEEGAKTAPGKKRPVEQSPQEPDSSSGIGKTGQQPAKKRLNFGQTGDSESVPDPQPLGEPPATPAAVGPTTMASGGGAPMQDNNEGADGVGSSSGNWHCDSTWLGDRVITTSTRTWALPTYNNHLYKQISNGTSGGATNDNTYFGYSTPWGYFDFNRFHCHFSPRDWQRLINNNWGFRPKRLNFKLFNIQVKEVTQNEGTKTIANNLTSTIQVFTDSEYQLPYVLGSAHQGCLPPFPADVFMIPQYGYLTLNNGSQAVGRSSFYCLEYFPSQMLRTGNNFTFSYTFEDVPFHSSYAHSQSLDRLMNPLIDQYLYYLSRTQTTGGTANTQTLGFSQGGPNTMANQAKNWLPGPCYRQQRVSTTTGQNNNSNFAWTAGTKYHLNGRNSLANPGIAMATHKDDKERFFPSNGILIFGKQNAARDNADYSDVMLTSEEEIKTTNPVATEEYGIVADNLQQQNTAPQIGTVNSQGALPGMVWQNRDVYLQGPIWAKIPHTDGNFHPSPLMGGFGLKHPPPQILIKNTPVPADPPTTFNQSKLNSFITQYSTGQVSVEIEWELQKENSKRWNPEIQYTSNYYKSTSVDFAVNTEGVYSEPHPIGTRYLTRPL

SEQ ID NO: 1687 - protein, 736 aa, Artificial Sequence
  Description of Artificial Sequence: Synthetic polypeptide
MAADGYLPDWLEDNLSEGIREWWALKPGAPKPKANQQKQDDGRGLVLPGYKYLGPFNGLDKGEPVNAADAAALEHDKAYDQQLKAGDNPYLRYNHADAEFQERLQEDTSFGGNLGRAVFQAKKRVLEPLGLVEEGAKTAPGKKRPVEQSPQEPDSSSGIGKTGQQPAKKRLNFGQTGDSESVPDPQPLGEPPATPAAVGPTTMASGGGAPMADNNEGADGVGSSSGNWHCDSTWLGDRVITTSTRTWALPTYNNHLYKQISSASTGASNDNHYFGYSTPWGYFDFNRFHCHFSPRDWQRLINNNWGFRPKRLNFKLFNIQVKEVTDNNGVKTIANNLTSTVQVFTDSDYQLPYVLGSAHEGCLPPFPADVFMIPQYGYLTLNNGSQAVGRSSFYCLEYFPSQMLRTGNNFTFSYTFEDVPFHSSYAHSQSLDRLMNPLIDQYLYYLSRTQTTGGTANTQTLGFSQGGPNTMANQAKNWLPGPCYRQQRVSTTTGQNNNSNFAWTAGTKYHLNGRNSLANPGIAMATHKDDKERFFPSNGILIFGKQNAARDNADYSDVMLTSEEEIKTTNPVATEEYGIVADNLQQQNTAPQIGTVNSQGALPGMVWQNRDVYLQGPIWAKIPHTDGNFHPSPLMGGFGLKHPPPQILIKNTPVPADPPTTFNQSKLNSFITQYSTGQVSVEIEWELQKENSKRWNPEIQYTSNYYKSTSVDFAVNTEGVYSEPHPIGTRYLTRPL

SEQ ID NO: 1688 - protein, 737 aa, Artificial Sequence
  Description of Artificial Sequence: Synthetic polypeptide
MAADGYLPDWLEDNLSEGIREWWDLKPGAPKPKANQQKQDDGRGLVLPGYKYLGPFNGLDKGEPVNAADAAALEHDKAYDQQLKAGDNPYLRYNHADAEFQERLQEDTSFGGNLGRAVFQAKKRVLEPLGLVEEGAKTAPGKKRPVEPSPQRSPDSSTGIGKKGQQPARKRLNFGQTGDSESVPDPQPLGEPPATPAAVGPTTMASGGGAPMADNNEGADGVGNASGNWHCDSTWLGDRVITTSTRTWALPTYNNHLYKQISSASTGASNDNHYFGYSTPWGYFDFNRFHCHFSPRDWQRLINNNLGSRPKRLNFKLFIIQVKEVTTNDGVTTIANNLTSTVQVFSDSEYQLPYVLGSAHQGCLPPFPADVFMIPQYGYLTLNNGSQAVGRSSFYCLEYFPSQMLRTGNNFTFSYTFEDVPFHSSYAHSQSLDRLMNPLIDQYLYYLNRTQNQSGSAQNKDLLFSRGSPAGMSVQPKNWLPGPCYRQQRVSKTKTDNNNSNFTWTGASKYNLNGRESIINPGTAMASHKDDKDKFFPMSGVMIFGKESAGASNTALDNVMITDEEEIKATNPVATERFGTVAVNLQSSSTDPATGDVHVMGALPGMVWQDRDVYLQGPIWAKIPHTDGHFHPSPLMGGFGLKHPPPQILIKNTPVPANPPAEFSATKFASFITQYSTGQVSVEIEWELQKENSKRWNPEVQYTSNYAKSANVDFTVDNNGLYTEPRPIGTRYLTRPL

SEQ ID NO: 1689 - protein, 736 aa, Artificial Sequence
  Description of Artificial Sequence: Synthetic polypeptide
MAADGYLPDWLEDNLSEGIREWWALKPGAPKPKANQQKQDDGRGLVLPGYKYLGPFNGLDKGEPVNAADAAALEHDKAYDQQLKAGDNPYLRYNHADAEFQERLQEDTSFGGNLGRAVFQAKKRLLEPLGLVEEAAKTAPGKKRPVEQSPQEPDSSSGIGKTGQQPAKKRLNFGQTGDSESVPDPQPIGEPPATPAAVGPTTMASGGGAPMADNNEGADGVGNSSGNWHCDSTWLGDRVITTSTRTWALPTYNNHLYKQISSASTGASNDNHYFGYSTPWGYFDFNRFHCHFSPRDWQRLINNNWGFRPKRLNFKLFNIQVKEVTQNEGTKTIANNLTSTIQVFTDSEYQLPYVLGSAHQGCLPPFPADVFMIPQYGYLTLNNGSQAVGRSSFYCLEYFPSQMLRTGNNFTFSYTFEDVPFHSSYAHSQSLDRLMNPLIDQYLYYLSRTQTTGGTANTQTLGFSQGGPNTMANQAKNWLPGPCYRQQRVSTTTGQNNNSNFAWTAGTKYHLNGRNSLANPGIAMATHKDDKERFFPSNGILIFGKQNAARDNADYSDVMLTSEEEIKTTNPVATEEYGIVADNLQQQNTAPQIGTVNSQGALPGMVWQNRDVYLQGPIWAKIPHTDGNFHPSPLMGGFGLKHPPPQILIKNTPVPADPPTTFNQSKLNSFITQYSTGQVSVEIEWELQKENSKRWNPEIQYTSNYYKSTSVDFAVNTEGVYSDPHPIGTRYLTRPL

SEQ ID NO: 1690 - protein, 736 aa, Artificial Sequence
  Description of Artificial Sequence: Synthetic polypeptide
MAADGYLPDWLEDNLSEGIREWWALKPGAPKPKANQQEQDDGRGLVLPGYKYLGPFNGLDKGEPVNAADAAALEHDKAYDQQLKAGDNPYLRYNHADAEFQERLQEDTSFGGNLGRAVFQAKKRVLEPFGLVEEGAKTAPGKKRPVEQSPQEPDSSSGIGKTGQQPAKKRLNFGQTGDSESVPDPQPLGEPPAAPSGVGPNTMAAGGGAPMADNNEGADGVGSSSGNWHCDSTWLGDRVITTSTRTWALPTYNNHLYKQISSASTGASNDNHYFGYSTPWGYFDFNRFHCHFSPRDWQRLINNNWGFRPKRLNFKLFNIQVKEVTQNEGTKTIANNLTSTIQVFTDSEYQLPYVLGSAHQGCLPPFPADVFMIPQYGYLTLNNGSQAVGRSSFFCLEYFPSQMLRTGNNFTFSYTFEDVPFHSSYAHSQSLDRLMNPLIDQYLYYLSRTQTTGGTANTQTLGFSQGGPNTMANQAKNWLPGPCYRQQRVSTTTGQNNNSNFAWTAGTKYHLNGRNSLANPGIAMATHKDDKERFFPSNGILIFGKQNAARDNADYSDVMLTSEEEIKTTNPVATEEYGIVADNLQQQNTAPQIGTVNSQGALPGMVWQNRDVYLQGPIWAKIPHTDGNFHPSPLMGGFGLKHPPPQILIKNTPVPADPPTTFNQSKLNSFITQYSTGQVSVEIEWELQKENSKRWNPEIQYTSNYYKSTSVDFAVNTEGVYSEPHPIGTRYLTRPL

SEQ ID NO: 1691 - protein, 736 aa, Artificial Sequence
  Description of Artificial Sequence: Synthetic polypeptide
MAADGYLPDWLEDNLSEGIREWWDLKPGAPKPKANQQKQDDGRGLVLPGYKYLGPFNGLDKGEPVNAADAAALEHDKAYDQQLKAGDNPYLRYNHADAEFQERLQEDTSFGGNLGRAVFQAKKRVLEPLGLVEEGAKTAPGKKRPVEQSPQEPDSSSGIGKTGQQPAKKRLNFGQTGDSESVPDPQPLGEPPATPAAVGPTTMASGGGAPMADNNEGADGVGNASGNWHCDSTWLGDRVITTSTRTWALPTYNNHLYKQISSASTGASNDNHYFGYSTPWGYFDFNRFHCHFSPRDWQRLINNNWGFRPKRLNFKLFNIQVKEVTTNDGVTTIANNLTSTVQVFSDSEYQLPYVLGSAHQGCLPPFPADVFMIPQYGYLTLNNGSQAVGRSSFYCLEYFPSQMLRTGNNFTFSYTFEDVPFHSSYAHSQSLDRLMNPLIDQYLYYLNRTQNQSGSAQNKDLLFSRGSPAGMSVQPKNWLPGPCYRQQRVSKTKTDNNNSNFTWTGASKYNLNGRESIINPGTAMASHKDDKDKFFPMSGVMIFGKESAGASNTALDNVMITDEEEIKATNPVATERFGTVAVNLQNSSTDPATGDVHVMGALPGMVWQDRDVYLQGPIWAKIPHTDGHFHPSPLMGGFGLKHPPPQILIKNTPVPANPPAEFSATKFASFITQYSTGQVSVEIEWELQKENSKRWNPEVQYTSNYAKSANVDFTVDNNGLYTVPRPIGTRYLTRPL

SEQ ID NO: 1692 - protein, 736 aa, Artificial Sequence
  Description of Artificial Sequence: Synthetic polypeptide
MAADGYLPDWLEDNLSEGIREWWALKPGAPKPKANQQKQDDGRGLVLPGYKYLGPFNGLDKGEPVNAADAAALEHDKAYDQQLKAGDNPYLRYNHADAEFQERLQEDTSFGGNLGRAVFQAKKRLLEPLGLVEEGAKTAPGKKRPVEQSPQEPDSSSGIGKTGEQPAKKRLNFGQTGDSESVPDPQPLGEPPATPAAVGPTTMASGGGAPMADNNEGADGVGSASGNWHCDSTWLGDRVITTSTRTWALPTYNNHLYKQISSASTGASNDNHYFGYSTPWGYFDFNRFHCHFSPRDWQRLINNNWGFRPKRLNFKLFNIQVKEVTDNNGVKTIANNLTSTIQVFTDSEYQLPYVLGSAHQGCLPPFPADVFMIPQYGYLTLNNGSQAVGRSSFYCLEYFPSQMLRTGNNFPFSYTFEDVPFHSSYAHSQSLDRLMNPLIDQYLYYLSRTQTTGGTANTQTLGFSQGGPNTMANQAKNWLPGPCYRQQRVSTTTGQNNNSNFAWTAGTKYHLNGRNSLANPGIAMATHKDDKERFFPSNGILIFGKQNAARDNADYSDVMLTSEEEIKTTNPVATEEYGIVADNLQQQNTAPQIGTVNSQGALPGMVWQNRDVYLQGPIWAKIPHTDGNFHPSPLMGGFGLKHPPPQILIKNTPVPADPPTTFNQSKLNSFITQYSTGQVSVEIEWELQKENSKRWNPEIQYTSNYYKSTSVDFAVNTEGVYSEPHPIGTRYLTRPL

SEQ ID NO: 1693 - protein, 736 aa, Artificial Sequence
  Description of Artificial Sequence: Synthetic polypeptide
MAADGYLPDWLEDNLSEGIREWWALKPGAPKPKANQQKQDDGRGLVLPGYKYLGPFNGLDKGEPVNAADAAALEHDKAYDQQLKAGDNPYLRYNHADAEFQERLQEDTSFGGNLGRAVFQAKKRVLEPLGLVEEGAKTAPGKKRPVEQSPQEPDSSSGIGKTGQQPAKKRLNFGQTGDSESVPDPQPLGEPPATPAAVGPTTMASGGGAPMADNNEGADGVGSSSGNWHCDSQWLGDRVITTSTRTWALPTYNNHLYKQISSASTGASNDNHYFGYSTPWGYFDFNRFHCHFSPRDWQRLINNNWGFRPKRLNFKLFNIQVKEVTDNNGVKTIANNLTSTVQVFTDSEYQLPYVLGSAHQDCLPPFPADVFMIPQYGYLTLNNGSQAVGRSSFYCLEYFPSQMLRTGNNFTFSYTFEDVPFHSSYAHSQSLDRLMNPLIDQYLYYLSRTQTTGGTANTQTLGFSQGGPNTMANQAKNWLPGPCYRQQRVSTTTGQNNNSNFAWTAGTKYHLNGRNSLANPGIAMATHKDDKERFFPSNGILIFGKQNAARDNADYSDVMLTSEEEIKTTNPVATEEYGIVADNLQQQNTAPQIGTVNSQGALPGMVWQNRDVYLQGPIWAKIPHTDGNFHPSPLMGGFGLKHPPPQILIKNTPVPADPPTTFNQSKLNSFITQYSTGQVSVEIEWELQKENSKRWNPEIQYTSNYYKSTSVDFAVNTEGVYSEPHPIGTRYLTRPL

SEQ ID NO: 1694 - protein, 735 aa, Artificial Sequence
  Description of Artificial Sequence: Synthetic polypeptide
MAADGYLPDWLEDNLSEGIREWWDLKPGAPKPKANQQKQDDGRGLVLPGYKYLGPFNGLDKGEPVNAADAAALEHDKAYDQQLKAGDNPYLRYNHADAEFQERLQEDTSFGGNLGRAVFQAKKRVLEPLGLVEEGAKTAPGKKRPVEQSPQEPDSSSGIGKTGQQPAKKRLNFGQTGDSESVPDPQPLGEPPATPAAVGPTTMASGGGAPMADNNEGADGVGNASGNWHCDSTWLGDVITTSTRTWALPTYNNHLYKQISSASTGASNDNHYFGYSTPWGYFDFNRFHCHFSPRDWQRLINNNWGFRPKRLNFKLFNIQVKEVTQNEGTKTIANNLTSTIQVFTDSEYQLPYVLGSAHQGCLPPFPADVFMIPQYGYLTLNNGSQAVGRSSFYCLEYFPSQMLRTGNNFQFTYTFEDVPFHSSYAHSQSLDRLMNPLIDQYLYYLSRTQTTGGTANTQTLGFSQGGPNTMANQAKNWLPGPCYRQQRVSTTTGQNNNSNFAWTAGTKYHLNGRNSLANPGIAMATHKDDKERFFPSNGILIFGKQNAARDNADYSDVILTSEEEIKTTNPVATEEYGIVADNLQQQNTAPQIGTVNSQGALPGMVWQNRDVYLQGPIWAKIPHTDGNFHPSPLMGGFGLKHPPPQILIKNTPVPADPPTTFNQSKLNSFITQYSTGQVSVEIEWELQKENSKRWNPEIQYTSNYYKSTSVDFAVNTEGVYSEPHPIGTRYLTRPL

SEQ ID NO: 1695 - protein, 736 aa, Artificial Sequence
  Description of Artificial Sequence: Synthetic polypeptide
MAADGYLPDWLEDTLSEGIRQWWKLKPGPPPPKPAERHKDDSRGLVLPGYKYLGPFNGLDKGEPVNEADAAALEHDKAYDRQLDSGDNPYLKYNHADAEFQERLKEDTSFGGNLGRAVFQAKKRVLEPFGLVEEGAKTAPGKKRPVEQSPQEPDSSSGIGKTGQQPAKKRLNFGQTGDSESVPDPQPLGEPPATPAAVGPTTMASGGGAPMADNNEGADGVGNASGNWHCDSTWLGDRVITTSTRTWALPTYNNHLYKQISSTSTGASNDNHYFGYSTPWGYFDFNRFHCHFSPRDWQRLINNNWGFRPKRLNFKLFNIQVKEVTDNNGVKTIANNLTSTVQVFTDSEYQLPYVLGSAHQGCLPPFPADVFMIPQYGYLTLNNGSQAVGRSSFYCLEYFPSQMLRTGNNFTFSYTFEDVPFHSSYAHSQSLDRLMNPLIDQYLYYLSRTQTTGGTANTQTLGFSQGGPNTMANQAKNWLPGPCYRQQRVSTTTGQNNNSNFAWTAGTKYHLNGRNSLANPGIAMATHKDDKERFFPSNGILIFGKQNAARDNADYSDVMLTSEEEIKTTNPVATEEYGIVADNLQQQNTAPQIGTVNSQGALPGMVWQNRDVYLQGPIWAKIPHTDGNFHPSPLMGGFGLKHPPPQILIKNTPVPADPPTTFNQSKLNSFITQYSTGQVSVEIEWELQKENSKRWNPEIQYTSNYYKSTSVDFAVNTEGVYSEPHPIGTRYLTRPL

SEQ ID NO: 1696 - protein, 735 aa, Artificial Sequence
  Description of Artificial Sequence: Synthetic polypeptide
MAADGYLPDWLEDNLSEGIREWWDLKPGAPKPKANQQKQDDGRGLVLPGYKYLGPFNGLDKGEPVNAADAAALEHDKAYDRQLDSGDNPYLRYNHADAEFQERLKEDTSFGGNLGRAVFQAKKRVLEPFGLVEEGAKTAPGKKRPVEQSPQEPDSSSGIGKTGQQPAKKRLNFGQTGDSESVPDPQPLGEPPATPAAVGPTTMASGGGAPMADNNEGADGVGNASGNWHCDSTWLGDRVITTSTRTWALPTYNNHLYKQISSASTGASNDNHYFGYSTPWGYFDFNRFHCHFSPRDWQRLINNNWGFRPKRLNFKLFNIQVKEVTQNEGTKTIANNLTSTIQVFTDSEYQLPYVLGSAHQGCLPPFPADVFMIPQYGYLTLNNGSQAVGRSSFYCLEYFPSQMLRTGNNFQFTYTFEDVPFHSSYAHSQSLDRLMNPLIDQYLYYLSRTQTTGGTANTQTLGFSQGGPNTMANQAKNWLPGPCYRQQRVSTTTGQNNNSNFAWTAGTKYHLNGRNSLANPGIAMATHKDDRSVFFQYRDPDFGKQNAARDNADYSDVMLTSEEEIKTTNPVATEEYGIVADNLQQQNTAPQIGTVNSQGALPGMVWQNRDVYLQGPIWAKIPHTDGNFHPSPLMGGFGLKHPPPQILIKNTPVPADPPTTFNQSKLNSFITQYSTGQVSVEIEWELQKENSKRWNPEIQYTSNYYKSTSVDFAVNTEGVYSEPHPIGTRYLTRPL

SEQ ID NO: 1697 - protein, 736 aa, Artificial Sequence
  Description of Artificial Sequence: Synthetic polypeptide
MAADGYLPDWLEDNLSEGIREWWALKPGAPKPKANQQKQDDGRGLVLPGYKYLGPFNGLDKGEPVNAADAAALEHDKAYDQQLKAGDNPYLKYNHADAEFQERLQGDTSFGGNLGRAVFQAKKRVLEPLGLVEEAAKTAPGKKRPVEQSPQEPDSSAGIGKSGAQPAKKRLNFGQTGDTESVPDPQPLGEPPAAPSGVGPNTMAAGGGAPMADNNEGADGVGSSSGNWHCDSQWLGDRVITTSTRTWALPTYNNHLYKQISSASTGASNDNHYFGYSTPWGYFDFNRFHCHFSPRDWQRLINNNWGFRPKRLNFKLFNIQVKEVTDNNGVKTIANNLTSTVQVFTDSDYQLPYVLGSAHEGCLPPFPADVFMIPQYGYLTLNNGSQAVGRSSFYCLEYFPSQMLRTGNNFQFTYTFEDVPFHSSYAHSQSLDRLMNPLIDQYLYYLSRTQTTGGTANTQTLGFSQGGPNTMANQAKNWLPGPCYRQQRVSTTTGQNNNSNFAWTAGTKYHLNGRNSLANPGIAMATHKDDKERFFPSNGILIFGKQNAARDNADYSDVMLTSEEEIKTTNPVATEEYGIVADNLQQQNTAPQIGTVNSQGALPGMVWQNRDVYLQGPIWAKIPHTDGNFHPSPLMGGFGLKHPPPQILIKNTPVPADPPTTFNQSKLNSFITQYSTGQVSVEIEWELQKENSKRWNPEIQYTSNYYKSTSVDFAVNTEGVYSEPHPIGTRYLTRPL

SEQ ID NO: 1698 - protein, 736 aa, Artificial Sequence
  Description of Artificial Sequence: Synthetic polypeptide
MAADGYLPDWLEDTLSEGIRQWWKLKPGPPPPKPAERHKDDSRGLVLPGYKYLGPFNGLDKGEPVNEADAAALEHDKAYDRQLDSGDNPYLKYNHADAEFQERLKEDTSFGGNLGRAVFQAKKRVLEPFGLVEEAAKTAPGKKRPVEQSPQEPDSSSGIGKTGQQPAKKRLNFGQTGDSESVPDPQPLGEPPATPAAVGPTTMASGGGAPMADNNEGADGVGNASGNWHCDSTWLGDRVITTSTRTWALPTYNNHLYKQISSASTGASNDNHYFGYSTPWGYFDFNRFHCHFSPRDWQRLINNNWGFRPKRLNFKLFNIQVKEVTDNNGVKTIANNLTSTVQVFTDSDYQLPYVLGSAHEGCLPPFPADVFMIPQYGYLTLNNGSQAVGRSSFYCLEYFPSQMLRTGNNFTFSYTFEDVPFHSSYAHSQSLDRLMNPLIDQYLYYLSRTQTTGGTANTQTLGFSQGGPNTMANQAKNWLPGPCYRQQRVSTTTGQNNNSNFAWTAGTKYHLNGRNSLANPGIAMATHKDDKERFFPSNGILIFGKQNAARDNADYSDVMLTSEEEIKTTNPVATEEYGIVADNLQQQNTAPQIGTVNSQGALPGMVWQNRDVYLQGPIWAKIPHTDGNFHPSPLMGGFGLKHPPPQILIKNTPVPADPPTTFNQSKLNSFITQYSTGQVSVEIEWELQKENSKRWNPEIQYTSNYYKSTSVDFAVNTEGVYSEPHPIGTRYLTRPL

SEQ ID NO: 1699 - protein, 736 aa, Artificial Sequence
  Description of Artificial Sequence: Synthetic polypeptide
MAADGYLPDWLEDNLSEGIREWWALKPGAPKPKANQQKQDDGRGLVLPGYKYLGPFNGLDKGEPVNAADAAALEHDKAYDQQLKAGDNPYLRYNHADAEFQERLQEDTSFGGNLGRAVFQAKKRVLEPLGLVEEGAKTAPGKKRPVEQSPQEPDSSSGIGKTGQQPAKKRLNFGQTGDSESVPDPQPLGEPPATPAAVGPTTMASGGGAPMADNNEGADGVGSSSGNWHCDSTWLGDRVITTSTRTWALPTYNNHLYKQISSASTGASNDNHYFGYSTPWGYFDFNRFHCHFSPRDWQRLINNNWGFRPKRLNFKLFNIQVKEVTDNNGVKTIANNLTSTVQVFTDSEYQLPYVLGSAHQGCLPPFPADVFMIPQYGYLTLNNGSQAVGRSSFYCLEYFPSQMLRTGNNFTFSYTFEDVPFHSSYAHSQSLDRLMNPLIDQYLYYLSRTQTTGGTANTQTLGFSQGGPNTMANQAKNWLPGPCYRQQRVSTTTGQNNNSNFAWTAGTKYHLNGRNSLANPGIAMATHKDDKERFFPSNGILIFGKQNAARDNADYSDVMLTSEEEIKTTNPVATEEYGIVADNLQQQNTAPQIGTVNSQGALPGMVWQNRDVYLQGPIWAKIPHTDGNFHPSPLMGGFGLKHPPPQILIKNTPVPADPPTTFNQSKLNSFITQYSTGQVSVEIEWELQKENSKRWNPEIQYTSNYYKSTSVDFAVNTEGVYSEPHPIGTRYLTRPL

SEQ ID NO: 1700 - protein, 737 aa, Artificial Sequence
  Description of Artificial Sequence: Synthetic polypeptide
MAADGYLPDWLEDNLSEGIREWWALKPGAPKPKANQQKQDDGRGLVLPGYKYLGPFNGLDKGEPVNAADAAALEHDKAYDQQLKAGDNPYLRYNHADAEFQERLQEDTSFGGNLGRAVFQAKKRVLEPLGLVEEGAKTAPGKKRPVEQSPQEPDSSSGIGKTGQQPAKKRLNFGQTGDTESVPDPQPIGEPPAAPSGVGSLTMASGGGAPVADNNEGADGVGSSSGNWHCDSQWLGDRVITTSTRTWALPTYNNHLYKQISNSTSGGSSNDNAYFGYSTPWGYFDFNRFHCHFSPRDWQRLINNNWGFRPKRLNFKLFNIQVKEVTQNEGTKTIANNLTSTIQVFTDSEYQLPYVLGSAHQGCLPPFPADVFMIPQYGYLTLNNGSQAVGRSSFYCLEYFPSQMLRTGNNFQFTYTFEDVPFHSSYAHSQSLDRLMNPLIDQYLYYLSRTQTTGGTANTQTLGFSQGGPNTMANQAKNWLPGPCYRQQRVSTTTGQNNNSNFAWTAGTKYHLNGRNSLANPGIAMATHKDDKERFFPSNGILIFGKQNAARDNADYSDVMLTSEEEIKTTNPVATEEYGIVADNLQQQNTAPQIGTVNSQGALPGMVWQNRDVYLQGPIWAKIPHTDGNFHPSPLMGGFGLKHPPPQILIKNTPVPADPPTTFNQSKLNSFITQYSTGQVSVEIEWELQKENSKRWNPEIQYTSNYYKSTSVDFAVNTEGVYSEPHPIGTRYLTRPL

SEQ ID NO: 1701 - protein, 736 aa, Artificial Sequence
  Description of Artificial Sequence: Synthetic polypeptide
MAADGYLPDWLEDNLSEGIREWWALKPGAPKPKANQQKQDDGRGLVLPGYKYLGPFNGLDKGEPVNAADAAALEHDKAYDQQLKAGDNPYLKYNHADAEFQERLQGDTSFGGNLGRAVFQAKKRVLEPLGLVEEAAKTAPGKKRPVEQSPQEPDSSAGIGKSGAQPAKKRLNFGQTGDTESVPDPQPLGEPPAAPSGVGPNTMAAGGGAPMADNNEGADGVGSSSGNWHCDSQWLGDRVITTSTRTWALPTYNNHLYKQISSASTGASNDNHYFGYSTPWGYFDFNRFHCHFSPRDWQRLINNNWGFRPKRLNFKLFNIQVKEVTDNNGVKTIANNLTSTVQVFTDSEYQLPYVLGSAHQGCLPPFPADVFMIPQYGYLTLNNGSQAVGRSSFYCLEYFPSQMLRTGNNFTFSYTFEDVPFHSSYAHSQSLDRLMNPLIDQYLYYLSRTQTTGGTANTQTLGFSQGGPNTMANQAKNWLPGPCYRQQRVSTTTGQNNNSNFAWTAGTKYHLNGRNSLANPGIAMATHKDDKERFFPSNGILIFDKQNAARDNADYSDVMLTSEEEIKTTNPVATEEYGIVADNLQQQNTAPQIGTVNSQGALPGMVWQNRDVYLQGPIWAKIPHTDGNFHPSPLMGGFGLKHPPPQILIKNTPVPADPPTTFNQSKLNSFITQYSTGQVSVEIEWELQKENSKRWNPEIQYTSNYYKSTSVDFAVNTEGVYSEPHPIGTRYLTRPL

SEQ ID NO: 1702 - protein, 736 aa, Artificial Sequence
  Description of Artificial Sequence: Synthetic polypeptide
MAADGYLPDWLEDTLSEGIRQWWKLKPGPPPPKPAERHKDDSRGLVLPGYKYLGPFNGLDKGEPVNEADAAALEHDKAYDRQLDSGDNPYLKYNHADAEFQERLKEDTSFGGNLGRAVFQAKKRVLEPLGLVEEPVKTAPGKKRPVEHSPVEPDSSSGTGKAGQQPARKRLNFGQTGDSESVPDPQPLGEPPATPAAVGPNTMATGSGAPMADNNEGADGVGNSSGNWHCDSTWMGDRVITTSTRTWALPTYNNHLYKQISSASTGASNDNHYFGYSTPWGYFDFNRFHCHFSPRDWQRLINNNWGFRPKRLNFKLFNIQVKEVTDNNGVKTIANNLTSTIQVFTDSEYQLPYVLGSAHQGCLPPFPADVFMIPQYGYLTLNNGSQAVGRSSFYCLEYFPSQMLRTGNNFTFSYTFEDVPFHSSYAHSQSLDRLMNPLIDQYLYYLSRTQTTGGKANTQTLGFSQGGPNTMANQAKNWLPGPCYRQQRVSTTTGQNNNSNFAWTAGTKYHLNGRNSLANPGIAMATHKDDKERFFPSNGILIFGKQNAARDNADYSDVMLTSEEEIKTTNPVATEEYGIVADNLQQQNTAPQIGTVNSQGALPGMVWQNRDVYLQGPIWAKIPHTDGNFHPSPLMGGFGLKHPPPQILIKNTPVPADPPTTFNQSKLNSFITQYSTGQVSVEIEWELQKENSKRWNPEIQYTSNYYKSTSVDFAVNTEGVYSEPHPIGTRYLTRPL

SEQ ID NO: 1703 - protein, 736 aa, Artificial Sequence
  Description of Artificial Sequence: Synthetic polypeptide
MAADGYLPDWLEDNLSEGIREWWALKPGAPKPKANQQKQDDGRGLVLPGYKYLGPFNGLDKGEPVNAADAAALEHDKAYDQQLKAGDNPYLRYNHADAEFQERLQEDTSFGGNLGRAVFQAKKRVLEPFGLVEEGAKTAPGKKRPVEQSPQEPDSSSGIGKTGQQPAKKRLNFGQTGDSESVPDPQPLGEPPATPAAVGPTTMASGGGAPMADNNEGADGVGNASGNWHCDSTWLGDRVITTSTRTWALPTYNNHLYKQISSASTGASNDNHYFGYSTPWGYFDFNRFHCHFSPRDWQRLINNNWGFRPKRLNFKLFNIQVKEVTDNNGVKTIANNLTSTVQVFTDSEYQLPYVLGSAHQGCLPPFPADVFMIPQYGYLTLNNGSQAVGRSSFYCLEYFPSQMLRTGNNFTFSYTFEDVPFHSSYAHSQSLDRLMNPLIDQYLYYLSRTQTTGGTGNTQTLGFSQGGPNTMANQAKNWLPGPCYRQQRVSTTTGQNNNSNFAWTAGTKYHLNGRNSLANPGIAMATHKDDKERFFPSNGILIFGKQNAARDNADYSDVMLTSEEEIKTTNPVATEEYGIVADNLQQQNTAPQIGTVNSQGALPGMVWQNRDVYLQGPIWAKIPHTDGNFHPSPLMGGFGLKHPPPQILIKNTPVPADPPTTFNQSKLNSFITQYSTGQVSVEIEWELQKENSKRWNPEIQYTSNYYKSTSVDFAVNTEGVYSEPHPIGTRYLTRPL

SEQ ID NO: 1704 - protein, 736 aa, Artificial Sequence
  Description of Artificial Sequence: Synthetic polypeptide
MAADGYLPDWLEDNLSEGIREWWDLKPGAPKPKANQQKQDDGRGLVLPGYKYLGPFNGLDKGEPVNAADAAALEHDKAYDQQLKAGDNPYLRYNHADAEFQERLQEDTSFGGNLGRAVFQAKKRVLEPLGLVEEGAKTAPGKKRPVEQSPQEPDSSSGIGKTGQQPAKKRLNFGQTGDSESVPDPQPLGEPPATPAAVGPTTMASGGGAPMADNNEGADGVGSSSGNWHCDSTWLGDRVITTSTRTWALPTYNNHLYKQISSASTGASNDNHYFGYSTPWGYFDFNRFHCHFSPRDWQRLINNNWGFRPKRLNFKLFNIQVKEVTQNEGTKTIANNLTSTIQVFTDSEYQLPYVLGSAHQGCLPPFPADVFMIPQYGYLTLNNGSQAVGRSSFYCLEYFPSQMLRTGNNFTFSYTFEDVPFHSSYAHSQSLDRLMNPLIDQYLYYLSRTQTTGGTANTQTLGFSQGGPNTMANQAKNWLPGPCYRQQRVSTTTGQNNNSNFAWTAGTKYHLNGRNSLANPGIAMATHKDDKERFFPSNGILIFGKQNAARDNADYSDVMLTSEEEIKTTNPVATEEYGIVADNLQQQNTAPQIGTVNSQGALPGMVWQNRDVYLQGPIWAKIPHTDGNFHPSPLMGGFGLKHPPPQILIKNTPVPADPPTTFNQSKLNSFITQYSTGQVSVEIEWELQKENSKRWNPEIQYTSNYYKSTSVDFAVNTEGVYSEPHPIGTRYLTRPL

SEQ ID NO: 1705 - protein, 736 aa, Artificial Sequence
  Description of Artificial Sequence: Synthetic polypeptide
MAADGYLPDWLEDNLSEGIREWWALKPGAPKPKANQQKQDDGRGLVLPGYKYLGPFNGLDKGEPVNAADAAALEHDKAYDQQLKAGDNPYLRYNHADAEFQERLQEDTSFGGNLGRAVFQAKKRVLEPLGLVEEGAKTAPGKKRPVEQSPQEPDSSSGIGKTGQQPAKKRLNFGQTGDSESVPDPQPLGEPPATPAAVGPTTMAAGGGAPMADNNEGADGVGSSSGNWHCDSTWMGDRVITTSTRTWALPTYNNHLYKQISSASTGASNDNHYFGYSTPWGYFDFNRFHCHFSPRDWQRLINNNWGFRPKRLSFKLFNIQVKEVTQNEGTKTIANNLTSTIQVFTDSEYQLPYVLGSAHQGCLPPFPADVFMIPQYGYLTLNNGSQAVGRSSFYCLEYFPSQMLRTGNNFTFSYTFEDVPFHSSYAHSQSLDRLMNPLIDQYLYYLSRTQTTGGTANTQTLGFSQGGPNTMANQAKNWLQGPCYRQQRVSTTTGQNNNSNFAWTAGTKYHLNGRNSLANPGIAMATHKDDKERFFPSNGILIFGKQNAARDNADYSDVMLTSEEEIKTTNPVATEEYGIVADNLQQQNTAPQIGTVNSQGALPGMVWQNLDVYLQGPIWAKIPHTDGNFHPSPLMGGFGLKHPPPQILIKNTPVPADPPTTFNQSKLNSFITQYSTGQVSVEIEWELQKENSKRWNPEIQYTSNYYKSTSVDFAVNTEGVYSEPHPIGTRYLTRPL

SEQ ID NO: 1706 - protein, 737 aa, Artificial Sequence
  Description of Artificial Sequence: Synthetic polypeptide
MAADGYLPDWLEDNLSEGIREWWALKPGAPKPKANQQKQDDGRGLVLPGYKYLGPFNGLDKGEPVNAADAAALEHDKAYDQQLKAGDNPYLRYNHADAEFQERLQEDTSFGGNLGRAVFQAKKRVLEPLGLVEEGAKTAPGKKRPVEPSPQRSPDSSSGIGKTGQQPAKKRLNFGQTGDSESVPDPQPLGEPPATPAAVGPTTMASGGGAPMADNNEGADGVGNASGNWHCDSQWLGDRVITTSTRTWALPTYNNHLYKQISSASTGASNDNHYFGYSTPWGYFDFNRFHCHFSPRDWQRLINNNWGFRPKRLNFKLFNIQVKEVTDNNGVKTIANNLTSTVQVFTDSDYQLPYVLGSAHEGCLPPFPADVFMIPQYGYLTLNNGSQAVGRSSFYCLEYFPSQMLRTGNNFQFTYTFEDVPFHSSYAHSQSLDRLMNPLIDQYLYYLSRTQTTGGTANTQTLGFSQGGPNTMANQAKNWVPGPCYRQQRVSTATGQNNNSNFAWTAGTKYHLKGRNSLANPGIAMATHKDDKERFFPSNGILIFGKQNAARDNADYSDVMLTSEEEIKTTNPVATEEYGIVADNLQQQNTAPQIGTVNSQGALPGMVWQNRDVYLQGPIWAKIPHTDGNFHPSPLMGGFGLKHPPPQILIKNTPVPADPPTTFNQSKLNSFITQYSTGQVSVEIEWELQKENSKRWNPEIQYTSNYYKSTSVDFAVNTEGVYSEPHPIGTRYLTRPL

SEQ ID NO: 1707 - protein, 737 aa, Artificial Sequence
  Description of Artificial Sequence: Synthetic polypeptide
  misc_feature (226)..(226): Xaa can be any naturally occurring amino acid
  misc_feature (233)..(233): Xaa can be any naturally occurring amino acid
  misc_feature (239)..(239): Xaa can be any naturally occurring amino acid
  misc_feature (250)..(250): Xaa can be any naturally occurring amino acid
  misc_feature (253)..(253): Xaa can be any naturally occurring amino acid
  misc_feature (255)..(255): Xaa can be any naturally occurring amino acid
MAADGYLPDWLEDTLSEGIRQWWKLKPGPPPPKPAERHKDDSRGLVLPGYKYLGPFNGLDKGEPVNEADAAALEHDKAYDRQLDSGDNPYLKYNHADAEFQERLKEDTSFGGNLGRAVFQAKKRVLEPLGLVEEGAKTAPGKKRPVEQSPQEPDSSSGIGKTGQQPAKKRLNFGQTGDSESVPDPQPLGEPPATPSGVGPNTMAAGGGAPMADNNEGADGVGSSSXNWHCDSXWLGDRXITTSTRTWALXTYXNXLYKQISNSTSGGATNDNTYFGYSTPWGYFDFNRFHCHFSPRDWQRLINNNWGFRPKRLNFKLFNIQVKEVTQNEGTKTIANNLTSTIQVFTDSEYQLPYVLGSAHQGCLPPFPADVFMIPQYGYLTLNNGSQAVGRSSFYCLEYFPSQMLRTGNNFQFTYTFEDVPFHSSYAHSQSLDRLMNPLIDQYLYYLSRTQTTGGTANTQTLGFSQGGPNTMANQAKNWLPGPCYRQQRVSTTTGQNNNSNFAWTAGTKYHLNGRNSLANPGIAMATHKDDKERFFPSNGILIFGKQNAARDNADYSDVMLTSEEEIKTTNPVATEEYGIVADNLQQQNTAPQIGTVNSQGALPGMVWQNRDVYLQGPIWAKIPHTDGNFHPSPLMGGFGLKHPPPQILIKNTPVPADPPTTFSQAKLASFITQYSTGQVSVEIEWELQKENSKRWNPEVQYTSNYAKSANVDFTVDNNGLYTEPRPIGTRYLTRPL

SEQ ID NO: 1708 - protein, 737 aa, Artificial Sequence
  Description of Artificial Sequence: Synthetic polypeptide
MAADGYLPDWLEDNLSEGIREWWDLKPGAPKPKANQQKQDDGRGLVLPGYKYLGPFNGLDKGEPVNAADAAALEHDKAYDQQLKAGDNPYLRYNHADAEFQERLQEDTSFGGNLGRAVFQAKKRVLEPLGLVEEGAKTAPGKKRPVEPSPQRSPDSSTGIGKKGQQPAKKRLNFGQTGDSESVPDPQPIGEPPAGPSGVGSLTMASGGGAPVADNNEGADGVGSSSGNWHCDSQWLGDRVITTSTRTWALPTYNNHLYKQISSASTGASNDNHYFGYSTPWGYFDFNRFHCHFSPRDWQRLINNNWGFRPKRLNFKLFNIQVKEVTDNDGVKTIANNLTSTIQVFTDSEYQLPYVLGSAHQGCLPPFPADVFMIPQYGYLTLNNGSQAVGRSSFYCLEYFPSQMLRTGNNFTFSYTFEDVPFHSSYAHSQSLDRLMNPLIDQYLYYLSRTQTTGGTANTQTLGFSQGGPNTMANHAKNWLPGPCYRQQRVSTTTGQNNNSNFAWTAGTKYHLNGRNSLANPGIAMATHKDDKERFFPSNGILIFGKQNAARDNADYSDVMLTSEEEIKTTNPVATEEYGIVADNLQQQNTAPQIGTVNSQGALPGMVWQNRDVYLQGPIWAKIPHTDGNFHPSPLMGGFGLKHPPPQILIKNTPVPADPPTTFNQSKLNSFITQYSTGQVSVEIEWELQKENSKRWNPEIQYTSNYYKSTSVDFAVNTEGVYSEPHPIGTRYLTRPL

SEQ ID NO: 1709 - protein, 736 aa, Artificial Sequence
  Description of Artificial Sequence: Synthetic polypeptide
MAADGYLPDWLEDTLSEGIRQWWKLKPGPPPPKPAERHKDDSRGLVLPGYKYLGPFNGLDKGEPVNEADAAALEHDKAYDRQLDSGDNPYLKYNHADAEFQERLKEDTSFGGNLGRAVFQAKKRVLEPLGLVEEPVKTAPGKKRPVEHSPVEPDSSSGTGKAGQQPAKKRLNFGQTGDSESVPDPQPLGEPPATPAAVGPTTMASGGGAPMADNNEGADGVGNASGNWHCDSTWLGDRVITTSTRTWALPTYNNHLYKQISSASTGASNDNHYFGYSTPWGYFDFNRFHCHFSPRDWQRLINNNWGFRPKRLNFKLFNIQVKEVTQNEGTKTIANNLTSTIQVFTDSEYQLPYVLGSAHQGCLPPFPADVFMIPQYGYLTLNNGSQAVGRSSFYCLEYFPSQMLRTGNNFQFTYTFEDVPFHSSYAHSQSLDRLMNPLIDQYLYYLSRTQTTGGTANTQTLGFSQGGPNTMANQAKNWLPGPCYRQQRVSTTTGQNNNSNFAWTAGTKYHLNGRNSLANPGIAMATHKDDKERFFPSNGILIFGKQNAARDNADYSDVMLTSEEEIKTTNPVATEEYGIVADNLQQQNTAPQIGTVNSQGALPGMVWQNRDVYLQGPIWAKIPHTDGNFHPSPLMGGFGLKHPPPQILIKNTPVPADPPTTFNQSKLNSFITQYSTGQVSVEIEWELQKENSKRWNPEIQYTSNYYKSTSVDFAVNTEGVYSEPHPIGTRYLTRPL

SEQ ID NO: 1710 - protein, 736 aa, Artificial Sequence
  Description of Artificial Sequence: Synthetic polypeptide
MAADGYLPDWLEDNLSEGIREWWALKPGAPKPKANQQKQDDGRGLVLPGYKYLGPFNGLDKGEPVNAADAAALEHDKAYDQQLQAGDNPYLRYNHADAEFQERLQGDTSFGGNLGRAVFQAKKRVLEPLGLVEEGAKTAPGKKRPVEQSPQEPDSSSGIGKTGQQPAKKRLNFGQTGDSESVPDPQPLGEPPATPAAVGPTTMASGGGAPMADNNEGADGVGNASGNWHCDSTWLGDRVITTSTRTWALPTYNNHLYKQISSASTGASNDNHYFGYSTPWGYFDFNRFHCHFSPRDWQRLINNNWGFRPKRLNFKLFNIQVKEVTDNNGVKTIANNLTSTIQVFTDSEYQLPYVLGSAHQGCLPPFPADVFMIPQYGYLTLNNGSQAVGRSSFYCLEYFPSQMLRTGNNFQFTYTFEDVPFHSSYAHSQSLDRLMNPLIDQYLYYLSRTQTTGGTANTQTLGFSQGGPNTMANQAKNWLPGPCYRQQRVSTTTGQNNNSNFAWTAGTKYHLNGRNSLANPGIAMATHKDDKERFFPSNGILIFGKQNAARDNADYSDVMLTSEEEIKTTNPVATEEYGIVADNLQQQNTAPQIGTVNSQGALPGMVWQNRDVYLQGPIWAKIPHTDGNFHPSPLMGGFGLKHPPPQILIKNTPVPADPPTTFNQSKLNSFITQYSTGQVSVEIEWELQKENSKRWNPEIQYTSNYYKSTSVDFAVNTEGVYSEPHPIGTRYLTRPL

SEQ ID NO: 1711 - protein, 738 aa, Artificial Sequence
  Description of Artificial Sequence: Synthetic polypeptide
MAADGYLPDWLEDTLSEGIRQWWKLKPGPPPPKPAERHKDDSRGLVLPGYKYLGPFNGLDKGEPVNAADAAALEHDKAYDQQLKAGDNPYLRYNHADAEFQERLKEDTSFGGNLGRAVFQAKKRVLEPLGLVEEGAKTAPGKKRPVEPSPQRSPDSSTGIGKKGQQPARKRLNFGQTGDSESVPDPQPLGEPPAAPSGVGPNTMAAGGGAPMADNNEGADGVGSSSGNWHCDSQWLGDRVITTSTRTWALPTYNNHLYKQISNSTSGGSSNDNAYFGYSTPWGYFDFNRFHCHFSPRDWQRLINNNWGFRPKRLNFKLFNIQVKEVTDNNGVKTIANNLTSTVQVFTDSEYQLPYVLGSAHQGCLPPFPADVFMIPQYGYLTLNNGSQAVGRSSFYCLEYFPSQMLRTGNNFTFSYTFEDVPFHSSYAHSQSLDRLMNPLIDQYLYYLSRTQTTGGTANTQTLGFSQGGPNTMANQAKNWLPGPCYRQQRVSTTTGQNNNSNFAWTAGTKYHLNGRNSLANPGIAMATHKDDKERFFPSNGILIFGKQNAARDNADYSDVMLTSEEEIKTTNPVATEEYGIVADNLQQQNTAPQIGTVNSQGALPGMVWQNRDVYLQGPIWAKIPHTDGHFHPSPLMGGFGLKHPPPQILIKNTPVPANPPTTFNQSKLNSFITQYSTGQVSVEIEWELQKENSKRWNPEVQYTSNYAKSANVDFTVDNNGLYTEPRPIGTRYLTRPL

SEQ ID NO: 1712 - protein, 738 aa, Artificial Sequence; identical to SEQ ID NO: 1711
  Description of Artificial Sequence: Synthetic polypeptide

SEQ ID NO: 1713 - protein, 736 aa, Artificial Sequence
  Description of Artificial Sequence: Synthetic polypeptide
MAADGYLPDWLEDNLSEGIREWWALKPGAPKPKANQQKQDDGRGLVLPGYKYLGPFNGLDKGEPVNAADAAALEHDKAYDQQLKAGDNPYLRYNHADAEFQERLQEDTSFGGNLGRAVFQAKKRLLEPLGLVEEGAKTAPGKKRPVEQSPQEPDSSSGIGKTGQQPAKKRLNFGQTGDSESVPDPQPLGEPPATPAAVGPTTMASGGGAPMADNNEGADGVGNSSGNWHCDSTWMGDRVITTSTRTWALPTYNNHLYKQISSASTGASNDNHYFGYSTPWGYFDFNRFHCHFSPRDWQRLINNNWGFRPKRLNFKLFNIQVKEVTQNEGTKTIANNLTSTIQVFTDSEYQLPYVLGSAHQGCLPPFPADVFIIPQYGYLTLNNGSQAVGRSSFYCLEYFPSQMLRTGNNFTFSYTFEDVPFHSSYAHSQSLDRLMNPLIDQYLYYLSRTQTTGGTANTQTLGFSQGGPNTMANQAKNWLPGPCYRQQRVSTTTGQNNNSNFAWTAGTKYHLNGRNSLANPGIAMATHKDDKERFFPSNGILIFGKQNAARDNADYSDVMLTSEEEIKTTNPVATEEYGIVADNLQQQNTAPQIGTVNSQGALPGMVWQNRDVYLQGPIWAKIPHTDGNFHPSPLMGGFGLKHPPPQILIKNTPVPADPPTTFNQSKLNSFITQYSTGQVSVEIEWELQKENSKRWNPEIQYTSNYYKSTSVDFAVNTEGVYSEPHPIGTRYLTRPL

SEQ ID NO: 1714 - protein, 736 aa, Artificial Sequence
  Description of Artificial Sequence: Synthetic polypeptide
MAADGYLPDWLEDNLSEGIREWWALKPGAPKPKANQQKQDDGRGLVLPGYKYLGPFNGLDKGEPVNAADAAALEHDKAYDQQLKAGDNPYLRYNHADAEFQERLQEDTSFGGNLGRAVFQAKKRVLEPFGLVEEAAKTAPGKKRPVEQSPQEPDSSSGIGKTGQQPAKKRLNFGQTGDSESVPDPQPLGEPPATPAAVGPTTMASGGGAPMADNNEGADGVGNASGNWHCDSTWLGDRVITTSTRTWALPTYNNHLYKQISSASTGASNDNHYFGYSTPWGYFDFNRFHCHFSPRDWQRLINNNWGFRPKRLNFKLFNIQVKEVTQNEGTKTIANNLTSTIQVFTDSEYQLPYVLGSAHQGCLPPFPADVFMIPQYGYLTLNNGSQAVGRSSFYCLEYFPSQMLRTGNNFTFSYTFEDVPFHSSYAHSQSLDRLMNPLIDQYLYYLSRTQTTGGTANTQTLGFSQGGPNTMANHAKNWLPGPCYRQQRVSTTTGQNNNSNFAWTAGTKYHLNGRNSLANPGIAMATHKDDKERFFPSNGILIFGKQNAARDNADYSDVMLTSEEEIKTTNPVATEEYGIVADNLQQQNTAPQIGTVNSQGALPGMVWQNRDVYLQGPIWAKIPHTDGNFHPSPLMGGFGLKHPPPQILIKNTPVPADPPTTFNQSKLNSFITQYSTGQVSVEIEWELQKENSKRWNPEIQYTSNYYKSTSVDFAVNTEGVYSEPHPIGTRYLTRPL

SEQ ID NO: 1715 - protein, 736 aa, Artificial Sequence
  Description of Artificial Sequence: Synthetic polypeptide
MAADGYLPDWLEDNLSEGIREWWALKPGAPKPKANQQKQDDGRGLVLPGYKYLGPFNGLDKGEPVNEADAAALEHDKAYDQQLKAGDNPYLRYNHADAEFQERLQEDTSFGGNLGRAVFQAKKRLLEPLGLVEEAAKTAPGKKRPVEQSPQEPDSSAGIGKSGAQPAKKRLNFGQTGDSESVPDPQPLGEPPATPAAVGPTTMASGGGAPMADNNEGADGVGNASGNWHCDSTWLGDRVITTSTRTWALPTYNNHLYKQISSASTGASNDNHYFGYSTPWGYFDFNRFHCHFSPRDWQRLINNNWGFRPKRLNFKLFNIQVKEVTDNDGVKTIANNLTSTIQVFTDSEYQLPYVLGSAHQGCLPPFPADVFMIPQYGYLTLNNGSQAVGRSSFYCLEYFPSQMLRTGNNFQFTYTFEDVPFHSSYAHSQSLDRLMNPLIDQYLYYLSRTQTTGGTANTQTLGFSQGGPNTMANQAKNWLPGPCYRQQRVSTTTGQNNNSNFAWTAGTKYHLNGRNSLANPGIAMATHKDDKERFFPSNGILIFGKQNAARDNADYSDVMLTSEEEIKTTNPVATEEYGIVADNLQQQNTAPQIGTVNSQGALPGMVWQNRDVYLQGPIWAKIPHTDGNFHPSPLMGGFGLKHPPPQILIKNTPVPADPPTTFNQSKLNSFITQYSTGQVSVEIEWELQKENSKRWNPEIQYTSNYYKSTSVDFAVNTEGVYSEPHPIGTRYLTRPL

SEQ ID NO: 1716 - protein, 736 aa, Artificial Sequence
  Description of Artificial Sequence: Synthetic polypeptide
MAADGYLPDWLEDNLSEGIREWWALKPGAPKPKANQQKQDDGRGLVLPGYKYLGPFNGLDKGEPVNAADAAALEHDKAYDQQLKAGDNPYLRYNHADAEFQERLQEDTSFGGNLGRAVFQAKKRVLEPLGLVEEGAKTAPGKKRPVEQSPQEPDSSAGIGKTGAQPAKKRLNFGQTGDSESVPDPQPLGEPPATPAAVGPTTMASGGGAPMADNNEGADGVGSASGNWHCDSTWLGDRVITTSTRTWALPTYNNHLYKQISSASTGASNDNHYFGYSTPWGYFDFNRFHCHFSPRDWQRLINNNWGFRPKRLNFKLFNIQVKEVTDNNGVKTIANNLTSTIQVFTDSEYQLPYVLGSAHQGCLPPFPADVFMIPQYGYLTLNNGSQAVGRSSFYCLEYFPSQMLRTGNNFTFSYTFEDVPFHSSYAHSQSLDRLMNPLIDQYLYYLSRTQTTGGTANTQTLGFSQGGPNTMANQAKNWLPGPCYRQQRVSTTTGQNNNSNFAWTAGTKYHLNGRNSLANPGIAMATHKDDKERFFPSNGILIFGKQNAARDNADYSDVMLTSEEEIKTTNPVATEEYGIVADNLQQQNTAPQIGTVNSQGALPGMVWQNRDVYLQGPIWAKIPHTDGNFHPSPLMGGFGLKHPPPQILIKNTPVPADPPTTFNQSKLNSFITQYSTGQVSVEIEWELQKENSKRWNPEIQYTSNYYKSTSVDFAVNTEGVYSEPHPIGTRYLTRPL

SEQ ID NO: 1717 - protein, 736 aa, Artificial Sequence
  Description of Artificial Sequence: Synthetic polypeptide
MAADGYLPDWLEDNLSEGIREWWDLKPGAPKPKANQQKQDDGRGLVLPGYKYLGPFNGLDKGEPVNAADAAALEHDKAYDQQLKAGDNPYLRYNHADAEFQERLQEDTSFGGNLGRAVFQAKKRLLEPLGLVEEAAKTAPGKKRPVEQSPQEPDSSAGIGKSGAQPAKKRLNFGQTGDTESVPDPQPIGEPPAAPSGVGPNTMAAGGGAPMADNNEGADGVGSSSGNWHCDSQWLGDRVITTSTRTWALPTYNNHLYKQISSASTGASNDNHYFGYSTPWGYFDFNRFHCHFSPRDWQRLINNNWGFRPKRLNFKLFNIQVKEVTQNEGTKTIANNLTSTIQVFTDSEYQLPYVLGSAHQGCLPPFPADVFMIPQYGYLTLNNGSQAVGRSSFYCLEYFPSQMLRTGNNFQFTYTFEDVPFHSSYAHSQSLDRLMNPLIDQYLYYLSRTQTTGGTANTQTLGFSQGGPNTMANHAKNWLPGPCYRQQRVSTTTGQNNNSNFAWTAGTKYHLNGRNSLANPGIAMATHKDDKERFFPSNGILIFGKQNAARDNADYSDVMLTSEEEIKTTNPVATEEYGIVADNLQQQNTAPQIGTVNSQGALPGMVWQNRDVYLQGPIWAKIPHTDGNFHPSPLMGGFGLKHPPPQILIKNTPVPADPPTTFNQSKLNSFITQYSTGQVSVEIEWELQKENSKRWNPEIQYTSNYYKSTSVDFAVNTEGVYSEPHPIGTRYLTRPL

SEQ ID NO: 1718 - protein, 737 aa, Artificial Sequence; identical to SEQ ID NO: 1700
  Description of Artificial Sequence: Synthetic polypeptide

SEQ ID NO: 1719 - protein, 737 aa, Artificial Sequence
  Description of Artificial Sequence: Synthetic polypeptide
MAADGYLPDWLEDNLSEGIREWWALKPGAPKPKANQQKQDDGRGLVLPGYKYLGPFNGLDKGEPVNAADAAALEHDKAYDQQLKAGDNPYLRYNHADAEFQERLKEDTSFGGNLGRAVFQAKKRVLEPFGLVEEGAKTAPGKKRPVEQSPQEPDSSSGIGKTGQQPAKKRLNFGQTGDSESVPDPQPLGEPPAAPSGVGPNTMAAGGGAPMADNNEGADGVGSSSGNWHCDSQWLGNRVITTSTRTWALPTYNNHLYKQISNSTSGGSSNDNAYFGYSTPWGYFDFNRFHCHFSPRDWQRLINNNWGFRPKRLNFKLFNIQVKEVTDNNGVKTIANNLTSTVQVFTDSEYQLPYVLGSAHQGCLPPFPADVFMIPQYGYLTLNNGSQAVGRSSFYCLEYFPSQMLRTGNNFQFTYTFEDVPFHSSYAHSQSLDRLMNPLIDQYLYYLSRTQTTGGTANTQTLGFSQGGPNTMANQAKNWLPGPCYRQQRVSTTTGQNNNSNFAWTAGTKYHLNGRNSLANPGIAMATHKDDKERFFPSNGILIFGKQNAARDNADYSDVMLTSEEEIKTTNPVATEEYGIVADNLQQQNTAPQIGTVNSQGALPGMVWQNRDVYLQGPIWAKIPHTDGNFHPSPLMGGFGLKHPPPQILIKNTPVPADPPTTFNQSKLNSFITQYSTGQVSVEIEWELQKENSKRWNPEIQYTSNYYKSTSVDFAVNTEGVYSEPHPIGTRYLTRPL

SEQ ID NO: 1720 - protein, 736 aa, Artificial Sequence
  Description of Artificial Sequence: Synthetic polypeptide
MAADGYLPDWLEDNLSEGIREWWDLKPGAPKPKANQQKQDDGRGLVLPGYKYLGPFNGLDRGEPVNAADAAALEHDKAYDQQLKAGDNPYLRYNHADAEFQERLQEDTSFGGNLGRAVFQAKKRVLEPLGLVEEGAKTAPGKKRPVEQSPQEPDSSSGIGKTGQQPAKKRLNFGQTGDSESVPDPQPLGEPPATPAAVGPTTMASGGGAPMADNNEGADGVGNASGNWHCDSTWLGDRVITTSTRTWALPTYNNHLYKQISSASTGASNDNHYFGYSTPWGYFDFNRFHCHFSPRDWQRLINNNWGFRPKRLNFKLFNIQVKEVTDNNGVKTIANNLTSTIQVFTDSEYQLPYVLGSAHQGCLPPFPADVFMIPQYGYLTLNNGSQAVGRSSFYCLEYFPSQMLRTGNNFQFTYTFEDVPFHSSYAHSQSLDRLMNPLIDQYLYYLSRTQTTGGTANTQTLGFSQGGPNTMANQAKNWLPGPCYRQQRVSTTTGQNNNSNFAWTAGTKYHLNGRNSLANPGIAMATHKDDKERFFPSNGILIFGKQNAARDNADYSDVMLTSEEEIKTTNPVATEEYGIVADNLQQQNTAPQIGTVNSQGALPGMVWQNRDVYLQGPIWAKIPHTDGNFHPSPLMGGFGLKHPPPQILIKNTPVPADPPTTFNQSKLNSFITQYSTGQVSVEIEWELQKENSKRWNPEIQYTSNYYKSTSVDFAVNTEGVYSEPHPIGTRYLTRPL

SEQ ID NO: 1721 - protein, 736 aa, Artificial Sequence
  Description of Artificial Sequence: Synthetic polypeptide
MAADGYLPDWLEDNLSEGIREWWDLKPGAPKPKANQQKQDDGRGLVLPGYKYLGPFNGLDKGEPVNAADAAALEHDKAYDQQLKAGDNPYLRYNHADAEFQERLQEDTSFGGNLGRAVFQAKKRVLEPLGLVEEGAKTAPGKKRPVEQSPQEPDSSSGIGKKGQQPARKRLNFGQTGDSESVPDPQPLGEPPAAPSGVGSLTMASGGGAPMADNNEGADGVGNASGNWHCDSTWLGDRVITTSTRTWALPTYNNHLYKQISSASTGASNDNHYFGYSTPWGYFDFNRFHCHFSPRDWQRLINNNWGFRPKRLNFKLFNIQVKEVTQNEGTKTIANNLTSTVQVFTDSDYQLPYVLGSAHQGCLPPFPADVFMIPQYGYLTLNNGSQAVGRSSFYCLEYFPSQMLRTGNNFQFTYTFEDVPFHSSYAHSQSLDRLMNPLIDQYLYYLSRTQTTGGTANTQTLGFSQGGPNTMANQAKNWLPGPCYRQQRVSTTTGQNNNSNFAWTAGTKYHLNGRNSLSNPGIAMATHKDDKERFFPSNGILIFGKQNAARDNADYSDVMLTSEEEIKTTNPVATEEYGIVADNLQQQNTAPQIGTVNSQGALPGMVWQNRDMYLQGPIWAKIPHTDGNFHPSPLMGGFGLKHPPPQILIKNTPVPADPPTTFNQSKLNSFITQYSTGQVSVEIEWELQKENSKRWNPEIQYTSNYYKSTSVDFAVNTEGVYSEPHPIGTRYLTRPL

SEQ ID NO: 1722 - protein, 736 aa, Artificial Sequence
  Description of Artificial Sequence: Synthetic polynucleotide
MAADGYLPDWLEDNLSEGIREWWALKPGAPKPKANQQKQDDGRGLVLPGYKYLGPFNGLDKGEPVNAADAAALEHDKAYDQQLKAGDNPYLRYNHADAEFQERLQEDTSFGGNLGRAVFQAKKRVLEPFGLVEEGAKTAPGKKRPVEQSPQEPDSSSGIGKTGQQPAKKRLNFGQTGGSESVPDPQPLGEPPATPAAVGPTTMAAGGGAPMADNNEGADGVGSSSGNWHCDSTWLGDRVITTSTRTWALPTYNNHLYKQISSASTGASNDNHYFGYSTPWGYFDFNRFHCHFSPRDWQRLINNNWGFRPKRLNFKLFNIQVKEVTDNNGVKTIANNLTSTVQVFTDSEYQLPYVLGSAHQGCLPPFPADVFMIPQYGYLTLNNGSQAVGRSSFYCLEYFPSQMLRTGNNFTFSYTFEEVPFHSSYAHSQSLDRLMNPLIDQYLYYLSRTQTTGGTANTQTLGFSQGGPNTMANQAKNWLPGPCYRQQRVSTTTGQNNNSNFAWTAGTKYHLNGRNSLANPGIAMASHKDDKERFFPSNGILIFGKQNAARDNADYSDVMLTSEEEIKTTNPVATEEYGIVADNLQQQNTAPQIGTVNSQGALPGMVWQNRDVYLQGPIWAKIPHTDGNFHPSPLMGGFGLKHPPPQILIKNTPVPADPPTTFNQSKLNSFITQYSTGQVSVEIEWELQKENSKRWNPEIQYTSNYYKSTSVDFAVNTEGVYSEPHPIGTRYLTRPL

SEQ ID NO: 1723 - DNA, 2211 bp, Artificial Sequence
  Description of Artificial Sequence: Synthetic polynucleotide
atggctgccgatggttatcttccagattggctcgaggacaacctctctgagggcattcgcgagtggtgggacttgaaacctgcatccccgaaacccaaagccaaccagcaaaagcaggacgacggccggggtctggtgcttcctggctacaagtacctcggacccttcaacggactcgacaagggggagcccgtcaacgcggcggacgcagcggccctcgagcacgacaaggcctacgaccagcagctcaaagcgggtgacaatccgtacctgcggtataaccacgccgacgccgagtttcaggagcgtctgcaagaagatacgtcttttgggggcaacctcgggcgagcagtcttccaggccaaaaagaggcttcttgaacctcttggtctggttgaggaagcggctaagacggctcctggaaagaagaggcctgtagagcagtctcctcaggaaccggactcctccgcgggtattggcaaatcgggtgcacagcccgccaaaaagagactcaatttcggtcagactggcggcacagagtcagttccagaccctcaacctctcggagaacctccagcagcgccctctggtgtgggacctaatacaatggctgcaggcggtggcgcaccaatggcagacaataacgaaggcgccgacggagtgggtagttcctcgggaaattggcattgcgattccacatggctgggcgacagagtcatcaccaccagcaccagaacctgggccctgcccacttacaacaaccatctctacaagcaaatctccagtgcttcaacgggggccagcaacgacaaccactacttcggctacagcaccccctgggggtattttgatttcaacagattccactgccacttctcaccacgtgactggcagcgactcatcaacaacaactggggattccggcccaagagactcagcttcaagctcttcaacatccaggtcaaggaggtcacgcagaatgaaggcaccaagaccatcgccaataacctcaccagcaccatccaggtgtttacggactcggagtaccagctgccgtacgttctcggctctgcccaccagggctgcctgcctccgttcccggcggacgtgttcatgattccccagtacggatacctaacactcaacaacggtagtcaggccgtgggacgctcctccttctactgcctggaatactttccttcgcagatgctgagaaccggcaacaacttccagtttacttacaccttcgaggacgtgcctttccacagcagctacgcccacagccagagcttggaccggctgatgaatcctctgattgaccagtacctgtactacttgtctcggactcaaacaacaggaggcacggcaaatacgcagactctgggcttcagccaaggtgggcctaatacaatggccaatcaggcaaagaactggctgccaggaccctgttaccgccaacaacgcgtctcaacgacaaccgggcaaaacaacaatagcaactttgcctggactgctgggaccaaataccatctgaatggaagaaattcattggctaatcctggcatcgctatggcaacacacaaagacgacaaggagcgtttttttcccagtaacgggatcctgatttttggcaaacaaaatgctgccagagacaatgcggattacagcgatgtcatgctcaccagcgaggaagaaatcaaaaccactaaccctgtggctacagaggaatacggtatcgtggcagataacttgcagcagcaaaacacggctcctcaaattggaactgtcaacagccagggggccttacccggtatggtctggcagaaccgggacgtgtacctgcagggtcccatctgggccaagattcctcacacggacggcaacttccacccgtctccgctgatgggcggctttggcctgaaacatcctccgcctcagatcctgatcaagaacacgcctgtacctgcggatcctccgaccaccttcaaccagtcaaagctgaactctttcatcacgcaatacagcaccggacaggtcagcgtggaaattgaatgggagctgcagaaggaaaacagcaagcgctggaaccccgagatccagtacacctccaactactacaaatctacaagtgtggactttgctgttaatacagaaggcgtgtactctgaaccccaccccattggcacccgttacctcacccgtcccctgtaa

SEQ ID NO: 1724 - DNA, 2211 bp, Artificial Sequence
  Description of Artificial Sequence: Synthetic polynucleotide
atggctgccgatggttatcttccagattggctcgaggacaacctctctgagggcattcgcgagtggtgggacttgaaacctggagccccgaaacccaaagccaaccagcaaaagcaggacgacggccggggtctggtgcttcctggctacaagtacctcggacccttcaacggactcgacaagggggagcccgtcaacgcggcggacgcagcggccctcgagcacgacaaggcctacgaccagcagctcaaagcgggtgacaatccgtacctgcggtataaccacgccgacgccgagtttcaggagcgtctgcaagaagatacgtcttttgggggcaacctcgggcgagcagtcttccaggccaagaagagggttctcgaaccttttggtctggttgaggaaggcgctaagacggctcctggaaagaaacgtccggtagagcagtcgccacaagagccagactcctcctcgggcattggcaagacaggccagcagcccgctaaaaagagactcaattttggtcagactggcgactcagagtcagtccccgacccacaacctctcggagaacctccagcaacccccgctgctgtgggacctactacaatggcttcaggtggtggcgcaccaatggcagacaataacgaaggcgccgacggagtgggtaatgcctcaggaaattggcattgcgattcccaatggctgggggacagagtcatcaccaccagcacccgaacctgggccctgcccacctacaacaatcacctctacaagcaaatctccagtgcttcaacgggggccagcaacgacaaccactacttcggctacagcaccccctgggggtattttgatttcaacagattccactgccatttctcaccacgtgactggcagcgactcatcaacaacaattggggattccggcccaagagactcaacttcaaactcttcaacatccaagtcaaggaggtcacgcagaatgaaggcaccaagaccatcgccaataacctcaccagcaccatccaggtgtttacggactcggagtaccagctgccgtacgttctcggctccgcccaccagggctgcctgcctccgttcccggcggacgtgttcatgattccccagtacggctacctaacactcaacaacggtagtcaggccgtgggacgctcctccttctactgcctggaatactttccttcgcagatgctgagaaccggcaacaacttccagtttacttacaccttcgaggacgtgcctttccacagcagctacgcccacagccagagcttggaccggctgatgaatcctctgattgaccagtacctgtactacttgtctcggactcaaacaacaggaggcacggcaaatacgcagactctgggcttcagccaaggtgggcctaatacaatggccaatcaggcaaagaactggctgccaggaccctgttaccgccaacaacgcgtctcaacgacaaccgggcaaaacaacaatagcaactttgcctggactgctgggaccaaataccatctgaatggaagaaattcattggctaatcctggcatcgctatggcaacacacaaagacgacaaggagcgtttttttcccagtaacgggatcctgatttttggcaaacaaaatgctgccagagacaatgcggattacagcgatgtcatgctcaccagcgaggaagaaatcaaaaccactaaccctgtggctacagaggaatacggtatcgtggcagataacttgcagcagcaaaacacggctcctcaaattggaactgtcaacagccagggggccttacccggtatggtctggcagaaccgggacgtgtacctgcagggtcccatctgggccaagattcctcacacggacggcaacttccacccgtctccgctgatgggcggctttggcctgaaacatcctccgcctcagatcctgatcaagaacacgcctgtacctgcggatcctccgaccaccttcaaccagtcaaagctgaactctttcatcacgcaatacagcaccggacaggtcagcgtggaaattgaatgggagctgcagaaggaaaacagcaagcgctggaaccccgagatccagtacacctccaactactacaaatctacaagtgtggactttgctgttaatacagaaggcgtgtactctgaaccccaccccattggcacccgttacctcacccgtcccctgtaa

SEQ ID NO: 1725 - DNA, 2211 bp, Artificial Sequence
  Description of Artificial Sequence: Synthetic polynucleotide
atggctgccgatggttatcttccagattggctcgaggacaacctctctgagggcattcgcgagtggtgggacttggaacctggagccccgaagcccaaagccaaccagcaaaagcaggacgacggccggggtctggtgcttcctggctacaagtacctcggacccttcaacggactcgacaagggggagcccgtcaacgcggcggacgcagcggccctcgagcacgacaaggcctacgaccagcagctcaaagcgggtgacaatccgtacctgcggtataaccacgccgacgccgagtttcaggagcgtctgcaagaagatacgtcttttgggggcaacctcgggcgagcagtcttccaggccaagaagcgggttctcgaacctctcggtctggttgaggaaggcgctaagacggctcctggaaagaaacgtccggtagagcagtcgccacaagagccagactcctcctcgggcatcggcaagacaggccagcagcccgctaaaaagagactcaattttggtcagactggcgactcagagtcagtccccgatccacaacctctcggagaacctccagcaacccccgctgctgtgggacctactacaatggcttcaggcggtggcgcaccaatggcagacaataacgaaggcgccgacggagtgggtaatgcctcaggaaattggcattgcgattccacatggctgggcgacagagtcatcaccaccagcacccgcacctgggccttgcccacctacaataaccacctctacaagcaaatctccagtgcttcaacaggggccagcaacgacaaccactacttcggctacagcaccccctgggggtattttgacttcaacagattccactgccacttctcaccacgtgactggcagcgactcatcaacaacaactggggattccggcctaagcgactcaacttcaagctcttcaacattcaggtcaaagaggttacggacaacaatggagtcaagaccatcgccaataaccttaccagcacggtccaggtcttcacggactcggagtaccagttgccgtacgtcctcggctctgcgcaccagggctgcctccctccgttcccggcggacgtgttcatgattccgcagtacggctacctaacgctcaacaacggtagtcaggccgtgggacgctcctccttctactgcctggaatactttccttcgcagatgctgagaaccggcaacaacttccagtttacttacaccttcgaggacgtgcctttccacagcagctacgcccacagccagagcttggaccggctgatgaatcctctgattgaccagtacctgtactacttgtctcggactcaaacaacaggaggcacggcaaatacgcagactctgggcttcagccaaggtgggcctaatacaatggccaatcaggcaaagaactggctgccaggaccctgttaccgccaacaacgcgtctcaacgacaaccgggcaaaacaacaatagcaactttgcctggactgctgggaccaaataccatctgaatggaagaaattcattggctaatcctggcatcgctatggcaacacacaaagacgacaaggagcgtttttttcccagtaacgggatcctgatttttggcaaacaaaatgctgccagagacaatgcggattacagcgatgtcatgctcaccagcgaggaagaaatcaaaaccactaaccctgtggctacagaggaatacggtatcgtggcagataacttgcagcagcaaaacacggctcctcaaattggaactgtcaacagccagggggccttacccggtatggtctggcagaaccgggacgtgtacctgcagggtcccatctgggccaagattcctcacacggacggcaacttccacccgtctccgctgatgggcggctttggcctgaaacatcctccgcctcagatcctgatcaagaacacgcctgtacctgcggatcctccgaccaccttcaaccagtcaaagctgaactctttcatcacgcaatacagcaccggacaggtcagcgtggaaattgaatgggagctgcagaaggaaaacagcaagcgctggaaccccgagatccagtacacctccaactactacaaatctacaagtgtggactttgctgttaatacagaaggcgtgtactctgaaccccaccccattggcacccgttacctcacccgtcccctgtaa

SEQ ID NO: 1726 - DNA, 2211 bp, Artificial Sequence
  Description of Artificial Sequence: Synthetic polynucleotide
atggctgccgatggttatcttccagattggctcgaggacactctctctgaaggaataagacagtggtggaagctcaaacctggcccaccaccaccaaagcccgcagagcggcataaggacgacagcaggggtcttgtgcttcctgggtacaagtacctcggacccttcaacggactcgacaagggagagccggtcaacgaggcagacgccgcggccctcgagcacgacaaagcctacgaccggcagctcgacagcggagacaacccgtacctcaagtacaaccacgccgacgcggagtttcaggagcgccttaaagaagatacgtcttttgggggcaacctcgggcgagcagtcttccaggccaagaagagggttctcgaaccttttggtctggttgaggaaggtgctaagacggctcctggaaagaaacgtccggtagagcagtcgccacaagagccagactcctcctcgggcattggcaagacaggccagcagcccgctaaaaagagactcaattttggtcagactggcgactcagagtcagtccccgacccacaacctctcggagaacctccagcaacccccgctgctgtgggacctactacaatggcttcaggcggtggcgcaccaatggcagacaataacgaaggcgccgacggagtgggtaatgcctcaggaaattggcattgcgattccacatggctgggcgacagagtcatcaccaccagcacccgaacatgggccttgcccacctataacaaccacctctacaagcaaatctccagtgcttcaacgggggccagcaacgacaaccactacttcggctacagcaccccctgggggtattttgacttcaacagattccactgccacttctcaccacgtgactggcagcgactcatcaacaacaactggggattccggcctaagcgactcaacttcaagctcttcaacattcaggtcaaagaggttacggacaacaatggagtcaagaccatcgccaataaccttaccagcacggtccaggtcttcacggactcagactatcagctcccgtacgtgctcgggtcggctcacgagggctgcctcccgccgttcccagcggacgttttcatgattcctcagtacggctacctaacactcaacaacggtagtcaggccgtgggacgctcctccttctactgcctggaatactttccttcgcagatgctgagaaccggcaacaacttccagtttacttacaccttcgaggacgtgcctttccacagcagctacgcgcacagccagagtctggaccggctgatgaatcctctgattgaccagtacctgtactacttgtctcggactcaaacaacaggaggcacggcaaatacgcagactctgggcttcagccaaggtgggcctaatacaatggccaatcaggcaaagaactggctgccaggaccctgttaccgccaacaacgcgtctcaacgacaaccgggcaaaacaacaatagcaactttgcctggactgctgggaccaaataccatctgaatggaagaaattcattggctaatcctggcatcgctatggcaacacacaaagacgacaaggagcgtttttttcccagtaacgggatcctgattttcggcaaacaaaatgctgccagagacaatgcggattacagcgatgtcatgctcaccagcgaggaagaaatcaaaaccactaaccctgtggctacagaggaatacggtatcgtggcagataacttgcagcagcaaaacacggctcctcaaattggaactgtcaacagccagggggccttacccggtatggtctggcagaaccgggacgtgtacctgcagggtcccatctgggccaagattcctcacacggacggcaacttccacccgtctccgctgatgggcggctttggcctgaaacatcctccgcctcagatcctgatcaagaacacgcctgtacctgcggatcctccgaccaccttcaaccagtcaaagctgaactctttcatcacgcaatacagcaccggacaggtcagcgtggaaattgaatgggagctgcagaaggaaaacagcaagcgctggaaccccgagatccagtacacctccaactactacaaatctacaagtgtggactttgctgttaatacagaaggcgtgtactctgaaccccaccccattggcaccagatacctgactcgtaatctgtaa

SEQ ID NO: 1727 - DNA, 2208 bp, Artificial Sequence
  Description of Artificial Sequence: Synthetic polynucleotide
atggctgccgatggttatcttccagattggctcgaggacactctctctgaaggaataagacagtggtggaagctcaaacctggcccaccaccaccaaagcccgcagagcggcataaggacgacagcaggggtcttgtgcttcctgggtacaagtacctcggacccttcaacggactcgacaagggagagccggtcaacgaggcagacgccgcggccctcgagcacgacaaagcctacgaccggcagctcgacagcggagacaacccgtacctcaagtacaaccacgccgacgcggagtttcaggagcgccttaaagaagatacgtcttttgggggcaacctcggacgagcagtcttccaggcgaaaaagagggttcttgaacctctgggcctggttgaggaacctgttaagacggctccgggaaaaaagaggccggtagagcagtcgccacaagagccagactcctcctcgggcatcggcaagaaaggccagcagcccgctaaaaagagactcaattttggtcagactggcgactcagagtcagtccccgacccacaacctctcggagaacctccagcaacccccgctgctgtgggacctactacaatggcttcaggcggtggcgcaccaatggcggacaataacgaaggcgccgatggagtgggtaatgcctcaggaaattggcattgcgattccacatggctgggcgacagagtcatcaccaccagcacccgaacatgggccttgcccacctataacaaccacctctacaagcaaatctccagtgcttcaacgggggccagcaacgacaaccactacttcggctacagcaccccctgggggtattttgacttcaacagattccactgccacttctcaccacgtgactggcagcgactcatcaacaacaactggggattccggcctaagcgactcaacttcaagctcttcaacattcaggtcaaagaggttacggacaacaatggagtcaagaccatcgccaataaccttaccagcacggtccaggtcttcacggactcagactatcagctcccgtacgttctcggctctgcccaccagggctgcctgcctccgttcccggcggacgtgttcatgattccccagtacggctacctaacactcaacaacggtagtcaggccgtgggacgctcctccttctactgcctggaatactttccttcgcagatgctgagaaccggcaacaacttccagtttacttacaccttcgaggacgtgcctttccacagcagctacgcccacagccagagcttggaccggctgatgaatcctctgattgaccagtacctgtactacttgtctcggactcaaacaacaggaggcacggcaaatacgcagactctgggcttcagccaaggtgggcctaatacaatggccaatcaggcaaagaactggctgccaggaccctgttaccgccaacaacgcgtctcaacgacaaccgggcaaaacaacaatagcaactttgcctggactgctgggaccaaataccatctgaatggaagaaattcattggctaatcctggcatcgctatggcaacacacaaagacgacaaggagcgtttttttcccagtaacgggatcctgatttttggcaaacaaaatgctgccagagacaatgcggattacagcgatgtcatgctcaccagcgaggaagaaatcaaaaccactaaccctgtggctacagaggaatacggtatcgtggcagataacttgcagcagcaaaacacggctcctcaaattggaactgtcaacagccagggggccttacccggtatggtctggcagaaccgggacgtgtacctgcagggtcccatctgggccaagattcctcacacggacggcaacttccacccgtctccgctgatgggcggctttggcctgaaacatcctccgcctcagatcctgatcaagaacacgcctgtacctgcggatcctccgaccaccttcaaccagtcaaagctgaactctttcatcacgcaatacagcaccggacaggtcagcgtggaaattgaatgggagctgcagaaggaaaacagcaagcgctggaaccccgagatccagtacacctccaactactacaaatctacaagtgtggactttgctgttaatacagaaggcgtgtactctgaaccccaccccattggcacccgttacctcacccgtcccctg

SEQ ID NO: 1728 - DNA, 2211 bp, Artificial Sequence
  Description of Artificial Sequence: Synthetic polynucleotide
atggctgccgatggttatcttccagattggctcgaggacactctctctgaaggaataagacagtggtggaagctcaaacctggcccaccaccaccaaagcccgcagagcggcataaggacgacagcaggggtcttgtgcttcctgggtacaagtacctcggacccttcaacggactcgacaagggagagccggtcaacgaggcagacgccgcggccctcgagcacgacaaagcctacgaccagcagctccaagcgggtgacaatccgtacctgcggtataaccacgccgacgccgagtttcaggagcgtcttcaaggagatacgtcttttgggggcaacctcggacgagcagtcttccaggccaaaaagaggcttcttgaacctcttggtctggttgaggaagcggctaagacggctcctggaaagaagaggcctgtagagcagtctcctcaggaaccggactcctccgcgggtattggcaaatcgggtgcacagcccgctaaaaagagactcaatttcggtcagactggcgacacagagtcagtcccagaccctcaaccaatcggagaacctcccgcagccccctcaggtgtgggatctcttacaatggcttcaggtggtggcgcaccagtggcagacaataacgaaggtgccgatggagtgggtagttcctcgggaaattggcattgcgattcccaatggctgggggacagagtcatcaccaccagcacccgaacatgggccttgcccacctataacaaccacctctacaagcaaatctccagtgcttcaacgggggccagcaacgacaaccactacttcggctacagcaccccctgggggtattttgacttcaaccgcttccactgccacttctcaccacgtgactggcagcgactcatcaacaacaactggggattccggcccaagagactcagcttcaagctcttcaaccatccaggtcaaggaggtcacgcagaatgaaggcaccaagaccatcgccaataacctcaccagcacatccaggtgtttacggactcggagtaccagctgccgtacgttctcggctctgcccaccagggctgcctgcctccgttcccggcggacgtgttcatgattccccagtacggctacctaacactcaacaacggtagtcaggccgtgggacgctcctccttctactgcctggaatactttccttcgcagatgctgagaaccggcaacaacttccagttcacttacaccttcgaggacgtgcctttccacagcagctacgcgcacagccagagcttggaccggctgatgaatcctctgattgaccagtacctgtactacttgtctcggactcaaacaacaggaggcacggcaaatacgcagactctgggcttcagccaaggtgggcctaatacaatggccaatcaggcaaagaactggctgccaggaccctgttaccgccaacaacgcgtctcaacgacaaccgggcaaaacaacaatagcaactttgcctggactgctgggaccaaataccatctgaatggaagaaattcattgggtaatcctggcatcgctatggcaacacacaaagacgacaaggagcgtttttttcccagtaacgggatcctgatttttggcaaacaaaatgctgccagagacaatgcggattacagcgatgtcatgctcaccagcgaggaagaaatcaaaaccactaaccctgtggctacagaggaatacggtatcgtggcagataacttgcagcagcaaaacacggctcctcaaattggaactgtcaacagccagggggccttacccggtatggtctggcagaaccgggacgtgtacctgcagggtcccatctgggccaagattcctcacacggacggcaacttccacccgtctccgctgatgggcggctttggcctgaaacatcctccgcctcagatcctcatcaaaaacacacctgtacctgcggatcctccaacggccttcaaccagtcaaagctgaactctttcatcacgcaatacagcaccggacaggtcagcgtggaaattgaatgggagctgcagaaggaaaacagcaagcgctggaaccccgagatccagtacacctccaactactacaaatctacaagtgtggactttgctgttaatacagaaggcgtgtactctgaaccccaccccattggcacccgttacctcacccgtcccctgtaa

SEQ ID NO: 1729 - DNA, 2214 bp, Artificial Sequence
  Description of Artificial Sequence: Synthetic polynucleotide
atggctgccgatggttatcttccagattggctcgaggacaacctctctgagggcattcgcgagtggtgggacttgaaacatggagccccgaaacccaaagccaaccagcaaaagcaggacgacggccggggtctggtgcttcctggctacaagtacctcggacccttcaacggactcgacaagggggagcccgtcaacgcggcggatgcagcggccctcgagcacgacaaggcctacgaccagcagctcaaagcgggtgacaatccgtacctgcggtataaccacgccgacgccgagtttcaggagcgtctgcaagaagatacgtcttttgggggcaacctcgggcgagcagtcttccaggccaagaagagggttctcgaaccttttggtctggttgaggaaggtgctaagacggctcctggaaagaaacgtccggtagagcagtcgccacaagagccagactcctcctcgggcattggcaagacaggccagcagcccgctaaaaagagactcaattttggtcagactggcgactcagagtcagtccccgacccacaacctctcggagaacctccagcaacccccgctgctgtgggacctactacaatggcttcaggcggtggcgcaccaatggcagacaataacgaaggcgccgacggagtgggtaatgcctcaggaaattggcattgcgattccacatggctgggcgacagagtcatcaccaccagcacccgaacatgggccttgcccacctataacaaccacctctacaagcaaatctccaacgggacttcgggaggaagcaccaacgacaacacctacttcggctacagcaccccctgggggtattttgactttaacagattccactgccacttctcaccacgtgactggcagcgactcatcaacaacaactggggattccggcccaagagactcaacttcaaactcttcaacatccaagtcaaggaggtcacgcagaatgaaggcaccaagaccatcgccaataacctcaccagcaccatccaggtgtttacggactcggagtaccagctgccgtacgttctcggctccgcccaccagggctgcctgcctccgttcccggcggacgtgttcatgattccccagtacggctacctaacactcaacaacggtagtcaggccgtgggacgctcctccttctactgcctggaatactttccttcgcagatgctgagaacgggcaacaactttaccttcagctacacctttgaggacgttcctttccacagcagctacgctcacagccagagtctggaccgtctcatgaatcctctgattgaccagtacctgtactacttgtctcggactcaaacaacaggaggcacggcaaatacgcagactctgggcttcagccaaggtgggcctaatacaatggccaatcaggcaaagaactggctgccaggaccctgttaccgccaacaacgcgtctcaacgacaaccgggcaaaacaacaatagcaactttgcctggactgctgggaccaaataccatctgaatggaagaaattcattggctaatcctggcatcgctatggcaacacacaaagacgacaaggagcgtttttttcccagtaacgggatcctgatttttggcaaacaaaatgctgccagagacaatgcggattacagcgatgtcatgctcaccagcgaggaagaaatcaaaaccactaaccctgtggctacagaggaatacggtatcgtggcagataacttgcagcagcaaaacacggctcctcaaattggaactgtcaacagccagggggccttacccggtatggtctggcagaaccgggacgtgtacctgcagggtcccatctgggccaagattcctcacacggacggcaacttccacccgtctccgctgatgggcggctttggcctgaaacatcctccgcctcagatcctgatcaagaacacgcctgtacctgcggatcctccgaccaccttcaaccagtcaaagctgaactctttcatcacgcaatacagcaccggacaggtcagcgtggaaattgaatgggagctgcagaaggaaaacagcaagcgctggaaccccgagatccagtacacctccaactactacaaatctacaagtgtggactttgctgttaatacagaaggcgtgtactctgatccccaccccattggcacccgttacctcacccgtcccctgtaa

SEQ ID NO: 1730 - DNA, 2214 bp, Artificial Sequence
  Description of Artificial Sequence: Synthetic polynucleotide
atggctgccgatggttatcttccagattggctcgaggacaacctctctgagggcattcgcgagtggtgggcgctgaaacctggagccccgaagcccaaagccaaccagcaaaagcaggacgacggccggggtctggtgcttcctggctacaagtacctcggacccttcaacggactcgacaaaggagagccggtcaacgaggcggacgcggcagccctcgaacacgacaaggcctacgaccagcagctcaaagcgggtgacaatccgtacctgcggtataaccacgccgacgccgagtttcaggagcgtctgcaagaagatacgtcttttgggggcaacctcgggcgagcagtcttccaggccaagaagcgggttctcgaacctctcggtctggttgaggaaggcgctaagacggctcctggaaagaagagaccggtagagccatcaccccagcgttctccagactcctctacgggcatcggcaagaaaggccagcagcccgccagaaaaagactcaattttggtcagactggcgactcagagtcagttccagaccctcaacctctcggagaacctccagcagcgccctctggtgtgggacctaatacaatggcttcaggcggtggcgcaccaatggcagacaataacgagggcgccgacggagtgggtaattcctcgggaaattggcattgcgattccacatggatgggcgacagagtcatcaccaccagcacccgaacctgggccctgcccacctacaacaaccacctctacaagcaaatctccagtgcttcaacgggggccagcaacgacaaccactacttcggctacagcaccccctgggggtattttgactttaacagattccactgccacttttcaccacgtgactggcagcgactcatcaacaacaactggggattccggcccaagagactcaacttcaagctcttcaacatccaagtcaaggaggtcacgcagaatgaaggcaccaagaccatcgccaataacctcaccagcaccatccaggtgtttacggactcggagtaccagctgccgtacgttctcggctctgcccaccagggctgcctgcctccgttcccggcggacgtgttcatgattccccagtacggctacctaacactcaacaacggtagtcaggccgtgggacgctcctccttctactgcctggaatactttccttcgcagatgctgagaaccggcaacaacttccagtttacttacaccttcgaggacgtgcctttccacagcagctacgcgcacagccagagcttggaccggctgatgaatcctctgattgaccagtacctgtactacttgtctcggactcaaacaacaggaggcacggcaaatacgcagactctgggcttcagccaaggtgggcctaatacaatggccaatcaggcaaagaactggctgccaggaccctgttaccgccaacaacgcgtctcaacgacaaccgggcaaaacaacaatagcaactttgcctggactgctgggaccaaataccatctgaatggaagaaattcattggctaatcctggcatcgctatggcaacacacaaagacgacaaggagcgtttttttcccagtaacgggatcctgatttttggcaaacaaaatgctgccagagacaatgcggattacagcgatgtcatgctcaccagcgaggaagaaatcaaaaccactaaccctgtggctacagaggaatacggtatcgtggcagataacttgcagcagcaaaacacggctcctcaaattggaactgtcaacagccagggggccttacccggtatggtctggcagaaccgggacgtgtacctgcagggtcccatctgggccaagattcctcacacggacggcaacttccacccgtctccgctgatgggcggctttggcctgaaacatcctccgcctcagatcctgatcaagaacacgcctgtacctgcggatcctccgaccaccttcaaccagtcaaagctgaactctttcatcacacaatacagcaccggacaggtcagcgtggaaattgaatgggagctgcagaaggaaaacagcaagcgctggaaccccgagatccagtacacctccaactactacaaatctacaagtgtggactttgctgttaatacagaaggcgtgtactctgaaccccaccccattggcacccgttacctcacccgtcccctgtaa

SEQ ID NO: 1731 - DNA, 2211 bp, Artificial Sequence
  Description of Artificial Sequence: Synthetic polynucleotide
  misc_feature (676)..(676): n is a, c, g, or t
atggctgccgatggttatcttccagattggctcgaggacactctctctgaaggaataagacagtggtggaagctcaaacctggcccaccaccaccaaagcccgcagagcggcataaggacgacagcaggggtcttgtgcttcctgggtacaagtacctcggacccttcaacggactcgacaagggagagccggtcaacgaggcagacgccgcggccctcgagcacgacaaagcctacgaccggcagctcgacagcggagacaacccgtacctcaagtacaaccacgccgacgcggagtttcaggagcgccttaaagaagatacgtcttttgggggcaacctcggacgagcagtcttccaggcgaaaaagagggttcttgaacctctgggcctggttgaggaacctgttaagacggctccgggaaaaaagaggccggtagagcagtcgccacaagagccagactcctcctcgggcatcggcaagaaaggccagcagcccgctaaaaagagactcaattttggtcagactggcgactcagagtcagtccccgacccacaacctctcggagaacctccagcaacccccgctgctgtgggacctactacaatggcttcaggcggtggcgcaccaatggcggacaataacgaaggcgccgatggagtgggtaatgcctcangaaattggcattgcgattccacatggctgggcgacagagtcatcaccaccagcacccgaacatgggccttgccacctataacaaccacctctacaagcaaatctccagtgcttcaacgggggcgcagcaacgacaaccactacttcggctacagcaccccctgggggtattttgacttcaacagattccactgccacttctcaccacgtgactggcagcgactcatcaacaacaactggggattccggcctaagcgactcaacttcaagctcttcaacattcaggtcaaagaggttacggacaacaatggagtcaagaccatcgccaataaccttaccagcacggtccaggtcttcacggactcagactatcagctcccgtacgttctcggctctgcccaccagggctgcctgcctccgttcccggcggacgtgttcatgattccccagtacggctacctaacactcaacaacggtagtcaggccgtgggacgctcctccttctactgcctggaatactttccttcgcagatgctgagaaccggcaacaacttccagtttacttacaccttcgaggacgtgcctttccacagcagctacgcccacagccagagcttggaccggctgatgaatcctctgattgaccagtacctgtactacttgtctcggactcaaacaacaggaggcacggcaaatacgcagactctgggcttcagccaaggtgggcctaatacaatggccaatcaggcaaagaactggctgccaggaccctgttaccgccaacaacgcgtctcaacgacaaccgggcaaaacaacaatagcaactttgcctggactgctgggaccaaataccatctgaatggaagaaattcattggctaatcctggcatcgctatggcaacacacaaagacgacaaggagcgtttttttcccagtaacgggatcctgatttttggcaaacaaaatgctgccagagacaatgcggattacagcgatgtcatgctcaccagcgaggaagaaatcaaaaccactaaccctgtggctacagaggaatacggtatcgtggcagataacttgcagcagcaaaacacggctcctcaaattggaactgtcaacagccagggggccttacccggtatggtttggcagaaccgggacgtgtacctgcagggtcccatctgggccaagattcctcacacggacggcaacttccacccgtctccgctgatgggcggctttggcctgaaacatcctccgcctcagatcctgatcaagaacacgcctgtacctgcggatcctccgaccaccttcaaccagtcaaagctgaactctttcatcacacagtactccacgggacaggtcagcgtggaaattgaatgggagctgcagaaggaaaacagcaagcgctggaacccggagatccagtacacttccaactactacaaatctacaaatgtggactttgctgttaacacagaaggcgtgtactctgaaccccaccccattggcacccgttacctcacccgtcccctgtaa

SEQ ID NO: 1732 - DNA, 2211 bp, Artificial Sequence
  Description of Artificial Sequence: Synthetic polynucleotide
  misc_feature (715)..(715): n is a, c, g, or t
atggctgccgatggttatcttccagattggctcgaggacaacctctctgagggcattcgcgagtggtgggacttgaaacctggagccccgaaacccaaagccaaccagcaaaagcaggacgacggccggggtctggtgcttcctggctacaagtacctcggacccttcaacggactcgacaagggggagcccgtcaacgcggcggatgcagcggccctcgagcacgacaaggcctacgaccagcagctccaagcgggtgacaatccgtacctgcggtataaccacgccgacgccgagtttcaggagcgtcttcaaggagatacgtcttttgggggcaacctcggacgagcagtcttccaggccaagaagcgggttctcgaacctctcggtctggttgaggaagcggctaagacggctcctggaaagaagaggcctgtagagcagtctcctcaggaaccggactcctccgcgggtattggcaaatcgggtgcacagcccgctaaaaagagactcaatttcggtcagactggcgacacagagtcagtcccagaccctcaaccaatcggagaacctcccgcagccccctctggtgtgggacctaatacaatggctgcaggcggtggcgcaccaatggcagacaataacgaaggcgccgatggagtgggtagttcctcgggaaattggcattgcgattccacatggctgggcgacagantcatcaccaccagcacccgaacctgggccctgcccacctataacaaccatctctacaagcaaatctccagtgcttcaacgggggccagcaacgacaaccactacttcggctacagcaccccctgggggtattttgacttcaacagattccactgccacttctcaccacgtgactggcagcgactcatcaacaacaactggggattccggcctaagcgactcaacttcaagctcttcaacattcaggtcaaagaggttacggacaacaatggagtcaagaccatcgccaataaccttaccagcacggtccaggtcttcacggactcggagtaccagttgccgtacgtcctcggctctgcgcaccagggctgcctgcctccgttcccggcggacgtgttcatgattccgcagtacggctacctaacgctcaacaatggcagccaggcagtgggacggtcatccttttactgcctggaatatttcccatcgcagatgctgagaacgggcaacaactttaccttcagctacacttttgaggacgttcctttccacagcagctacgctcacagccagagtctggaccgtctcatgaatcctctgattgaccagtacctgtactacttgtctcggactcaaacaacaggaggcacggcaaatacgcagactctgggcttcagccaaggtgggcctaatacaatggccaatcaggcaaagaactggctgccaggaccctgttaccgccaacaacgcgtctcaacgacaaccggacaaaacaacaatagcaactttgcctggactgctgggaccaaataccatctgaatggaagaaattcattggctaatcctggcatcgctatggcaacacacaaagacgacaaggagcgtttttttcccagtaacgggatcctgatttttggcaaacaaaatgctgccagagacaatgcggattacagcgatgtcatgctcaccagcgaggaagaaatcaaaaccactaaccctgtggctacagaggaatacggtatcgtggcagataactttcagcagcaaaacacggctcctcaaattggaactgtcaacagccagggggccttacccggtatggtctggcagaaccgggacgtgtacctgcagggtcccatctgggccaagattcctcacacggacggcaacttccacccgtctccgctgatgggcggctttggcctgaaacatcctccgcctcagatcctgatcaagaacacgcctgtacctgcggatcctccgaccaccttcaaccagtcaaagctgaactctttcatcacgcaatacagcaccggacaggtcagcgtggaaattgaatgggagctgcagaaggaaaacagcaagcgctggaaccccgagatccagtacacctccaactactacaaatctacaagtgtggactttgctgttaatacagaaggcgtgtactctgaaccccaccccattggcacccgttacctcacccgtcccctgtaa

SEQ ID NO: 1733 - DNA, 2211 bp, Artificial Sequence
  Description of Artificial Sequence: Synthetic polynucleotide
atggctgccgatggttatcttccagattggctcgaggacaacctctctgagggcattcgcgagtggtgggcgctgaaacctggagccccgaagcccaaagccaaccagcaaaagcaggacgacggccggggtctggtgcttcctggctacaagtacctcggacccttcaacggactcgacaaaggagagccggtcaacgaggcggacgcggcagccctcgaacacgacaaagcttacgaccagcagctcaaggccggtgacaacccctacctcaagtataaccacgccgacgccgagtttcaggagcgtctgcaagaagatacgtcttttgggggcaacctcgggcgagcagtcttccaggccaaaaagaggcttcttgaacctcttggtctggttgaggaagcggctaagacggctcctggaaagaagaggcctgtagagcagtctcctcaggaaccggactcctccgcgggtattggcaaatcgggtgcacagcccgctaaaaagagactcaatttcggtcagactggcgacacagagtcagtcccagacccacaacctctcggagaacctccagcaacccccgctgctgtgggacctactacaatggcttcaggcggtggcgcaccaatggcggacaataacgaaggcgccgatggagtgggtaatgcctcaggaaattggcattgcgattccacatggctgggcgacagagtcatcaccaccagcacccgaacatgggccttgcccacctataacaaccacctctacaagcaaatctccagtgcttcaacgggggccagcaacgacaaccactacttcggctacagcaccccctgggggtattttgacttcaacagattccactgccacttctcaccacgtgactggcagcgactcatcaacaacaactggggattccggcccaagagactcagcttcaagctcttcaacatccaggtcaaggaggtcacgcagaatgaaggcaccaagaccatcgccaataacctcaccagcaccatccaggtgtttacggactcggagtaccagctgccgtacgttctcggctccgcccaccagggctgcctgcctccgttcccggcggacgtgttcatgattccccagtacggctacctaacactcaacaacggtagtcaggccgtgggacgctcctccttctactgcctggaatactttccttcgcagatgctgagaaccggcaacaacttccagtttacttacaccttcgaggacgtgcctttccacagcagctacgcccacagccagagcttggaccggctgatgaatcctctgattgaccagtacctgtactacttgtctcggactcaaacaacaggaggcacggcaaatacgcagactctgggcttcagccaaggtgggcctaatacaatggccaatcaggcaaagaactggctgccaggaccctgttaccgccaacaacgcgtctcaacgacaaccgggcaaaacaacaatagcaactttgcctggactgctgggaccaaataccatctgaatggaagaaattcattggctaatcctggcatcgctatggcaacacacaaagacgacaaggagcgtttttttcccagtaacgggatcctgatttttggcaaacaaaatgctgccagagacaatgcggattacagcgatgtcatgctcaccagcgaggaagaaatcaaaaccactaaccctgtggctacagaggaatacggtatcgtggcagataacttgcagcagcaaaacacggctcctcaaattggaactgtcaacagccagggggccttacccggtatggtctggcagaaccgggacgtgtacctgcagggtcccatctgggccaagattcctcacacggacggcaacttccacccgtctccgctgatgggcggctttggcctgaaacatcctccgcctcagatcctgatcaagaacacgcctgtacctgcggatcctccgaccaccttcaaccagtcaaagctgaactctttcatcacgcaatacagcaccggacaggtcagcgtggaaattgaatgggagctgcagaaggaaaacagcaagcgctggaaccccgagatccagtacacctccaactactacaaatctacaagtgtggactttgctgttaatacagaaggcgtgtactctgaaccccaccccattggcacccgttacctcacccgtcccctgtaa

SEQ ID NO: 1734 - DNA, 2211 bp, Artificial Sequence
  Description of Artificial Sequence: Synthetic polynucleotide
atggctgccgatggttatcttccagattggctcgaggacactctctctgaaggaataagacagtggtggaagctcaaacctggcccaccaccaccaaagcccgcagagcggcataaggacgacagcaggggtcttgtgcttcctgggtacaagtacctcggacccttcaacggactcgacaagggagagccggtcaacgaggcagacgccgcggccctcgagcacgacaaagcctacgaccagcagctccaagcgggtgacaatccgtacctgcggtataaccacgccgacgccgagtttcaggagcgtcttcaaggagatacgtcttttgggggcaacctcggacgagcagtcttccaggccaaaaagaggcttcttgaacctcttggtctggttgaggaagcggctaagacggctcctggaaagaagaggcctgtagagcagtctcctcaggaaccggactcctccgcgggtattggcaaatcgggtgcacagcccgctaaaaagagactcaatttcggtcagactggcgacacagagtcagtcccagaccctcaaccaatcggagaacctcccgcagccccctcaggtgtgggatctcttacaatggcttcaggtggtggcgcaccagtggcagacaataacgaaggtgccgatggagtgggtagttcctcgggaaattggcattgcgattcccaatggctgggggacagagtcatcaccaccagcacccgaacatgggccttgcccacctataacaaccacctctacaagcaaatctccagtgcttcaacgggggccagcaacgacaaccactacttcggctacagcaccccctgggggtattttgacttcaaccgcttccactgccacttctcaccacgtgactggcagcgactcatcaacaacaactggggattccggcccaagagactcagcttcaagctcttcaacatccaggtcaaggaggtcacgcagaatgaaggcaccaagaccatcgccaataacctcaccagcaccatccaggtgtttacggactcggagtaccagctgccgtacgttctcggctctgcccaccagggctgcctgcctccgttcccggcggacgtgttcatgattccccagtacggctacctaacactcaacaacggtagtcaggccgtgggacgctcctccttctactgcctggaatactttccttcgcagatgctgagaaccggcaacaacttccagtttacttacaccttcgaggacgtgcctttccacagcagctacgcccacagccagagcttggaccggctgatgaatcctctgattgaccagtacctgtactacttgtctcggactcaaacaacaggaggcacggcaaatacgcagactctgggcttcagccaaggtgggcctaatacaatggccaatcaggcaaagaactggctgccaggaccctgttaccgccaacaacgcgtctcaacgacaaccgggcaaaacaacaatagcaactttgcctggactgctgggaccaaataccatctgaatggaagaaattcattggctaatcctggcatcgctatggcaacacacaaagacgacaaggagcgtttttttcccagtaacgggatcctgatttttggcaaacaaaatgctgccagagacaatgcggattacagcgatgtcatgctcaccagcgaggaagaaatcaaaaccactaaccctgtggctacagaggaatacggtatcgtggcagataacttgcagcagcaaaacacggctcctcaaattggaactgtcaacagccagggggccttacccggtatggtctggcagaaccgggacgtgtacctgcagggtcccatctgggccaagattcctcacacggacggcaacttccacccgtctccgctgatgggcggctttggcctgaaacatcctccgcctcagatcctgatcaagaacacgcctgtacctgcggatcctccgaccaccttcaaccagtcaaagctgaactctttcatcacgcaatacagcaccggacaggtcagcgtggaaattgaatgggagctgcagaaggaaaacagcaagcgctggaaccccgagatccagtacacctccaactactacaaatctacaagtgtggactttgctgttaatacagaaggcgtgtactctgaaccccaccccattggcacccgttacctcacccgtcccctgtaa

SEQ ID NO: 1735 - DNA, 2217 bp, Artificial Sequence
  Description of Artificial Sequence: Synthetic polynucleotide
atggctgccgatggttatcttccagattggctcgaggacaacctctctgagggaataagacagtggtggaagctcaaacctggcccaccaccaccaaagcccgcagagcggcataaggacgacagcaggggtcttgtgcttcctgggtacaagtacctcggacccttcaacggactcgacaagggagagccggtcaacgcggcggacgcagcggccctcgagcacgacaaggcctacgaccagcagctcaaagcgggtgacaatccgtacctgcggtataaccacgccgacgccgagtttcaggagcgtctgcaagaagatacgtcttttgggggcaacctcgggcgagcagtcttccaggccaagaagcgggttctcgaacctctcggtctggttgaggaaggcgctaagacggctcctggaaagaagagaccggtagagccatcaccccagcgttctccagactcctctacgggcatcggcaagaaaggccagcagcccgctaaaaagagactcaattttggtcagactggcgactcagagtcagtccccgacccacaacctctcggagaacctccagcaacccccgctgctgtgggacctactacaatggcttcaggcggtggcgcaccaatggcagacaataacgaaggcgccgacggagtgggtaatgcctcaggaaattggcattgcgattccacatggctgggggacagagtcatcaccaccagcacccgaacctgggccctgcccacctacaacaaccacctctacaagcaaatctccaacgggacttcgggaggaagcaccaacgacaacacctacttcggctgcgtcacgccctgggggtattttgactttaacaaattccactgccacttttcaccggatgactggcaacgactcatcaacaacggctggggattccggactaagcgactcaacttcaagctcttcagcatgaaagtcaaaaagggtacggacaacactggaatcaagaccatcgcgaataaccttaccaacacggtccatgtcttcgcggactcggagtaccagttgccgtacgtcctcggctctgcgcaccagggctgcctccctccgttcccggcggacgtgttcatgattccgcagtacggctacctaacgctcaacaatggcagccaggcagtgggacggtcatccttttactgcctggaatatttcccatcgcagatgctgagaacgggcaacaactttaccttcagctacacctttgaggacgttcctttccacagcagctacgctcacagccagagtctggaccgtctcatgaatcctctgattgaccagtacctgtactacttgtctcggactcaaacaacaggaggcacggcaaatacgcagactctgggcttcagccaaggtgggcctaatacaatggccaatcaggcaaagaactggctgccaggaccctgttaccgccaacaacgcgtctcaacgacaaccgggcaaaacaacaatagcaactttgcctggactgctgggaccaaataccatctgaatggaagaaattcattggctaatcctggcatcgctatggcaacacacaaagacgacaaggagcgtttttttcccagtaacgggatcctgatttttggcaaacaaaatgctgccagagacaatgcggattacagcgatgtcatgctcaccagcgaggaagaaatcaaaaccactaaccctgtggctacagaggaatacggtatcgtggcagataacttgcagcagcaaaacacggctcctcaaattggaactgtcaacagccagggggccttacccggtatggtctggcagaaccgggacgtgtacctgcagggtcccatctgggccaagattcctcacacggacggcaacttccacccgtctccgctgatgggcggctttggcctgaaacatcctccgcctcagatcctgatcaagaacacgcctgtacctgcggatcctccgaccaccttcaaccagtcaaagctgaactctttcatcacgcaatacagcaccggacaggtcagcgtggagatcgagtgggagctgcagaaggaaaacagcaagcgctggaacccggagatccagtacacctccaactactacaaatctacaagtgtggactttgctgttaatacagaaggcgtgtactctgaaccccaccccattggcacccgttacctcacccgtcccctgtaa

SEQ ID NO: 1736 - DNA, 2214 bp, Artificial Sequence
  Description of Artificial Sequence: Synthetic polynucleotide
atggctgccgatggttatcttccagattggctcgaggacactctctctgaaggaataagacagtggtggaagctcaaacctggcccaccaccaccaaagcccgcagagcggcataaggacgacagcaggggtcttgtgcttcctgggtacaagtacctcggacccttcaacggactcgacaagggggagcccgtcaacgcggcggacgcagcggccctcgagcacgacaaggcctacgaccagcagctcaaagcgggtgacaatccgtacctgcggtataaccacgccgacgccgagtttcaggagcgtctgcaagaagatacgtcttttgggggcaacctcgggcgagcagtcttccaggccaagaagcgggttctcgaacctctcggtctggttgaggaaggcgctaagacggctcctggaaagaagagaccggtagagccatcaccccagcgttctccagactcctctacgggcatcggcaagaaaggccagcagcccgcgaaaaagagactcaactttgggcagactggcgactcagagtcagtgcccgaccctcaaccaatcggagaaccccccgcaggcccctctggtctgggatctggtacaatggctgcaggcggtggcgctccaatggcagacaataacgaaggcgccgatggagtgggtagttcctcgggaaattggcattgcgattccacatggctgggggacagagtcatcaccaccagcacccgaacctgggccctgcccacctacaacaaccacctctacaaacaaatttccagcgcttcaacgggagcctcgaacgacaatcactactttggctacagcaccccctgggggtattttgacttcaacagattccactgccacttctcaccacgtgactggcagcgactcatcaacaacaactggggattccggcctaagcgactcaacttcaagctcttcaacattcaggtcaaagaggttacggacaacaatggagtcaagaccatcgccaataaccttaccagcacggtccaggtcttcacggactcggagtaccagttgccgtacgtcctcggctctgcgcaccagggctgcctccctccgttcccggcggacgtgttcatgattccgcagtacggctacctaacgctcaacaatggcagccaggcagtgggacggtcatccttttactgcctggaatatttcccatcgcagatgctgagaacgggcaacaactttaccttcagctacacctttgaggacgttcctttccacagcagctacgctcacagccagagtctggaccgtctcatgaatcctctgattgaccagtacctgtactacttgtctcggactcaaacaacaggaggcacggcaaatacgcagactctgggcttcagccaaggtgggcctaatacaatggccaatcaggcaaagaactggctgccaggaccctgttaccgccaacaacgcgtctcaacgacaaccgggcaaaacaacaatagcaactttgcctggactgctgggaccaaataccatctgaatggaagaaattcattggctaatcctggcatcgctatggcaacacacaaagacgacaaggagcgtttttttcccagtaacgggatcctgatttttggcaaacaaaatgctgccagagacaatgcggattacagcgatgtcatgctcaccagcgaggaagaaatcaaaaccactaaccctgtggctacagaggaatacggtatcgtggcagataacctgcagcagcaaaacacggctcctcaaattggaactgtcaacagccagggggccttacccggtatggtctggcagaaccgggacgtgtacctgcagggtcccatctgggccaagattcttcacacggacggcaactttcacccttctccgctgatgggagggtttggaatgaagcacccgcctcctccgatcctgatcaagaacacgcctgtacctgcggatcctccgaccaccttcaaccagtcaaagctgaactctttcatcacgcaatacagcaccggacaggtcagcgtggaaattgaatgggagctgccgaaggaaaacagcaagcgctggaaccccgagatccagtacacctccaactactacaaatctacaagtgtggactttgctgttaatacagaaggtgtgtactatgaaccccaccccattggcacccgttacctcacccctcccctgtaa

SEQ ID NO: 1737 - DNA, 2214 bp, Artificial Sequence
  Description of Artificial Sequence: Synthetic polynucleotide
atggctgccgatggttatcttccagattggctcgaggacaacctctctgagggcattcgcgagtggtgggcgctgaaacctggagccccgaagcccaaagccaaccagcaaaagcaggacgacggccggggtctggtgcttcctggctacaagtacctcggacccttcaacggactcgacaagggggagcccgtcaacgcggcggacgcagcggccctcgagcacgacaaggcctacgaccagcagctcaaagcgggtgacaatccgtacctgcggtataaccacgccgacgccgagtttcaggagcgtctgcaagaagatacgtcttttgggggcaacctcgggcgagcagtcttccaggccaagaagcgggttctcgaacctctcggtctggttgaggaaggcgctaagacggctcctggaaagaagagaccggtagagccatcaccccagcgctctccagactcctctacgggcatcggcaagaaaggccaacagcccgccagaaaaagactcaattttggtcagactggcgactcagagtcagttccagaccctcaacctctcggagaacctccagcagcgccctctggtgtggcacctaatacaatggctgcaggcggtggcgcaccaatggcagacaataacgaaggcgccgacggagtgggtaatgcctcaggaaattggcattgcgattccacatggctgggcgacagagtcatcaccaccagcacccgaacatgggccttgcccacctataacaaccacctctacaagcaaatctccagtgcttcaacgggggccagcaacgacaaccactacttcggctacagcaccccctgggggtattttgatttcaacagattccactgccacttttcaccacgtgactggcagcgactcatcacaacaattgggggattccggcctaagcgactcaacttcaagctcttcaacattcaggtcaaagaggttacggacaacaatggagtcaagaccatcgccaataaccttaccagcacggtccaggtcttcacggactcggagtaccagttgccgtacgtcctcggctctgcgcaccagggctgcctccctccgttcccggcggacgtgttcatgattccgcagtacggctacctaacgctcaacaatggcagccaggcagtgggacggtcatccttttactgcctggaatatttcccatcgcagatgctgagaacgggcaacaactttaccttcagctacacctttgaggacgttcctttccacagcagctacgctcacagccagagtctggaccggctgatgaatcctctgattgaccagtacctgtactacttgtctcggactcaaacaacaggaggcacggcaaatacgcagactctgggcttcagccaaggtgggcctaatacaatggccaatcaggcaaagaactggctgccaggaccctgttaccgccaacaacgcgtctcaacgacaaccgggcaaaacaacaatagcaactttgcctggactgctgggaccaaataccatctgaatggaagaaattcattggctaatcctggcatcgctatggcaacacacaaagacgacaaggagcgtttttttcccagtaacgggatcctgatttttggcaaacaaaatgctgccagagacaatgcggattacagcgatgtcatgctcaccagcgaggaagaaatcaaaaccactaaccctgtggctacagaggaatacggtatcgtggcagataacttgcagcagcaaaacacggctcctcaaattggaactgtcaacagccagggggccttacccggtatggtctggcagaaccgggacgtgtacctgcagggtcccatctgggccaagattcctcacacggacggcaacttccacccgtctccgctgatgggcggctttggcctgaaacatcctccgcctcagatcctgatcaagaacacgcctgtacctgcggatcctccgaccaccttcaaccagtcaaagctgaactctttcatcacgcaatacagcaccggacaggtcagcgtggaaattgaatgggagctgcagaaggaaaacagcaagcgctggaaccccgagatccagtacacctccaactactacaaatctacaagtgtggactttgctgttaatacagaaggcgtgtactctgaaccccaccccattggcacccgttacctcacccgtcccctgtaa

SEQ ID NO: 1738 - DNA, 2211 bp, Artificial Sequence
  Description of Artificial Sequence: Synthetic polynucleotide
atggctgccgatggttatcttccagattggctcgaggacactctctctgaaggaataagacagtggtggaagctcaaacctggcccaccaccaccaaagcccgcagagcggcataaggacgacggccggggtctggtgcttcctggctacaagtacctcggacccttcaacggactcgacaagggggagcccgtcaacgcggcggacgcagcggccctcgagcacgacaaggcctacgaccagcagctcaaagcgggtgacaatccgtacctgcggtataaccacgccgacgccgagtttcaggagcgtctgcaagaagatacgtcttttgggggcaacctcggacgagcagtcttccaggcgaaaaagagggttcttgaacctctgggcctggttgaggaacctgttaagacggctccgggaaaaaagaggccggtagagcagtcgccacaagagccagactcctcctcgggcatcggcaagaaaggccagcagcccgctaaaaagagactcaattttggtcagactggcgactcagagtcagtccccgacccacaacctctcggagaacctccagcaacccccgctgctgtgggacctactacaatggcttcaggcggtggcgcaccaatggcagacaataacgaaggcgccgacggagtgggtaatgcctcaggaaattggcattgcgattccacatggatgggcgacagagtcatcaccaccagcacccgaacatgggccttgcccacctataacaaccacctctacaagcaaatctccagtgcttcaacgggggccagcaacgacaaccactacttcggctacagcaccccctgggggtattttgactttaacagattccactgccacttttcaccacgtgactggcagcgactcatcaacaacaactggggattccggcctaagcgactcaacttcaagctcttcaacattcaggtcaaggaggtcacgcagaatgaaggcaccaagaccatcgccaataacctcaccagcaccatccaggtgtttacggactcggagtaccagctgccgtacgttctcggctccgcccaccagggctgcctgcctccgttcccggcggacgtgttcatgatcccccagtacggctacctaacactcaacaacggtagtcaggccgtgggacgctcctccttctactgcctggaatactttccttcgcagatgctgagaaccggcaacaacttccagtttacttacaccttcgaggacgtgcctttccacagcagctacgcgcacagccagagcttggaccggctgatgaatcctctgattgaccagtacctgtactacttgtctcggactcaaacaacaggaggcacggcaaatacgcagactctgggcttcagccaaggtgggcctaatacaatggccaatcacgcaaagaactggctgccaggaccctgttaccgccaacaacgcgtctcaacgacaaccgggcaaaacaacaatagcaactttgcctggactgctgggaccaaataccatctgaatggaagaaattcattggctaatcctggcatcgctatggcaacacacaaagacgacaaggagcgtttttttcccagtaacgggatcctgatttttggcaaacaaaatgctgccagagacaatgcggattacagcgatgtcatgctcaccagcgaggaagaaatcaaaaccactaaccctgtggctacagaggaatacggtatcgtggcagataacttgcagcagcaaaacacggctcctcaaattggaactgtcaacagccagggggccttacccggtatggtctggcagaaccgggacgtgtacctgcagggtcccatctgggccaagattcctcacacggacggcaacttccacccgtctccgctgatgggcggcttcggcctgaaacatcctccgcctcagatcctgatcaagaacacgcctgtacctgcggatcctccgaccaccttcaaccagtcaaagctgaactctttcatcacgcaatacagcaccggacaggtcagcgtggaaattgaatgggagctgcagaaggaaaacagcaagcgctggaaccccgagatccagtacacctccaactactacaaatctacaagtgtggactttgctgttaatacagaaggcgtgtactctgaaccccaccccattggcacccgttacctcacccgtcccctgtaa

SEQ ID NO: 1739 - DNA, 2214 bp, Artificial Sequence
  Description of Artificial Sequence: Synthetic polynucleotide
atggctgccgatggttatcttccagattggctcgaggacaacctctctcagggcattcgcgagtggtgggacttgaaacctggagccccgaaacccaaagccaaccagcaaaagcaggacgacggccggggtctggtgcttcctggctacaagtacctcggacccttcaacggactcgacaagggggagcccgtcaacgcggcggacgcagcggccctcgagcacgacaaggcctacgaccagcagctcaaagcgggtgacaatccgtacctgcggtataaccacgccgacgccgagtttcaggagcgtctgcaagaagatacgtcttttgggggcaacctcggacgagcagtcttccaggccaagaagcgggttctcgaacctctcggtctggttgaggaaggcgctaagacggctcctggaaagaagagaccggtagagccatcaccccagcgttctccagactcctctacgggcatcggcaagaaaggccaacagcccgccagaaaaagactcaattttggtcagactggcgactcagagtcagttccagaccctcaacctctcggagaacctccagcagcgcccgctgctgtgggacctactacaatggcttcaggcggtggcgcaccaatggcagacaataacgaaggcgccgacggagtgggtagttcctcgggaaattggcattgcgattcccaatggctgggggacagagtcatcaccaccagcacccgaacctgggccctgcccacctacaacaaccacctctacaagcaaatctccagtgcttcaacgggggccagcaacgacaaccactacttcggctacagcaccccctgggggtattttgacttcaacagattccactgccacttttcaccacgtgactggcaaagactcatcaacaacaactggggattccggcccaagagactcagcttcaagctcttcaacatccaggtcaaggaggtcacgcagaatgaaggcaccaagaccatcgccaataacctcaccagcaccatccaggtgtttacggactcggagtaccagctgccgtacgttctcggctctgcccaccagggctgcctgcctccgttcccggcggacgtgttcatgattccccagtacgggtacctgactctgaacaatggcagtcaggccgtgggccgttcctccttctactgcctggagtactttccttctcaaatgctgagaaccggcaacaacttccagtttacttacaccttcgaggacgtgcctttccacagcagctacgcccacagccagagcttggaccggctgatgaatcctctgattgaccagtacctgtactacttgtctcggactcaaacaacaggaggcacgacaaatgcgcagactctgggcttcagccaaggtgggcctaatacaatggccaatcaggcaaagaactggctgccaggaccctgttaccgccaacaacgcgtctcaacgacaaccgggcaaaacaacaatagcaactttgcctggactgctgggaccaaataccatctgaatggaagaaattcattggctaatcctggcatcgctatggcaacacacaaagacgacaaggagcgtttttttcccagtaacgggatcctgatttttggcaaacaaaatgctgccagagacaatgcggattacagcgatgtcatgctcaccagcgaggaagaaatcaaaaccactaaccctgtggctacagaggaatacggtatcgtggcagataacttgcagcagcaaaacacggctcctcaaattggaactgtcaacagccagggggccttacccggtatggtctggcagaaccgggacgtgtacctgcagggtcccatctgggccaagattcctcacacggacggcaacttccacccgtctccgctgatgggcggctttggcctgaaacatcctccgcctcagatcctgatcaagaacacgcctgtacctgcggatcctccgaccaccttcaaccagtcaaagctgaactctttcatcacacagtactccacgggacaggtcagcgtggaaattgaatgggagctgcagaaggaaaacagcaagcgctggaacccggagatccagtacacttccaactactacaaatctacaaatgtggactttgctgttaacacagaaggcgtgtactctgaaccccaccccattggcacccgttacctcacccgtcccctgtaa

SEQ ID NO: 1740 - DNA, 2211 bp, Artificial Sequence
  Description of Artificial Sequence: Synthetic polynucleotide
atggctgccgatggttatcttccagattggctcgaggacaacctctctgagggcattcgcgagtggtgggacttgaaacctggagccccgaaacccaaagccaaccagcaaaagcaggacgacggccggggtctggtgcttcctggctacaagtacctcggacccttcaacggactcgacaagggggagcccgtcaacgcggcggacgcagcggccctcgagcacgacaaggcctacgaccagcagctcaaagcgggtgacaatccgtacctgcggtataaccacgccgacgccgagtttcaggagcgtctgcaagaagatacgtcttttgggggcaacctcgggcgagcagtcttccaggccaagaagagggttctcgaaccttttggtctggttgaggaaggcgctaagacggctcctggaaagaaacgtccggtagagcagtcgccacaagagccagactcctcctcgggcatcggcaagacaggccagcagcccgctaaaaagagactcaatttcggtcagactggcgacacagagtcagtcccagaccctcaaccaatcggagaacctcccgcagccccctcaggtgtgggacctaatacaatggctgcaggcggtggcgcaccaatggcagacaataacgaaggcgccgacggagtgggtagttcctcgggaaattggcattgcgattccacatggatgggtgacagagtcatcaccaccagcacccgaacctgggccctgcccacctacaataaccacctctacaagcaaatctccagtgcttcaacgggggccagcaacgacaaccactacttcggctacagcaccccctgggggtattttgacttcaacagattccactgccacttctcaccacgtgactggcagcgactcatcaacaacaactggggattccggcctaagcgactcaacttcaagctcttcaacattcaggtcaaggaggtcacgcagaatgaaggcaccaagaccatcgccaataacctcaccagcaccatccaggtgtttacggactcggagtaccagctgccgtacgttctcggctctgcccaccagggctgcctgcctccgttcccggcggacgtgttcatgattccccagtacggctacctaacactcaacaacggtagtcaggccgtgggacgctcctccttctactgcctggaatactttccttcgcagatgctgagaaccggcaacaacttccagtttacttacaccttcgaggacgtgcctttccacagcagctacgcccacagccagagcttggaccggctgatgaatcctctgattgaccagtacctgtactacttgtctcggactcaaacaacaggaggcacggcaaatacgcagactctgggcttcagccaaggtgggcctaatacaatggccaatcaggcaaagaactggctgccaggaccctgttaccgccaacaacgcgtctcaacgacaaccgggcaaaacaacaatagcaactttgcctggactgctgggaccaaataccatctgaatggaagaaattcattggctaatcctggcatcgctatggcaacacacaaagacgacaaggagcgtttttttcccagtaacgggatcctgatttttggcaaacaaaatgctgccagagacaatgcggattacagcgatgtcatgctcaccagcgaggaagaaatcaaaaccactaaccctgtggctacagaggaatacggtatcgtggcagataacttgcagcagcaaaacacggctcctcaaattggaactgtcaacagccagggggccttacccggtatggtctggcagaaccgggacgtgtacctgcagggtcccatctgggccaagattcctcacacggacggcaacttccacccgtctccgctgatgggcggctttggcctgaaacatcctccgcctcagatcctgatcaagaacacgcctgtacctgcggatcctccgaccaccttcaaccagtcaaagctgaactctttcatcacacagtactccacgggacaggtcagcgtggaaattgaatgggagctgcagaaggaaaacagcaagcgctggaacccggagatccagtacacttccaactactacaaatctacaaatgtggactttgctgttaacacagaaggcgtgtactctgaaccccaccccattggcacccgttacttcacccgtcccctgtaa

SEQ ID NO: 1741 - DNA, 2211 bp, Artificial Sequence
  Description of Artificial Sequence: Synthetic polynucleotide
atggctgccgatggttatcttccagattggctcgaggacaacctctctgagggcattcgcgagtggtgggacttgaaacctggagccccgaaacccaaagccaaccagcaaaagcaggacgacggccggggtctggtgcttcctggctacaagtacctcggacccttcaacggactcgacaagggggagcccgtcaacgcggcggacgcagcggccctcgagcacgacaaggcctacgaccagcagctcaaagcgggtgacaatccgtacctgcggtataaccacgccgacgccgagtttcaggagcgtctgcaagaagatacgtcttttgggggcaacctcgggcgagcagtcttccaggccaagaagcgggttctcgaacctctcggtctggttgaggaaggcgctaagacggctcctggaaagaaacgtccggtagagcagtcgccacaagagccagactcctcctcgggcatcggcaagacaggccagcagcccgctaaaaaaagactcaattttggtcagactggcgactcagagtcagttccagaccctcaacctctcggagaacctccagcaacccccgctgctgtgggacctactacaatggcttcaggtggtggcgcaccaatggcagacaataacgagggcgccgacggagtgggtaattcctcgggaaattggcattgcgattccacatggatgggcgacagagtcatcaccaccagcacccgaacctgggccctgcccacctacaacaatcacctctacaagcaaatctccagtgcttcaacgggggccagcaacgacaaccactacttcggctacagcaccccctgggggtattttgacttcaacagattccactgccacttctcaccacgtgactggcagcgactcatcaacaacaactggggattccggcctaagcgactcaacttcaagctcttcaacattcaggtcaaagaggttacggacaacaatggagtcaagaccatcgccaataaccttaccagcacggtccaggtcttcacggactcggagtaccagttgccgtacgtcctcggctctgcgcaccagggctgcctccctccgttcccggcggacgtgttcatgattccgcagtacggctacctaacgctcaacaacggtagtcaggccgtgggacgctcctccttctactgcctggaatactttccttcgcagatgctgagaaccggcaacaacttccagtttacttacaccttcgaggacgtgcctttccacagcagctacgcccacagccagagcttggaccggctgatgaatcctctgattgaccagtacctgtactacttgtctcggactcaaacaacaggaggcacggcaaatacgcagactctgggcttcagccaaggtgggcctaatacaatggccaatcaggcaaagaactggctgccaggaccctgttaccgccaacaacgcgtctcgacgacaaccgggcaaaacaacaatagcaactttgcctggactgctgggaccaaataccatctgaatggaagaaattcattggctaatcctggcatcgctatggcaacacacaaagacgacaaggagcgtttttttcccagtaacgggatcctgatttttggcaaacaaaatgctgccagagacaatgcggattacagcgatgtcatgctcaccagcgaggaagaaatcaaaaccactaaccctgtggctacagaggaatacggtatcgtggcagataacttgcagcagcaaaacacggctcctcaaattggaactgtcaacagccagggggccttacccggtatggtttggcagaaccgggacgtgtacctgcagggtcccatctgggccaagattcctcacacggacggcaacttccacccgtctccgctgatgggcggctttggcctgaaacatcctccgcctcagatcctgatcaagaacacgcctgtacctgcggatcctccgaccaccttcaaccagtcaaagctgaactctttcatcacacagtactccacgggacaggtcagcgtggaaattgaatgggagctgcagaaggaaaacagcaagcgctggaacccggagatccagtacacttccaactactacaaatctacaaatgtggactttgctgttaacacagaaggcgtgtactctgaaccccaccccattggcacccgttacctcacccgtcccctgtaa

SEQ ID NO: 1742 - DNA, 2211 bp, Artificial Sequence
  Description of Artificial Sequence: Synthetic polynucleotide
atggctgccgatggttatcttccagattggctcgaggacaacctctctgagggcattcgcgagtggtgggacttgaaacctggagccccgaagcccaaagccaaccagcaaaagcaggacgacggccggggtctggtgcttcctggctacaagtacctcggacccttcaacggactcgacaagggggagcccgtcaacgcggcggacgcagcggccctcgagcacgacaaggcctacgaccagcagctcaaagcgggtgacaatccgtacctgcggtataaccacgccgacgccgagtttcaggagcgtctgcaagaagatacgtcttttgggggcaacctcgggcgagcagtcttccaggccaagaagcgggttctcgaacctctcggtctggttgaggaaggcgctaagacggctcctggaaagaaacgtccggtagagcagtcaccacaagagccagactcctcctcgggcatcggcaagacaggccagcagcccgctaaaaagagactcaattttggtcagactggcgactcagagtcagtccccgacccacaacctctcggagaacctccagcaacccccgctgctgtgggacctactacaatggcttcaggcggtggcgcaccaatggcggacaataacgaaggcgccgatggagtgggtaatgcctcaggaaattggcattgcgattccacatggctgggcgacagagtcatcaccaccagcacccgaacatgggccttgcccacctataacaaccacctctacaagcaaatctccagtgcttcaacgggggccagcaacgacaaccactacttcggctacagcaccccctgggggtattttgactttaacagattccactgccacttctcaccacgtgactggcagcgactcatcaacaacaactggggattccggcccaagagactcaacttcaagctcttcaacatccaggtcaaggaggtcacgcagaatgaaggcaccaagaccatcgccaataacctcaccagcaccatccaggtgtttacggactcggagtaccagctgccgtacgttctcggctctgcccaccagggctgcctgcctccgttcccggcggacgtgttcatgattccccagtacggctacctgactctgaacaatggcagtcaggccgtgggccgttcctccttctactgcctagagtactttccttctcaaatgctgagaacgggcaacaactttgagttcagctaccagtttgaggacgtgccttttcacagcagctacgcgcacagccaaagcctggaccggctgatgaatcctctgattgaccagtacctgtactacttgtctcggactcaaacaacaggaggcacggcaaatacgcagactctgggcttcagccaaggtgggcctaatacaatggccaatcaggcaaagaactggctgccaggaccctgttaccgccaacaacgcgtctcaacgacaaccgggcaaaacaacaatagcaactttgcctggactgctgggaccaaataccatatgaatggaagaaattcattggttaatcctggcatcgctatggcaacacacaaagacgacaaggagcgtttttttcccagtaacgggatcctgatttttggcaaacaaaatgttgccagagacaatgcggattacagcgatgtcatgctcaccagcgaggaagaaatcaaaaccactaaccctgtggctacagaggaatacggtattgtggcagataacttgcagcagcaaaacacggctcctcaaattggaactgtcaacagccagggggccttacccggtatggtctggcagaaccgggacgtgtacctgcagggtcccatctgggccaagattcctcacacggacggcaacttccacccgtcgccgctgatgggcggctttggcctgaaacatcctccgcctcagatcctgatcaagaacacgcctgtacctgcggatcctccgaccaccttcaaccagtcaaagctgaactctttcatcacgcaatacagcaccggacaggtcagcgtggaaattgaatgggagctgcagaaggaaaacagcaagcgctggaaccccgagatccagtacacctccaactactacaaatctacaagtgtggactttgctgttaatacagaaggcgtgtactctgaaccccaccccattggcacccgttacctcacccgtcccctgtaa

SEQ ID NO: 1743 - protein, 736 aa, Artificial Sequence
  Description of Artificial Sequence: Synthetic polypeptide
MAADGYLPDWLEDTLSEGIRQWWKLKPGPPPPKPAERHKDDSRGLVLPGYKYLGPFNGLDKGEPVNEADAAALEHDKAYDRQLDSGDNPYLKYNHADAEFQERLKEDTSFGGNLGRAVFQAKKRVLEPLGLVEEPVKTAPGKKRPVEQSPQEPDSSSGIGKKGQQPAKKRLNFGQTGDSESVPDPQPLGEPPATPAAVGPTTMASGGGAPMADNNEGADGVGNASGNWHCDSTWMGDRVITTSTRTWALPTYNNHLYKQISSASTGASNDNHYFGYSTPWGYFDFNRFHCHFSPRDWQRLINNNWGFRPKRLNFRLFNIQVKEVTDNNGVKTIANNLTSTVQVFTDSEYQLPYVLGSAHQGCLPPFPADVFMIPQYGYLTLNNGSQAVGRSSFYCLEYFPSQMLRTGNNFTFSYTFEEVPFHSSYAHSQSLDRLMNPLIDQYLYYLSRTQTTGGTANTQTLGFSQGGPNTMANQAKNWLPGPCYRQQRVSTTTGQNNNSNFAWTAGTKYHLNGRNSLANPGIAMATHKDDKERFFPSNGILIFGKQNAARDNADYSDVMLTSEEEIKTTNPVATEEYGIVADNLQQQNTAPQIGTVNSQGALPGMVWQNRDVYLQGPIWAKIPHTDGNFHPSPLMGGFGLKHPPPQILIKNTPVPADPPTTFNQSKLNSFITQYSTGQVSVEIEWELQKENSKRWNPEIQYTSNYYKSTSVDFAVNTEGVYSEPHPIGTRYLTRPL

SEQ ID NO: 1744 - protein, 736 aa, Artificial Sequence
  Description of Artificial Sequence: Synthetic polypeptide
MAADGYLPDWLEDNLSEGIREWWDLKPASPKPKANQQKQDDGRGLVLPGYKYLGPFNGLDKGEPVNAADAAALEHDKAYDQQLKAGDNPYLRYNHADAEFQERLQEDTSFGGNLGRAVFQAKKRLLEPLGLVEEAAKTAPGKKRPVEQSPQEPDSSAGIGKSGAQPAKKRLNFGQTGGTESVPDPQPLGEPPAAPSGVGPNTMAAGGGAPMADNNEGADGVGSSSGNWHCDSTWLGDRVITTSTRTWALPTYNNHLYKQISSASTGASNDNHYFGYSTPWGYFDFNRFHCHFSPRDWQRLINNNWGFRPKRLSFKLFNIQVKEVTQNEGTKTIANNLTSTIQVFTDSEYQLPYVLGSAHQGCLPPFPADVFMIPQYGYLTLNNGSQAVGRSSFYCLEYFPSQMLRTGNNFQFTYTFEDVPFHSSYAHSQSLDRLMNPLIDQYLYYLSRTQTTGGTANTQTLGFSQGGPNTMANQAKNWLPGPCYRQQRVSTTTGQNNNSNFAWTAGTKYHLNGRNSLANPGIAMATHKDDKERFFPSNGILIFGKQNAARDNADYSDVMLTSEEEIKTTNPVATEEYGIVADNLQQQNTAPQIGTVNSQGALPGMVWQNRDVYLQGPIWAKIPHTDGNFHPSPLMGGFGLKHPPPQILIKNTPVPADPPTTFNQSKLNSFITQYSTGQVSVEIEWELQKENSKRWNPEIQYTSNYYKSTSVDFAVNTEGVYSEPHPIGTRYLTRPL

SEQ ID NO: 1745 - protein, 736 aa, Artificial Sequence; identical to SEQ ID NO: 1684
  Description of Artificial Sequence: Synthetic polypeptide

SEQ ID NO: 1746 - protein, 736 aa, Artificial Sequence
  Description of Artificial Sequence: Synthetic polypeptide
MAADGYLPDWLEDNLSEGIREWWDLEPGAPKPKANQQKQDDGRGLVLPGYKYLGPFNGLDKGEPVNAADAAALEHDKAYDQQLKAGDNPYLRYNHADAEFQERLQEDTSFGGNLGRAVFQAKKRVLEPLGLVEEGAKTAPGKKRPVEQSPQEPDSSSGIGKTGQQPAKKRLNFGQTGDSESVPDPQPLGEPPATPAAVGPTTMASGGGAPMADNNEGADGVGNASGNWHCDSTWLGDRVITTSTRTWALPTYNNHLYKQISSASTGASNDNHYFGYSTPWGYFDFNRFHCHFSPRDWQRLINNNWGFRPKRLNFKLFNIQVKEVTDNNGVKTIANNLTSTVQVFTDSEYQLPYVLGSAHQGCLPPFPADVFMIPQYGYLTLNNGSQAVGRSSFYCLEYFPSQMLRTGNNFQFTYTFEDVPFHSSYAHSQSLDRLMNPLIDQYLYYLSRTQTTGGTANTQTLGFSQGGPNTMANQAKNWLPGPCYRQQRVSTTTGQNNNSNFAWTAGTKYHLNGRNSLANPGIAMATHKDDKERFFPSNGILIFGKQNAARDNADYSDVMLTSEEEIKTTNPVATEEYGIVADNLQQQNTAPQIGTVNSQGALPGMVWQNRDVYLQGPIWAKIPHTDGNFHPSPLMGGFGLKHPPPQILIKNTPVPADPPTTFNQSKLNSFITQYSTGQVSVEIEWELQKENSKRWNPEIQYTSNYYKSTSVDFAVNTEGVYSEPHPIGTRYLTRPL

SEQ ID NO: 1747 - protein, 736 aa, Artificial Sequence; identical to SEQ ID NO: 1684
  Description of Artificial Sequence: Synthetic polypeptide

SEQ ID NO: 1748 - protein, 736 aa, Artificial Sequence
  Description of Artificial Sequence: Synthetic polypeptide
MAADGYLPDWLEDTLSEGIRQWWKLKPGPPPPKPAERHKDDSRGLVLPGYKYLGPFNGLDKGEPVNEADAAALEHDKAYDRQLDSGDNPYLKYNHADAEFQERLKEDTSFGGNLGRAVFQAKKRVLEPLGLVEEPVKTAPGKKRPVEQSPQEPDSSSGIGKKGQQPAKKRLNFGQTGDSESVPDPQPLGEPPATPAAVGPTTMASGGGAPMADNNEGADGVGNASGNWHCDSTWLGDRVITTSTRTWALPTYNNHLYKQISSASTGASNDNHYFGYSTPWGYFDFNRFHCHFSPRDWQRLINNNWGFRPKRLNFKLFNIQVKEVTDNNGVKTIANNLTSTVQVFTDSDYQLPYVLGSAHQGCLPPFPADVFMIPQYGYLTLNNGSQAVGRSSFYCLEYFPSQMLRTGNNFQFTYTFEDVPFHSSYAHSQSLDRLMNPLIDQYLYYLSRTQTTGGTANTQTLGFSQGGPNTMANQAKNWLPGPCYRQQRVSTTTGQNNNSNFAWTAGTKYHLNGRNSLANPGIAMATHKDDKERFFPSNGILIFGKQNAARDNADYSDVMLTSEEEIKTTNPVATEEYGIVADNLQQQNTAPQIGTVNSQGALPGMVWQNRDVYLQGPIWAKIPHTDGNFHPSPLMGGFGLKHPPPQILIKNTPVPADPPTTFNQSKLNSFITQYSTGQVSVEIEWELQKENSKRWNPEIQYTSNYYKSTSVDFAVNTEGVYSEPHPIGTRYLTRPL

SEQ ID NO: 1749 - protein, 734 aa, Artificial Sequence
  Description of Artificial Sequence: Synthetic polypeptide
MAADGYLPDWLEDTLSEGIRQWWKLKPGPPPPKPAERHKDDSRGLVLPGYKYLGPFNGLDKGEPVNEADAAALEHDKAYDQQLQAGDNPYLRYNHADAEFQERLQGDTSFGGNLGRAVFQAKKRLLEPLGLVEEAAKTAPGKKRPVEQSPQEPDSSAGIGKSGAQPAKKRLNFGQTGDTESVPDPQPIGEPPAAPSGVGSLTMASGGGAPVADNNEGADGVGSSSGNWHCDSQWLGDRVITTSTRTWALPTYNNHLYKQISSASTGASNDNHYFGYSTPWGYFDFNRFHCHFSPRDWQRLINNNWGFRPKRLSFKLFNHPGQGGHAERHQDHRQPHQHIQVFTDSEYQLPYVLGSAHQGCLPPFPADVFMIPQYGYLTLNNGSQAVGRSSFYCLEYFPSQMLRTGNNFQFTYTFEDVPFHSSYAHSQSLDRLMNPLIDQYLYYLSRTQTTGGTANTQTLGFSQGGPNTMANQAKNWLPGPCYRQQRVSTTTGQNNNSNFAWTAGTKYHLNGRNSLGNPGIAMATHKDDKERFFPSNGILIFGKQNAARDNADYSDVMLTSEEEIKTTNPVATEEYGIVADNLQQQNTAPQIGTVNSQGALPGMVWQNRDVYLQGPIWAKIPHTDGNFHPSPLMGGFGLKHPPPQILIKNTPVPADPPTAFNQSKLNSFITQYSTGQVSVEIEWELQKENSKRWNPEIQYTSNYYKSTSVDFAVNTEGVYSEPHPIGTRYLTRPL

SEQ ID NO: 1750 - protein, 737 aa, Artificial Sequence
  Description of Artificial Sequence: Synthetic polypeptide
MAADGYLPDWLEDNLSEGIREWWDLKHGAPKPKANQQKQDDGRGLVLPGYKYLGPFNGLDKGEPVNAADAAALEHDKAYDQQLKAGDNPYLRYNHADAEFQERLQEDTSFGGNLGRAVFQAKKRVLEPFGLVEEGAKTAPGKKRPVEQSPQEPDSSSGIGKTGQQPAKKRLNFGQTGDSESVPDPQPLGEPPATPAAVGPTTMASGGGAPMADNNEGADGVGNASGNWHCDSTWLGDRVITTSTRTWALPTYNNHLYKQISNGTSGGSTNDNTYFGYSTPWGYFDFNRFHCHFSPRDWQRLINNNWGFRPKRLNFKLFNIQVKEVTQNEGTKTIANNLTSTIQVFTDSEYQLPYVLGSAHQGCLPPFPADVFMIPQYGYLTLNNGSQAVGRSSFYCLEYFPSQMLRTGNNFTFSYTFEDVPFHSSYAHSQSLDRLMNPLIDQYLYYLSRTQTTGGTANTQTLGFSQGGPNTMANQAKNWLPGPCYRQQRVSTTTGQNNNSNFAWTAGTKYHLNGRNSLANPGIAMATHKDDKERFFPSNGILIFGKQNAARDNADYSDVMLTSEEEIKTTNPVATEEYGIVADNLQQQNTAPQIGTVNSQGALPGMVWQNRDVYLQGPIWAKIPHTDGNFHPSPLMGGFGLKHPPPQILIKNTPVPADPPTTFNQSKLNSFITQYSTGQVSVEIEWELQKENSKRWNPEIQYTSNYYKSTSVDFAVNTEGVYSDPHPIGTRYLTRPL

SEQ ID NO: 1751 - protein, 737 aa, Artificial Sequence
  Description of Artificial Sequence: Synthetic polypeptide
MAADGYLPDWLEDNLSEGIREWWALKPGAPKPKANQQKQDDGRGLVLPGYKYLGPFNGLDKGEPVNEADAAALEHDKAYDQQLKAGDNPYLRYNHADAEFQERLQEDTSFGGNLGRAVFQAKKRVLEPLGLVEEGAKTAPGKKRPVEPSPQRSPDSSTGIGKKGQQPARKRLNFGQTGDSESVPDPQPLGEPPAAPSGVGPNTMASGGGAPMADNNEGADGVGNSSGNWHCDSTWMGDRVITTSTRTWALPTYNNHLYKQISSASTGASNDNHYFGYSTPWGYFDFNRFHCHFSPRDWQRLINNNWGFRPKRLNFKLFNIQVKEVTQNEGTKTIANNLTSTIQVFTDSEYQLPYVLGSAHQGCLPPFPADVFMIPQYGYLTLNNGSQAVGRSSFYCLEYFPSQMLRTGNNFQFTYTFEDVPFHSSYAHSQSLDRLMNPLIDQYLYYLSRTQTTGGTANTQTLGFSQGGPNTMANQAKNWLPGPCYRQQRVSTTTGQNNNSNFAWTAGTKYHLNGRNSLANPGIAMATHKDDKERFFPSNGILIFGKQNAARDNADYSDVMLTSEEEIKTTNPVATEEYGIVADNLQQQNTAPQIGTVNSQGALPGMVWQNRDVYLQGPIWAKIPHTDGNFHPSPLMGGFGLKHPPPQILIKNTPVPADPPTTFNQSKLNSFITQYSTGQVSVEIEWELQKENSKRWNPEIQYTSNYYKSTSVDFAVNTEGVYSEPHPIGTRYLTRPL

SEQ ID NO: 1752 - protein, 736 aa, Artificial Sequence
  Description of Artificial Sequence: Synthetic polypeptide
  misc_feature (226)..(226): Xaa can be any naturally occurring amino acid
MAADGYLPDWLEDTLSEGIRQWWKLKPGPPPPKPAERHKDDSRGLVLPGYKYLGPFNGLDKGEPVNEADAAALEHDKAYDRQLDSGDNPYLKYNHADAEFQERLKEDTSFGGNLGRAVFQAKKRVLEPLGLVEEPVKTAPGKKRPVEQSPQEPDSSSGIGKKGQQPAKKRLNFGQTGDSESVPDPQPLGEPPATPAAVGPTTMASGGGAPMADNNEGADGVGNASXNWHCDSTWLGDRVITTSTRTWALPPITTTSTSKSPVLQRGRSNDNHYFGYSTPWGYFDFNRFHCHFSPRDWQRLINNNWGFRPKRLNFKLFNIQVKEVTDNNGVKTIANNLTSTVQVFTDSDYQLPYVLGSAHQGCLPPFPADVFMIPQYGYLTLNNGSQAVGRSSFYCLEYFPSQMLRTGNNFQFTYTFEDVPFHSSYAHSQSLDRLMNPLIDQYLYYLSRTQTTGGTANTQTLGFSQGGPNTMANQAKNWLPGPCYRQQRVSTTTGQNNNSNFAWTAGTKYHLNGRNSLANPGIAMATHKDDKERFFPSNGILIFGKQNAARDNADYSDVMLTSEEEIKTTNPVATEEYGIVADNLQQQNTAPQIGTVNSQGALPGMVWQNRDVYLQGPIWAKIPHTDGNFHPSPLMGGFGLKHPPPQILIKNTPVPADPPTTFNQSKLNSFITQYSTGQVSVEIEWELQKENSKRWNPEIQYTSNYYKSTNVDFAVNTEGVYSEPHPIGTRYLTRPL

SEQ ID NO: 1753 - protein, 736 aa, Artificial Sequence
  Description of Artificial Sequence: Synthetic polypeptide
  misc_feature (239)..(239): Xaa can be any naturally occurring amino acid
MAADGYLPDWLEDNLSEGIREWWDLKPGAPKPKANQQKQDDGRGLVLPGYKYLGPFNGLDKGEPVNAADAAALEHDKAYDQQLQAGDNPYLRYNHADAEFQERLQGDTSFGGNLGRAVFQAKKRVLEPLGLVEEAAKTAPGKKRPVEQSPQEPDSSAGIGKSGAQPAKKRLNFGQTGDTESVPDPQPIGEPPAAPSGVGPNTMAAGGGAPMADNNEGADGVGSSSGNWHCDSTWLGDRXITTSTRTWALPTYNNHLYKQISSASTGASNDNHYFGYSTPWGYFDFNRFHCHFSPRDWQRLINNNWGFRPKRLNFKLFNIQVKEVTDNNGVKTIANNLTSTVQVFTDSEYQLPYVLGSAHQGCLPPFPADVFMIPQYGYLTLNNGSQAVGRSSFYCLEYFPSQMLRTGNNFTFSYTFEDVPFHSSYAHSQSLDRLMNPLIDQYLYYLSRTQTTGGTANTQTLGFSQGGPNTMANQAKNWLPGPCYRQQRVSTTTGQNNNSNFAWTAGTKYHLNGRNSLANPGIAMATHKDDKERFFPSNGILIFGKQNAARDNADYSDVMLTSEEEIKTTNPVATEEYGIVADNFQQQNTAPQIGTVNSQGALPGMVWQNRDVYLQGPIWAKIPHTDGNFHPSPLMGGFGLKHPPPQILIKNTPVPADPPTTFNQSKLNSFITQYSTGQVSVEIEWELQKENSKRWNPEIQYTSNYYKSTSVDFAVNTEGVYSEPHPIGTRYLTRPL

SEQ ID NO: 1754 - protein, 736 aa, Artificial Sequence
  Description of Artificial Sequence: Synthetic polypeptide
MAADGYLPDWLEDNLSEGIREWWALKPGAPKPKANQQKQDDGRGLVLPGYKYLGPFNGLDKGEPVNEADAAALEHDKAYDQQLKAGDNPYLKYNHADAEFQERLQEDTSFGGNLGRAVFQAKKRLLEPLGLVEEAAKTAPGKKRPVEQSPQEPDSSAGIGKSGAQPAKKRLNFGQTGDTESVPDPQPLGEPPATPAAVGPTTMASGGGAPMADNNEGADGVGNASGNWHCDSTWLGDRVITTSTRTWALPTYNNHLYKQISSASTGASNDNHYFGYSTPWGYFDFNRFHCHFSPRDWQRLINNNWGFRPKRLSFKLFNIQVKEVTQNEGTKTIANNLTSTIQVFTDSEYQLPYVLGSAHQGCLPPFPADVFMIPQYGYLTLNNGSQAVGRSSFYCLEYFPSQMLRTGNNFQFTYTFEDVPFHSSYAHSQSLDRLMNPLIDQYLYYLSRTQTTGGTANTQTLGFSQGGPNTMANQAKNWLPGPCYRQQRVSTTTGQNNNSNFAWTAGTKYHLNGRNSLANPGIAMATHKDDKERFFPSNGILIFGKQNAARDNADYSDVMLTSEEEIKTTNPVATEEYGIVADNLQQQNTAPQIGTVNSQGALPGMVWQNRDVYLQGPIWAKIPHTDGNFHPSPLMGGFGLKHPPPQILIKNTPVPADPPTTFNQSKLNSFITQYSTGQVSVEIEWELQKENSKRWNPEIQYTSNYYKSTSVDFAVNTEGVYSEPHPIGTRYLTRPL

SEQ ID NO: 1755 - protein, 736 aa, Artificial Sequence
  Description of Artificial Sequence: Synthetic polypeptide
MAADGYLPDWLEDTLSEGIRQWWKLKPGPPPPKPAERHKDDSRGLVLPGYKYLGPFNGLDKGEPVNEADAAALEHDKAYDQQLQAGDNPYLRYNHADAEFQERLQGDTSFGGNLGRAVFQAKKRLLEPLGLVEEAAKTAPGKKRPVEQSPQEPDSSAGIGKSGAQPAKKRLNFGQTGDTESVPDPQPIGEPPAAPSGVGSLTMASGGGAPVADNNEGADGVGSSSGNWHCDSQWLGDRVITTSTRTWALPTYNNHLYKQISSASTGASNDNHYFGYSTPWGYFDFNRFHCHFSPRDWQRLINNNWGFRPKRLSFKLFNIQVKEVTQNEGTKTIANNLTSTIQVFTDSEYQLPYVLGSAHQGCLPPFPADVFMIPQYGYLTLNNGSQAVGRSSFYCLEYFPSQMLRTGNNFQFTYTFEDVPFHSSYAHSQSLDRLMNPLIDQYLYYLSRTQTTGGTANTQTLGFSQGGPNTMANQAKNWLPGPCYRQQRVSTTTGQNNNSNFAWTAGTKYHLNGRNSLANPGIAMATHKDDKERFFPSNGILIFGKQNAARDNADYSDVMLTSEEEIKTTNPVATEEYGIVADNLQQQNTAPQIGTVNSQGALPGMVWQNRDVYLQGPIWAKIPHTDGNFHPSPLMGGFGLKHPPPQILIKNTPVPADPPTTFNQSKLNSFITQYSTGQVSVEIEWELQKENSKRWNPEIQYTSNYYKSTSVDFAVNTEGVYSEPHPIGTRYLTRPL

SEQ ID NO: 1756 - protein, 738 aa, Artificial Sequence
  Description of Artificial Sequence: Synthetic polypeptide
MAADGYLPDWLEDNLSEGIRQWWKLKPGPPPPKPAERHKDDSRGLVLPGYKYLGPFNGLDKGEPVNAADAAALEHDKAYDQQLKAGDNPYLRYNHADAEFQERLQEDTSFGGNLGRAVFQAKKRVLEPLGLVEEGAKTAPGKKRPVEPSPQRSPDSSTGIGKKGQQPAKKRLNFGQTGDSESVPDPQPLGEPPATPAAVGPTTMASGGGAPMADNNEGADGVGNASGNWHCDSTWLGDRVITTSTRTWALPTYNNHLYKQISNGTSGGSTNDNTYFGCVTPWGYFDFNKFHCHFSPDDWQRLINNGWGFRTKRLNFKLFSMKVKKGTDNTGIKTIANNLTNTVHVFADSEYQLPYVLGSAHQGCLPPFPADVFMIPQYGYLTLNNGSQAVGRSSFYCLEYFPSQMLRTGNNFTFSYTFEDVPFHSSYAHSQSLDRLMNPLIDQYLYYLSRTQTTGGTANTQTLGFSQGGPNTMANQAKNWLPGPCYRQQRVSTTTGQNNNSNFAWTAGTKYHLNGRNSLANPGIAMATHKDDKERFFPSNGILIFGKQNAARDNADYSDVMLTSEEEIKTTNPVATEEYGIVADNLQQQNTAPQIGTVNSQGALPGMVWQNRDVYLQGPIWAKIPHTDGNFHPSPLMGGFGLKHPPPQILIKNTPVPADPPTTFNQSKLNSFITQYSTGQVSVEIEWELQKENSKRWNPEIQYTSNYYKSTSVDFAVNTEGVYSEPHPIGTRYLTRPL

SEQ ID NO: 1757 - protein, 737 aa, Artificial Sequence
  Description of Artificial Sequence: Synthetic polypeptide
MAADGYLPDWLEDTLSEGIRQWWKLKPGPPPPKPAERHKDDSRGLVLPGYKYLGPFNGLDKGEPVNAADAAALEHDKAYDQQLKAGDNPYLRYNHADAEFQERLQEDTSFGGNLGRAVFQAKKRVLEPLGLVEEGAKTAPGKKRPVEPSPQRSPDSSTGIGKKGQQPAKKRLNFGQTGDSESVPDPQPIGEPPAGPSGLGSGTMAAGGGAPMADNNEGADGVGSSSGNWHCDSTWLGDRVITTSTRTWALPTYNNHLYKQISSASTGASNDNHYFGYSTPWGYFDFNRFHCHFSPRDWQRLINNNWGFRPKRLNFKLFNIQVKEVTDNNGVKTIANNLTSTVQVFTDSEYQLPYVLGSAHQGCLPPFPADVFMIPQYGYLTLNNGSQAVGRSSFYCLEYFPSQMLRTGNNFTFSYTFEDVPFHSSYAHSQSLDRLMNPLIDQYLYYLSRTQTTGGTANTQTLGFSQGGPNTMANQAKNWLPGPCYRQQRVSTTTGQNNNSNFAWTAGTKYHLNGRNSLANPGIAMATHKDDKERFFPSNGILIFGKQNAARDNADYSDVMLTSEEEIKTTNPVATEEYGIVADNLQQQNTAPQIGTVNSQGALPGMVWQNRDVYLQGPIWAKILHTDGNFHPSPLMGGFGMKHPPPPILIKNTPVPADPPTTFNQSKLNSFITQYSTGQVSVEIEWELPKENSKRWNPEIQYTSNYYKSTSVDFAVNTEGVYYEPHPIGTRYLTPPL

SEQ ID NO: 1758 - protein, 737 aa, Artificial Sequence
  Description of Artificial Sequence: Synthetic polypeptide
MAADGYLPDWLEDNLSEGIREWWALKPGAPKPKANQQKQDDGRGLVLPGYKYLGPFNGLDKGEPVNAADAAALEHDKAYDQQLKAGDNPYLRYNHADAEFQERLQEDTSFGGNLGRAVFQAKKRVLEPLGLVEEGAKTAPGKKRPVEPSPQRSPDSSTGIGKKGQQPARKRLNFGQTGDSESVPDPQPLGEPPAAPSGVAPNTMAAGGGAPMADNNEGADGVGNASGNWHCDSTWLGDRVITTSTRTWALPTYNNHLYKQISSASTGASNDNHYFGYSTPWGYFDFNRFHCHFSPRDWQRLITTIGGFRPKRLNFKLFNIQVKEVTDNNGVKTIANNLTSTVQVFTDSEYQLPYVLGSAHQGCLPPFPADVFMIPQYGYLTLNNGSQAVGRSSFYCLEYFPSQMLRTGNNFTFSYTFEDVPFHSSYAHSQSLDRLMNPLIDQYLYYLSRTQTTGGTANTQTLGFSQGGPNTMANQAKNWLPGPCYRQQRVSTTTGQNNNSNFAWTAGTKYHLNGRNSLANPGIAMATHKDDKERFFPSNGILIFGKQNAARDNADYSDVMLTSEEEIKTTNPVATEEYGIVADNLQQQNTAPQIGTVNSQGALPGMVWQNRDVYLQGPIWAKIPHTDGNFHPSPLMGGFGLKHPPPQILIKNTPVPADPPTTFNQSKLNSFITQYSTGQVSVEIEWELQKENSKRWNPEIQYTSNYYKSTSVDFAVNTEGVYSEPHPIGTRYLTRPL

SEQ ID NO: 1759 - protein, 736 aa, Artificial Sequence
  Description of Artificial Sequence: Synthetic polypeptide
MAADGYLPDWLEDTLSEGIRQWWKLKPGPPPPKPAERHKDDGRGLVLPGYKYLGPFNGLDKGEPVNAADAAALEHDKAYDQQLKAGDNPYLRYNHADAEFQERLQEDTSFGGNLGRAVFQAKKRVLEPLGLVEEPVKTAPGKKRPVEQSPQEPDSSSGIGKKGQQPAKKRLNFGQTGDSESVPDPQPLGEPPATPAAVGPTTMASGGGAPMADNNEGADGVGNASGNWHCDSTWMGDRVITTSTRTWALPTYNNHLYKQISSASTGASNDNHYFGYSTPWGYFDFNRFHCHFSPRDWQRLINNNWGFRPKRLNFKLFNIQVKEVTQNEGTKTIANNLTSTIQVFTDSEYQLPYVLGSAHQGCLPPFPADVFMIPQYGYLTLNNGSQAVGRSSFYCLEYFPSQMLRTGNNFQFTYTFEDVPFHSSYAHSQSLDRLMNPLIDQYLYYLSRTQTTGGTANTQTLGFSQGGPNTMANHAKNWLPGPCYRQQRVSTTTGQNNNSNFAWTAGTKYHLNGRNSLANPGIAMATHKDDKERFFPSNGILIFGKQNAARDNADYSDVMLTSEEEIKTTNPVATEEYGIVADNLQQQNTAPQIGTVNSQGALPGMVWQNRDVYLQGPIWAKIPHTDGNFHPSPLMGGFGLKHPPPQILIKNTPVPADPPTTFNQSKLNSFITQYSTGQVSVEIEWELQKENSKRWNPEIQYTSNYYKSTSVDFAVNTEGVYSEPHPIGTRYLTRPL

SEQ ID NO: 1760 - protein, 737 aa, Artificial Sequence
  Description of Artificial Sequence: Synthetic polypeptide
MAADGYLPDWLEDNLSQGIREWWDLKPGAPKPKANQQKQDDGRGLVLPGYKYLGPFNGLDKGEPVNAADAAALEHDKAYDQQLKAGDNPYLRYNHADAEFQERLQEDTSFGGNLGRAVFQAKKRVLEPLGLVEEGAKTAPGKKRPVEPSPQRSPDSSTGIGKKGQQPARKRLNFGQTGDSESVPDPQPLGEPPAAPAAVGPTTMASGGGAPMADNNEGADGVGSSSGNWHCDSQWLGDRVITTSTRTWALPTYNNHLYKQISSASTGASNDNHYFGYSTPWGYFDFNRFHCHFSPRDWQRLINNNWGFRPKRLSFKLFNIQVKEVTQNEGTKTIANNLTSTIQVFTDSEYQLPYVLGSAHQGCLPPFPADVFMIPQYGYLTLNNGSQAVGRSSFYCLEYFPSQMLRTGNNFQFTYTFEDVPFHSSYAHSQSLDRLMNPLIDQYLYYLSRTQTTGGTTNAQTLGFSQGGPNTMANQAKNWLPGPCYRQQRVSTTTGQNNNSNFAWTAGTKYHLNGRNSLANPGIAMATHKDDKERFFPSNGILIFGKQNAARDNADYSDVMLTSEEEIKTTNPVATEEYGIVADNLQQQNTAPQIGTVNSQGALPGMVWQNRDVYLQGPIWAKIPHTDGNFHPSPLMGGFGLKHPPPQILIKNTPVPADPPTTFNQSKLNSFITQYSTGQVSVEIEWELQKENSKRWNPEIQYTSNYYKSTNVDFAVNTEGVYSEPHPIGTRYLTRPL

SEQ ID NO: 1761 - protein, 736 aa, Artificial Sequence
  Description of Artificial Sequence: Synthetic polypeptide
MAADGYLPDWLEDNLSEGIREWWDLKPGAPKPKANQQKQDDGRGLVLPGYKYLGPFNGLDKGEPVNAADAAALEHDKAYDQQLKAGDNPYLRYNHADAEFQERLQEDTSFGGNLGRAVFQAKKRVLEPFGLVEEGAKTAPGKKRPVEQSPQEPDSSSGIGKTGQQPAKKRLNFGQTGDTESVPDPQPIGEPPAAPSGVGPNTMAAGGGAPMADNNEGADGVGSSSGNWHCDSTWMGDRVITTSTRTWALPTYNNHLYKQISSASTGASNDNHYFGYSTPWGYFDFNRFHCHFSPRDWQRLINNNWGFRPKRLNFKLFNIQVKEVTQNEGTKTIANNLTSTIQVFTDSEYQLPYVLGSAHQGCLPPFPADVFMIPQYGYLTLNNGSQAVGRSSFYCLEYFPSQMLRTGNNFQFTYTFEDVPFHSSYAHSQSLDRLMNPLIDQYLYYLSRTQTTGGTANTQTLGFSQGGPNTMANQAKNWLPGPCYRQQRVSTTTGQNNNSNFAWTAGTKYHLNGRNSLANPGIAMATHKDDKERFFPSNGILIFGKQNAARDNADYSDVMLTSEEEIKTTNPVATEEYGIVADNLQQQNTAPQIGTVNSQGALPGMVWQNRDVYLQGPIWAKIPHTDGNFHPSPLMGGFGLKHPPPQILIKNTPVPADPPTTFNQSKLNSFITQYSTGQVSVEIEWELQKENSKRWNPEIQYTSNYYKSTNVDFAVNTEGVYSEPHPIGTRYFTRPL

SEQ ID NO: 1762 - protein, 736 aa, Artificial Sequence
  Description of Artificial Sequence: Synthetic polypeptide
MAADGYLPDWLEDNLSEGIREWWDLKPGAPKPKANQQKQDDGRGLVLPGYKYLGPFNGLDKGEPVNAADAAALEHDKAYDQQLKAGDNPYLRYNHADAEFQERLQEDTSFGGNLGRAVFQAKKRVLEPLGLVEEGAKTAPGKKRPVEQSPQEPDSSSGIGKTGQQPAKKRLNFGQTGDSESVPDPQPLGEPPATPAAVGPTTMASGGGAPMADNNEGADGVGNSSGNWHCDSTWMGDRVITTSTRTWALPTYNNHLYKQISSASTGASNDNHYFGYSTPWGYFDFNRFHCHFSPRDWQRLINNNWGFRPKRLNFKLFNIQVKEVTDNNGVKTIANNLTSTVQVFTDSEYQLPYVLGSAHQGCLPPFPADVFMIPQYGYLTLNNGSQAVGRSSFYCLEYFPSQMLRTGNNFQFTYTFEDVPFHSSYAHSQSLDRLMNPLIDQYLYYLSRTQTTGGTANTQTLGFSQGGPNTMANQAKNWLPGPCYRQQRVSTTTGQNNNSNFAWTAGTKYHLNGRNSLANPGIAMATHKDDKERFFPSNGILIFGKQNAARDNADYSDVMLTSEEEIKTTNPVATEEYGIVADNLQQQNTAPQIGTVNSQGALPGMVWQNRDVYLQGPIWAKIPHTDGNFHPSPLMGGFGLKHPPPQILIKNTPVPADPPTTFNQSKLNSFITQYSTGQVSVEIEWELQKENSKRWNPEIQYTSNYYKSTNVDFAVNTEGVYSEPHPIGTRYLTRPL

SEQ ID NO: 1763 - protein, 736 aa, Artificial Sequence
  Description of Artificial Sequence: Synthetic polypeptide
MAADGYLPDWLEDNLSEGIREWWDLKPGAPKPKANQQKQDDGRGLVLPGYKYLGPFNGLDKGEPVNAADAAALEHDKAYDQQLKAGDNPYLRYNHADAEFQERLQEDTSFGGNLGRAVFQAKKRVLEPLGLVEEGAKTAPGKKRPVEQSPQEPDSSSGIGKTGQQPAKKRLNFGQTGDSESVPDPQPLGEPPATPAAVGPTTMASGGGAPMADNNEGADGVGNASGNWHCDSTWLGDRVITTSTRTWALPTYNNHLYKQISSASTGASNDNHYFGYSTPWGYFDFNRFHCHFSPRDWQRLINNNWGFRPKRLNFKLFNIQVKEVTQNEGTKTIANNLTSTIQVFTDSEYQLPYVLGSAHQGCLPPFPADVFMIPQYGYLTLNNGSQAVGRSSFYCLEYFPSQMLRTGNNFEFSYQFEDVPFHSSYAHSQSLDRLMNPLIDQYLYYLSRTQTTGGTANTQTLGFSQGGPNTMANQAKNWLPGPCYRQQRVSTTTGQNNNSNFAWTAGTKYHMNGRNSLVNPGIAMATHKDDKERFFPSNGILIFGKQNVARDNADYSDVMLTSEEEIKTTNPVATEEYGIVADNLQQQNTAPQIGTVNSQGALPGMVWQNRDVYLQGPIWAKIPHTDGNFHPSPLMGGFGLKHPPPQILIKNTPVPADPPTTFNQSKLNSFITQYSTGQVSVEIEWELQKENSKRWNPEIQYTSNYYKSTSVDFAVNTEGVYSEPHPIGTRYLTRPL

SEQ ID NO: 1764 - DNA, 2217 bp, Artificial Sequence
  Description of Artificial Sequence: Synthetic polynucleotide
atggctgccgatggttatcttccagattggctcgaggacaacctctctgagggcattcgcgagtggtgggcgctgaaacctggagccccgaagcccaaagccaaccagcaaaagcaggacgacggccggggtctggtgcttcctggctacaagtacctcggacccttcaacggactcgacaagggggagcccgtcaacgcggcggacgcagcggccctcgagcacgacaaggcctacgaccagcagctgcaggcgggtgacaatccgtacctgcggtataaccacgccgacgccgagtttcaggagcgtctgcaagaagatacgtcttttgggggcaacctcgggcgagcagtcttccaggccaagaagcgggttctcgaacctctcggtctggttgaggaaggcgctaagacggctcctggaaagaagagaccggtagagccatcaccccagcgttctccagactcctctacgggcatcggcaagaaaggccaacagcccgccagaaaaagactcaattttggtcagactggcgactcagagtcagttccagaccctcaacctctcggagaacctccagcagcgccctctggtgtgggacctaatacaatggctgcaggcggtggcgcaccaatggcagacaataacgaaggcgccgacggagtgggtagttcctcgggaaattggcattgcgattccacatggctgggcgacagagtcatcaccaccagcacccgaacctgggccctgcccacctacaacaaccacctctacaagcaaatctccaacgggacatcgggaggagccaccaacgacaacacctacttcggctacagcaccccctgggggtattttgactttaacagattccactgccacttttcaccacgtgactggcagcgactcatcaacaacaactggggattccggcccaagagactcagcttcaagctcttcaacatccaggtcaaggaggtcacgcagaatgaaggcaccaagaccatcgccaataacctcaccagcaccatccaggtgtttacggactcggagtaccagctgccgtacgttctcggctctgcccaccagggctgcctgcctccgttcccggcggacgtgttcatgattccccagtacggctacctaacactcaacaacggtagtcaggccgtgggacgctcctccttctactgcctggaatactttccttcgcagatgctgagaaccggcaacaacttccagtttacttacaccttcgaggacgtgcctttccacagcagctacgcccacagccagagcttggaccggctgatgaatcctctgattgaccagtacctgtactacttgtctcggactcaaacaacaggaggcacggcaaatacgcagactctgggcttcagccaaggtgggcctaatacaatggccaatcaggcaaagaactggctgccaggaccctgttaccgccaacaacgcgtctcaacgacaaccgggcaaaacaacaatagcaactttgcctggactgctgggaccaaataccatctgaatggaagaaattcattggctaatcctggcatcgctatggcaacacacaaagacgacgaggagcgtttttttcccagtaacgggatcctgatttttggcaaacaaaatgctgccagagacaatgcggattacagcgatgtcatgctcaccagcgaggaagaaatcaaaaccactaaccctgtggctacagaggaatacggtatcgtggcagataacttgcagcagcaaaacacggctcctcaaattggaactgtcaacagccagggggccttacccggtatggtttggcagaaccgggacgtgtacctgcagggtcccatctgggccaagattcctcacacggacggcaacttccacccgtctccgctgatgggcggctttggcctgaaacatcctccgcctcagatcctgatcaagaacacgcctgtacctgcggatcctccgaccaccttcaaccagtcaaagctgaactctttcatcacgcaatacagcaccggacaggtcagcgtggaaattgaatgggagctgcagaaggaaaacagcaagcgctggaaccccgagatccagtacacctccaactactacaaatctacaagtgtggactttgctgttaatacagaaggcgtgtactctgaaccccgccccattggcacccgttacctcacccgtaatctgtaa

SEQ ID NO: 1765 - protein, 738 aa, Artificial Sequence; identical to SEQ ID NO: 105
  Description of Artificial Sequence: Synthetic polypeptide

SEQ ID NO: 1766 - protein, 735 aa, Artificial Sequence
  Description of Artificial Sequence: Synthetic polypeptide
MAADGYLPDWLEDNLSEGVREWWALQPGAPKPKANQQHQDNARGLVLPGYKYLGPGNGLDKGEPVNAADAAALEHDKAYDQQLKAGDNPYLKYNHADAEFQQRLQGDTSFGGNLGRAVFQAKKRVLEPLGLVEQAGETAPGKKRPLIESPQQPDSSTGIGKKGKQPAKKKLVFEDETGAGDGPPEGSTSGAMSDDSEMRAAAGGAAVEGGQGADGVGNASGDWHCDSTWSEGHVTTTSTRTWVLPTYNNHLYKRLGESLQSNTYNGFSTPWGYFDFNRFHCHFSPRDWQRLINNNWGMRPKAMRVKIFNIQVKEVTTSNGETTVANNLTSTVQIFADSSYELPYVMDAGQEGSLPPFPNDVFMVPQYGYCGLVTGNTSQQQTDRNAFYCLEYFPSQMLRTGNNFEITYSFEKVPFHSMYAHSQSLDRLMNPLIDQYLWGLQSTTTGTTLNAGTATTNFTKLRPTNFSNFKKNWLPGPSIKQQGFSKTANQNYKIPATGSDSLIKYETHSTLDGRWSALTPGPPMATAGPADSKFSNSQLIFAGPKQNGNTATVPGTLIFTSEEELAATNATDTDMWGNLPGGDQSNSNLPTVDRLTALGAVPGMVWQNRDIYYQGPIWAKIPHTDGHFHPSPLIGGFGLKHPPPQIFIKNTPVPANPATTFSSTPVNSFITQYSTGQVSVQIDWEIQKERSKRWNPEVQFTSNYGQQNSLLWAPDAAGKYTEPRAIGTRYLTHHL

SEQ ID NO: 1767 - protein, 735 aa, Artificial Sequence
  Description of Artificial Sequence: Synthetic polypeptide
MAADGYLPDWLEDNLSEGVREWWALQPGAPKPKANQQHQDNARGLVLPGYKYLGPGNGLDKGEPVNAADAAALEHDKAYDQQLKAGDNPYLKYNHADAEFQQRLQGDTSFGGNLGRAVFQAKKRVLEPLGLVEQAGETAPGKKRPLIESPQQPDSSTGIGKKGKQPAKKKLVFEDETGAGDGPPEGSTSGAMSDDSEMRAAAGGAAVEGGQGADGVGNASGDWHCDSTWSEGHVTTTSTRTWVLPTYNNHLYKRLGESLQSNTYNGFSTPWGYFDFNRFHCHFSPRDWQRLINNNWGMRPKAMRVKIFNIQVKEVTTSNGETTVANNLTSTVQIFADSSYELPYVMDAGQEGSLPPFPNDVFMVPQYGYCGLVTGNTSQQQTDRNAFYCLEYFPSQMLRTGNNFEITYSFEKVPFHSMYAHSQSLDRLMNPLIDQYLWGLQSTTTGTTLNAGTATTNFTKLRPTNFSNFKKNWLPGPSIKQQGFSKTANQNYLIPATGSDSLIRYETHSTLDGRWSALTPGPPMATAGPADSKFSNSQLIFAGPKQNGNTATVPGTLIFTSEEELAATNATDTDMWGNLPFRDLSSSNLPTVDRSTPLGAVPGMVWQNRDIYYQGPIWAKIPHTDGHFHPSPLIGGFGLKHPPPQIFIKNTPVPANPATTFSSTPVNSFITQYSTGQVSVQIDWEIQKERSKRWNPEVQFTSNYGQQNSLLWAPDAAGKYTEPRAIGTRYLTHHL

SEQ ID NO: 1768 - protein, 735 aa, Artificial Sequence
  Description of Artificial Sequence: Synthetic polypeptide
MAADGYLPDWLEDNLSEGVREWWALQPGAPKPKANQQHQDNARGLVLPGYKYLGPGNGLDKGEPVNAADAAALEHDKAYDQQLKAGDNPYLKYNHADAEFQQRLQGDTSFGGNLGRAVFQAKKRVLEPLGLVEQAGETAPGKKRPLIESPQQPDSSTGIGKKGKQPAKKKLVFEDETGAGDGPPEGSTSGAMSDDSEMRAAAGGAAVEGGQGADGVGNASGDWHCDSTWSEGHVTTTSTRTWVLPTYNNHLYKRLGESLQSNTYNGFSTPWGYFDFNRFHCHFSPRDWQRLINNNWGMRPKAMRVKIFNIQVKEVTTSNGETTVANNLTSTVQIFADSSYELPYVMDAGQEGSLPPFPNDVFMVPQYGYCGLVTGNTSQQQTDRNAFYCLEYFPSQMLRTGNNFEITYSFEKVPFHSMYAHSQSLDRLMNPLIDQYLWGLQSTTTGTTLNAGTATTNFTKLRPTNFSNFKKNWLPGPSIKQQGFSKTANQNYYIPATGSDSLILYETHSTLDGRWSALTPGPPMATAGPADSKFSNSQLIFAGPKQNGNTATVPGTLIFTSEEELAATNATDTDMWGNLPGGDQSNSNLPTVDRLTALGAVPGMVWQNRDIYYQGPIWAKIPHTDGHFHPSPLIGGFGLKHPPPQIFIKNTPVPANPATTFSSTPVNSFITQYSTGQVSVQIDWEIQKERSKRWNPEVQFTSNYGQQNSLLWAPDAAGKYTEPRAIGTRYLTHHL

SEQ ID NO: 1769 - protein, 735 aa, Artificial Sequence
  Description of Artificial Sequence: Synthetic polypeptide
MAADGYLPDWLEDNLSEGVREWWALQPGAPKPKANQQHQDNARGLVLPGYKYLGPGNGLDKGEPVNAADAAALEHDKAYDQQLKAGDNPYLKYNHADAEFQQRLQGDTSFGGNLGRAVFQAKKRVLEPLGLVEQAGETAPGKKRPLIESPQQPDSSTGIGKKGKQPAKKKLVFEDETGAGDGPPEGSTSGAMSDDSEMRAAAGGAAVEGGQGADGVGNASGDWHCDSTWSEGHVTTTSTRTWVLPTYNNHLYKRLGESLQSNTYNGFSTPWGYFDFNRFHCHFSPRDWQRLINNNWGMRPKAMRVKIFNIQVKEVTTSNGETTVANNLTSTVQIFADSSYELPYVMDAGQEGSLPPFPNDVFMVPQYGYCGLVTGNTSQQQTDRNAFYCLEYFPSQMLRTGNNFEITYSFEKVPFHSMYAHSQSLDRLMNPLIDQYLWGLQSTTTGTTLNAGTATTNFTKLRPTNFSNFKKNWLPGPSIKQQGFSKTANQNYGIPATGSDSLIKYETHSTLDGRWSALTPGPPIATAGPADSKFSNSQLIFAGPKQNGNTATVPGTLIFTSEEELAATNATDTDMWGNLPLYDASSSNLPTVDRLTLLGAVPGMVWQNRDIYYQGPIWAKIPHTDGHFHPSPLIGGFGLKHPPPQIFIKNTPVPANPATTFSSTPVNSFITQYSTGQVSVQIDWEIQKERSKRWNPEVQFTSNYGQQNSLLWAPDAAGKYTEPRAIGTRYLTHHL

SEQ ID NO: 1770 - protein, 735 aa, Artificial Sequence
  Description of Artificial Sequence: Synthetic polypeptide
MAADGYLPDWLEDNLSEGVREWWALQPGAPKPKANQQHQDNARGLVLPGYKYLGPGNGLDKGEPVNAADAAALEHDKAYDQQLKAGDNPYLKYNHADAEFQQRLQGDTSFGGNLGRAVFQAKKRVLEPLGLVEQAGETAPGKKRPLIESPQQPDSSTGIGKKGKQPAKKKLVFEDETGAGDGPPEGSTSGAMSDDSEMRAAAGGAAVEGGQGADGVGNASGDWHCDSTWSEGHVTTTSTRTWVLPTYNNHLYKRLGESLQSNTYNGFSTPWGYFDFNRFHCHFSPRDWQRLINNNWGMRPKAMRVKIFNIQVKEVTTSNGETTVANNLTSTVQIFADSSYELPYVMDAGQEGSLPPFPNDVFMVPQYGYCGLVTGNTSQQQTDRNAFYCLEYFPSQMLRTGNNFEITYSFEKVPFHSMYAHSQSLDRLMNPLIDQYLWGLQSTTTGTTLNAGTATTNFTKLRPTNFSNFKKNWLPGPSIKQQGFSKTANQNYTIPATGSDSLITYETHSTLDGRWSALTPGPPGATAGPADSKFSNSQLIFAGPKQNGNTATVPGTLIFTSEEELAATNATDTDMWGNLPRVDTSASNLPTVDRYTNLGAVPGMVWQNRDIYYQGPIWAKIPHTDGHFHPSPLIGGFGLKHPPPQIFIKNTPVPANPATTFSSTPVNSFITQYSTGQVSVQIDWEIQKERSKRWNPEVQFTSNYGQQNSLLWAPDAAGKYTEPRAIGTRYLTHHL

SEQ ID NO: 1771 - protein, 735 aa, Artificial Sequence
  Description of Artificial Sequence: Synthetic polypeptide
MAADGYLPDWLEDNLSEGVREWWALQPGAPKPKANQQHQDNARGLVLPGYKYLGPGNGLDKGEPVNAADAAALEHDKAYDQQLKAGDNPYLKYNHADAEFQQRLQGDTSFGGNLGRAVFQAKKRVLEPLGLVEQAGETAPGKKRPLIESPQQPDSSTGIGKKGKQPAKKKLVFEDETGAGDGPPEGSTSGAMSDDSEMRAAAGGAAVEGGQGADGVGNASGDWHCDSTWSEGHVTTTSTRTWVLPTYNNHLYKRLGESLQSNTYNGFSTPWGYFDFNRFHCHFSPRDWQRLINNNWGMRPKAMRVKIFNIQVKEVTTSNGETTVANNLTSTVQIFADSSYELPYVMDAGQEGSLPPFPNDVFMVPQYGYCGLVTGNTSQQQTDRNAFYCLEYFPSQMLRTGNNFEITYSFEKVPFHSMYAHSQSLDRLMNPLIDQYLWGLQSTTTGTTLNAGTATTNFTKLRPTNFSNFKKNWLPGPSIKQQGFSKTANQNYSIPATGSDSLIKYETHSTLDGRWSALTPGPPFATAGPADSKFSNSQLIFAGPKQNGNTATVPGTLIFTSEEELAATNATDTDMWGNLPDYDSSLSNLPTVDRDTTLGAVPGMVWQNRDIYYQGPIWAKIPHTDGHFHPSPLIGGFGLKHPPPQIFIKNTPVPANPATTFSSTPVNSFITQYSTGQVSVQIDWEIQKERSKRWNPEVQFTSNYGQQNSLLWAPDAAGKYTEPRAIGTRYLTHHL

SEQ ID NO: 1772 - protein, 735 aa, Artificial Sequence
  Description of Artificial Sequence: Synthetic polypeptide
MAADGYLPDWLEDNLSEGVREWWALQPGAPKPKANQQHQDNARGLVLPGYKYLGPGNGLDKGEPVNAADAAALEHDKAYDQQLKAGDNPYLKYNHADAEFQQRLQGDTSFGGNLGRAVFQAKKRVLEPLGLVEQAGETAPGKKRPLIESPQQPDSSTGIGKKGKQPAKKKLVFEDETGAGDGPPEGSTSGAMSDDSEMRAAAGGAAVEGGQGADGVGNASGDWHCDSTWSEGHVTTTSTRTWVLPTYNNHLYKRLGESLQSNTYNGFSTPWGYFDFNRFHCHFSPRDWQRLINNNWGMRPKAMRVKIFNIQVKEVTTSNGETTVANNLTSTVQIFADSSYELPYVMDAGQEGSLPPFPNDVFMVPQYGYCGLVTGNTSQQQTDRNAFYCLEYFPSQMLRTGNNFEITYSFEKVPFHSMYAHSQSLDRLMNPLIDQYLWGLQSTTTGTTLNAGTATTNFTKLRPTNFSNFKKNWLPGPSIKQQGFSKTANQNYSIPATGSDSLIWYETHSTLDGRWSALTPGPPCATAGPADSKFSNSQLIFAGPKQNGNTATVPGTLIFTSEEELAATNATDTDMWGNLPQGDSSLSNLPTVDRMTVLGAVPGMVWQNRDIYYQGPIWAKIPHTDGHFHPSPLIGGFGLKHPPPQIFIKNTPVPANPATTFSSTPVNSFITQYSTGQVSVQIDWEIQKERSKRWNPEVQFTSNYGQQNSLLWAPDAAGKYTEPRAIGTRYLTHHL

SEQ ID NO: 1773 - protein, 735 aa, Artificial Sequence
  Description of Artificial Sequence: Synthetic polypeptide
MAADGYLPDWLEDNLSEGVREWWALQPGAPKPKANQQHQDNARGLVLPGYKYLGPGNGLDKGEPVNAADAAALEHDKAYDQQLKAGDNPYLKYNHADAEFQQRLQGDTSFGGNLGRAVFQAKKRVLEPLGLVEQAGETAPGKKRPLIESPQQPDSSTGIGKKGKQPAKKKLVFEDETGAGDGPPEGSTSGAMSDDSEMRAAAGGAAVEGGQGADGVGNASGDWHCDSTWSEGHVTTTSTRTWVLPTYNNHLYKRLGESLQSNTYNGFSTPWGYFDFNRFHCHFSPRDWQRLINNNWGMRPKAMRVKIFNIQVKEVTTSNGETTVANNLTSTVQIFADSSYELPYVMDAGQEGSLPPFPNDVFMVPQYGYCGLVTGNTSQQQTDRNAFYCLEYFPSQMLRTGNNFEITYSFEKVPFHSMYAHSQSLDRLMNPLIDQYLWGLQSTTTGTTLNAGTATTNFTKLRPTNFSNFKKNWLPGPSIKQQGFSKTANQNYCIPATGSDSLIRYETHSTLDGRWSALTPGPPLATAGPADSKFSNSQLIFAGPKQNGNTATVPGTLIFTSEEELAATNATDTDMWGNLPYKDSSRSNLPTVDRETSLGAVPGMVWQNRDIYYQGPIWAKIPHTDGHFHPSPLIGGFGLKHPPPQIFIKNTPVPANPATTFSSTPVNSFITQYSTGQVSVQIDWEIQKERSKRWNPEVQFTSNYGQQNSLLWAPDAAGKYTEPRAIGTRYLTHHL

SEQ ID NO: 1774 - protein, 735 aa, Artificial Sequence
  Description of Artificial Sequence: Synthetic polypeptide
MAADGYLPDWLEDNLSEGVREWWALQPGAPKPKANQQHQDNARGLVLPGYKYLGPGNGLDKGEPVNAADAAALEHDKAYDQQLKAGDNPYLKYNHADAEFQQRLQGDTSFGGNLGRAVFQAKKRVLEPLGLVEQAGETAPGKKRPLIESPQQPDSSTGIGKKGKQPAKKKLVFEDETGAGDGPPEGSTSGAMSDDSEMRAAAGGAAVEGGQGADGVGNASGDWHCDSTWSEGHVTTTSTRTWVLPTYNNHLYKRLGESLQSNTYNGFSTPWGYFDFNRFHCHFSPRDWQRLINNNWGMRPKAMRVKIFNIQVKEVTTSNGETTVANNLTSTVQIFADSSYELPYVMDAGQEGSLPPFPNDVFMVPQYGYCGLVTGNTSQQQTDRNAFYCLEYFPSQMLRTGNNFEITYSFEKVPFHSMYAHSQSLDRLMNPLIDQYLWGLQSTTTGTTLNAGTATTNFTKLRPTNFSNFKKNWLPGPSIKQQGFSKTANQNYIIPATGSDSLIYYETHSTLDGRWSALTPGPPRATAGPADSKFSNSQLIFAGPKQNGNTATVPGTLIFTSEEELAATNATDTDMWGNLPWIDNSRSNLPTVDRPTSLGAVPGMVWQNKNIYYQGPIWAKIPHTDGHFHPSPLIGGFGLKHPPPQIFIKNTPVPANPATTFTSTPVNSFITQYSTGQVSVQIDWEIQKERSKRWNPEVQFTSNYGQQNSLLWAPDAAGKYTEPRAIGTRYLTHHL

SEQ ID NO: 1775 - protein, 735 aa, Artificial Sequence
  Description of Artificial Sequence: Synthetic polypeptide
MAADGYLPDWLEDNLSEGVREWWALQPGAPKPKANQQHQDNARGLVLPGYKYLGPGNGLDKGEPVNAADAAALEHDKAYDQQLKAGDNPYLKYNHADAEFQQRLQGDTSFGGNLGRAVFQAKKRVLEPLGLVEQAGETAPGKKRPLIESPQQPDSSTGIGKKGKQPAKKKLVFEDETGAGDGPPEGSTSGAMSDDSEMRAAAGGAAVEGGQGADGVGNASGDWHCDSTWSEGHVTTTSTRTWVLPTYNNHLYKRLGESLQSNTYNGFSTPWGYFDFNRFHCHFSPRDWQRLINNNWGMRPKAMRVKIFNIQVKEVTTSNGETTVANNLTSTVQIFADSSYELPYVMDAGQEGSLPPFPNDVFMVPQYGYCGLVTGNTSQQQTDRNAFYCLEYFPSQMLRTGNNFEITYSFEKVPFHSMYAHSQSLDRLMNPLIDQYLWGLQSTTTGTTLNAGTATTNFTKLRPTNFSNFKKNWLPGPSIKQQGFSKTANQNYGIPATGSDSLIIYETHSTLDGRWSALTPGPPRATAGPADSKFSNSQLIFAGPKQNGNTATVPGTLIFTSEEELAATNATDTDMWGNLPGGDQSNSNLPTVDRLTALGAVPGMVWQNRDIYYQGPIWAKIPHTDGHFHPSPLIGGFGLKHPPPQIFIKNTPVPANPATTFSSTPVNSFITQYSTGQVSVQIDWEIQKERSKRWNPEVQFTSNYGQQNSLLWAPDAAGKYTEPRAIGTRYLTHHL

SEQ ID NO: 1776 - protein, 735 aa, Artificial Sequence
  Description of Artificial Sequence: Synthetic polypeptide
MAADGYLPDWLEDNLSEGVREWWALQPGAPKPKANQQHQDNARGLVLPGYKYLGPGNGLDKGEPVNAADAAALEHDKAYDQQLKAGDNPYLKYNHADAEFQQRLQGDTSFGGNLGRAVFQAKKRVLEPLGLVEQAGETAPGKKRPLIESPQQPDSSTGIGKKGKQPAKKKLVFEDETGAGDGPPEGSTSGAMSDDSEMRAAAGGAAVEGGQGADGVGNASGDWHCDSTWSEGHVTTTSTRTWVLPTYNNHLYKRLGESLQSNTYNGFSTPWGYFDFNRFHCHFSPRDWQRLINNNWGMRPKAMRVKIFNIQVKEVTTSNGETTVANNLTSTVQIFADSSYELPYVMDAGQEGSLPPFPNDVFMVPQYGYCGLVTGNTSQQQTDRNAFYCLEYFPSQMLRTGNNFEITYSFEKVPFHSMYAHSQSLDRLMNPLIDQYLWGLQSTTTGTTLNAGTATTNFTKLRPTNFSNFKKNWLPGPSIKQQGFSKTANQNYVIPATESDSLIYYETHSTLDGRWSALTPGPPYATAGPADSKFSNSQLIFAGPKQNGNTATVPGTLIFTSEEELAATNATDTDMWGNLPPRDDSTSNLPTVDRKTYLGAVPGMVWQNRDIYYQGPIWAKIPHTDGHFHPSPLIGGFGLKHPPPQIFIKNTPVPANPATTFSSTPVNSFITQYSTGQVSVQIDWEIQKERSKRWNPEVQFTSNYGQQNSLLWAPDAAGKYTEPRAIGTRYLTHHL

SEQ ID NO: 1777 - protein, 735 aa, Artificial Sequence
  Description of Artificial Sequence: Synthetic polypeptide
MAADGYLPDWLEDNLSEGVREWWALQPGAPKPKANQQHQDNARGLVLPGYKYLGPGNGLDKGEPVNAADAAALEHDKAYDQQLKAGDNPYLKYNHADAEFQQRLQGDTSFGGNLGRAVFQAKKRVLEPLGLVEQAGETAPGKKRPLIESPQQPDSSTGIGKKGKQPAKKKLVFEDETGAGDGPPEGSTSGAMSDDSEMRAAAGGAAVEGGQGADGVGNASGDWHCDSTWSEGHVTTTSTRTWVLPTYNNHLYKRLGESLQSNTYNGFSTPWGYFDFNRFHCHFSPRDWQRLINNNWGMRPKAMRVKIFNIQVKEVTTSNGETTVANNLTSTVQIFADSSYELPYVMDAGQEGSLPPFPNDVFMVPQYGYCGLVTGNTSQQQTDRNAFYCLEYFPSQMLRTGNNFEITYSFEKVPFHSMYAHSQSLDRLMNPLIDQYLWGLQSTTTGTTLNAGTATTNFTKLRPTNFSNFKKNWLPGPSIKQQGFSKTANQNYYIPATGSDSLIIYETHSTLDGRWSALTPGPPIATAGPADSKFSNSQLIFAGPKQNGNTATVPGTLIFTSEEELAATNSTDTDMWGNLPTDDDSRSNLPTVDRMTLLGAVPGMVWQNRDIYYQGPIWAKIPHTDGHFHPSPLIGGFGLKHPPPQIFIKNTPVPANPATTFSSTPVNSFITQYSTGQVSVQIDWEIQKERSKRWNPEVQFTSNYGQQNSLLWAPDAAGKYTEPRAIGTRYLTHHL

SEQ ID NO: 1778 - protein, 735 aa, Artificial Sequence
  Description of Artificial Sequence: Synthetic polypeptide
MAADGYLPDWLEDNLSEGVREWWALQPGAPKPKANQQHQDNARGLVLPGYKYLGPGNGLDKGEPVNAADAAALEHDKAYDQQLKAGDNPYLKYNHADAEFQQRLQGDTSFGGNLGRAVFQAKKRVLEPLGLVEQAGETAPGKKRPLIESPQQPDSSTGIGKKGKQPAKKKLVFEDETGAGDGPPEGSTSGAMSDDSEMRAAAGGAAVEGGQGADGVGNASGDWHCDSTWSEGHVTTTSTRTWVLPTYNNHLYKRLGESLQSNTYNGFSTPWGYFDFNRFHCHFSPRDWQRLINNNWGMRPKAMRVKIFNIQVKEVTTSNGETTVANNLTSTVQIFADSSYELPYVMDAGQEGSLPPFPNDVFMVPQYGYCGLVTGNTSQQQTDRNAFYCLEYFPSQMLRTGNNFEITYSFEKVPFHSMYAHSQSLDRLMNPLIDQYLWGLQSTTTGTTLNAGTATTNFTKLRPTNFSNFKKNWLPGPSIKQQGFSKTANQNYHIPATGSDSLIYYETHSTLDGRWSALTPGPPSATAGPADSKFSNSQLIFAGPKQNGNTATVPGTLIFTSEEELAATNATDTDMWGNLPRRDSSVSNLPTVDRYTDLGAVPGMVWQNRDIYYQGPIWAKIPHTDGHFHPSPLIGGFGLKHPPPQIFIKNTPVPANPATTFSSTPVNSFITQYSTGQVSVQIDWEIQKERSKRWNPEVQFTSNYGQQNSLLWAPDAAGKYTEPRAIGTRYLTHHL

SEQ ID NO: 1779 - protein, 735 aa, Artificial Sequence
  Description of Artificial Sequence: Synthetic polypeptide
MAADGYLPDWLEDNLSEGVREWWALQPGAPKPKANQQHQDNARGLVLPGYKYLGPGNGLDKGEPVNAADAAALEHDKAYDQQLKAGDNPYLKYNHADAEFQQRLQGDTSFGGNLGRAVFQAKKRVLEPLGLVEQAGETAPGKKRPLIESPQQPDSSTGIGKKGKQPAKKKLVFEDETGAGDGPPEGSTSGAMSDDSEMRAAAGGAAVEGGQGADGVGNASGDWHCDSTWSEGHVTTTSTRTWVLPTYNNHLYKRLGESLQSNTYNGFSTPWGYFDFNRFHCHFSPRDWQRLINNNWGMRPKAMRVKIFNIQVKEVTTSNGETTVANNLTSTVQIFADSSYELPYVMDAGQEGSLPPFPNDVFMVPQYGYCGLVTGNTSQQQTDRNAFYCLEYFPSQMLRTGNNFEITYSFEKVPFHSMYAHSQSLDRLMNPLIDQYLWGLQSTTTGTTLNAGTATTNFTKLRPTNFSNFKKNWLPGPSIKQQGFSKTANQNYSIPATGSDSLISYETHSTLDGRWSALTPGPPRATAGPADSKFSNSQLIFAGPKQNGNTATVPGTLIFTSEEELAATNATDTDMWGNLPRHDSSLSNLPTVDRNTGLGAVPGMVWQNRDIYYQGPIWAKIPHTDGHFHPSPLIGGFGLKHPPPQIFIKNTPVPANPATTFSSTPVNSFITQYSTGQVSVQIDWEIQKERSKRWNPEVQFTSNYGQQNSLLWAPDAAGKYTEPRAIGTRYLTHHL

SEQ ID NO: 1780 - protein, 735 aa, Artificial Sequence
  Description of Artificial Sequence: Synthetic polypeptide
MAADGYLPDWLEDNLSEGVREWWALQPGAPKPKANQQHQDNARGLVLPGYKYLGPGNGLDKGEPVNAADAAALEHDKAYDQQLKAGDNPYLKYNHADAEFQQRLQGDTSFGGNLGRAVFQAKKRVLEPLGLVEQAGETAPGKKRPLIESPQQPDSSTGIGKKGKQPAKKKLVFEDETGAGDGPPEGSTSGAMSDDSEMRAAAGGAAVEGGQGADGVGNASGDWHCDSTWSEGHVTTTSTRTWVLPTYNNHLYKRLGESLQSNTYNGFSTPWGYFDFNRFHCHFSPRDWQRLINNNWGMRPKAMRVKIFNIQVKEVTTSNGETTVANNLTSTVQIFADSSYELPYVMDAGQEGSLPPFPNDVFMVPQYGYCGLVTGNTSQQQTDRNAFYCLEYFPSQMLRTGNNFEITYSFEKVPFHSMYAHSQSLDRLMNPLIDQYLWGLQSTTTGTTLNAGTATTNFTKLRPTNFSNFKKNWLPGPSIKQQGFSKTANQNYFIPATGSDSLIRYETHSTLDGRWSALTPGPPLATAGPADSKFSNSQLIFAGPKQNGNTATVPGTLIFTSEEELAATNATDTDMWGNLPVIDFSKSNLPTVDRLTHLGAVPGMVWQNRDIYYQGPIWAKIPHTDGHFHPSPLIGGFGLKHPPPQIFIKNTPVPANPATTFSSTPVNSFITQYSTGQVSVQIDWEIQKERSKRWNPEVQFTSNYGQQNSLLWAPDAAGKYTEPRAIGTRYLTHHL

SEQ ID NO: 1781 - protein, 735 aa, Artificial Sequence
  Description of Artificial Sequence: Synthetic polypeptide
MAADGYLPDWLEDNLSEGVREWWALQPGAPKPKANQQHQDNARGLVLPGYKYLGPGNGLDKGEPVNAADAAALEHDKAYDQQLKAGDNPYLKYNHADAEFQQRLQGDTSFGGNLGRAVFQAKKRVLEPLGLVEQAGETAPGKKRPLIESPQQPDSSTGIGKKGKQPAKKKLVFEDETGAGDGPPEGSTSGAMSDDSEMRAAAGGAAVEGGQGADGVGNASGDWHCDSTWSEGHVTTTSTRTWVLPTYNNHLYKRLGESLQSNTYNGFSTPWGYFDFNRFHCHFSPRDWQRLINNNWGMRPKAMRVKIFNIQVKEVTTSNGETTVANNLTSTVQIFADSSYELPYVMDAGQEGSLPPFPNDVFMVPQYGYCGLVTGNTSQQQTDRNAFYCLEYFPSQMLRTGNNFEITYSFEKVPFHSMYAHSQSLDRLMNPLIDQYLWGLQSTTTGTTLNAGTATTNFTKLRPTNFSNFKKNWLPGPSIKQQGFSKTANQNYKIPATGSDSLIKYETHSTLDGRWSALTPGPPMATAGPADSKFSNSQLIFAGPKQNGNTATVPGTLIFTSEEELAATNATDTDMWGNLPVRDFSLSNLPTVDRTTKLGAVPGMVWQNRDIYYQGPIWAKIPHTDGHFHPSPLIGGFGLKHPPPQIFIKNTPVPANPATTFSSTPVNSFITQYSTGQVSVQIDWEIQKERSKRWNPEVQFTSNYGQQNSLLWAPDAAGKYTEPRAIGTRYLTHHL

SEQ ID NO: 1782 - protein, 735 aa, Artificial Sequence
  Description of Artificial Sequence: Synthetic polypeptide
MAADGYLPDWLEDNLSEGVREWWALQPGAPKPKANQQHQDNARGLVLPGYKYLGPGNGLDKGEPVNAADAAALEHDKAYDQQLKAGDNPYLKYNHADAEFQQRLQGDTSFGGNLGRAVFQAKKRVLEPLGLVEQAGETAPGKKRPLIESPQQPDSSTGIGKKGKQPAKKKLVFEDETGAGDGPPEGSTSGAMSDDSEMRAAAGGAAVEGGQGADGVGNASGDWHCDSTWSEGHVTTTSTRTWVLPTYNNHLYKRLGESLQSNTYNGFSTPWGYFDFNRFHCHFSPRDWQRLINNNWGMRPKAMRVKIFNIQVKEVTTSNGETTVANNLTSTVQIFADSSYELPYVMDAGQEGSLPPFPNDVFMVPQYGYCGLVTGNTSQQQTDRNAFYCLEYFPSQMLRTGNNFEITYSFEKVPFHSMYAHSQSLDRLMNPLIDQYLWGLQSTTTGTTLNAGTATTNFTKLRPTNFSNFKKNWLPGPSIKQQGFSKTANQNYFIPATGSDSLIQYETHSTLDGRWSALTPGPPMATAGPADSKFSNSQLIFAGPKQNGNTATVPGTLIFTSEEELAATNATDTDMWGNLPGGDQSNSNLPTVDRLTALGAVPGMVWQNRDIYYQGPIWAKIPHTDGHFHPSPLIGGFGLKHPPPQIFIKNTPVPANPATTFSSTPVNSFITQYSTGQVSVQIDWEIQKERSKRWNPEVQFTSNYGQQNSLLWAPDAAGKYTEPRAIGTRYLTHHL

SEQ ID NO: 1783 - protein, 735 aa, Artificial Sequence
  Description of Artificial Sequence: Synthetic polypeptide
MAADGYLPDWLEDNLSEGVREWWALQPGAPKPKANQQHQDNARGLVLPGYKYLGPGNGLDKGEPVNAADAAALEHDKAYDQQLKAGDNPYLKYNHADAEFQQRLQGDTSFGGNLGRAVFQAKKRVLEPLGLVEQAGETAPGKKRPLIESPQQPDSSTGIGKKGKQPAKKKLVFEDETGAGDGPPEGSTSGAMSDDSEMRAAAGGAAVEGGQGADGVGNASGDWHCDSTWSEGHVTTTSTRTWVLPTYNNHLYKRLGESLQSNTYNGFSTPWGYFDFNRFHCHFSPRDWQRLINNNWGMRPKAMRVKIFNIQVKEVTTSNGETTVANNLTSTVQIFADSSYELPYVMDAGQEGSLPPFPNDVFMVPQYGYCGLVTGNTSQQQTDRNAFYCLEYFPSQMLRTGNNFEITYSFEKVPFHSMYAHSQSLDRLMNPLIDQYLWGLQSTTTGTTLNAGTATTNFTKLRPTNFSNFKKNWLPGPSIKQQGFSKTANQNYEMPATGSDSLIIYETHSTLDGRWSALTPGPPFATAGPADSKFSNSQLIFAGPKQNGNTATVPGTLIFTSEEELAATNATDTDVWGNLPSGDHSQSNLPTVDRPTMLGAVPGMVWQNRDIYYQGPIWAKIPHTDGHFHPSPLIGGFGLKHPPPQIFIKNTPVPANPATTFISTPVNSFITQYSTGQVSVHIDWEIQKERSKRWNPEVQFTSDYGQHSSLLWAPDAAGKYTEPTAIGTRYLTHHL

SEQ ID NO: 1784 - protein, 734 aa, Artificial Sequence
  Description of Artificial Sequence: Synthetic polypeptide
MAADGYLPDWLEDNLSEGVREWWALQPGAPKPKANQQHQDNARGLVLPGYKYLGPGNGLDKGEPVNAADAAALEHDKAYDQQLKAGDNPYLKYNHADAEFQQRLQGDTSFGGNLGRAVFQAKKRVLEPLGLVEQAGETAPGKKRPLIESPQQPDSSTGIGKKGKQPAKKKLVFEDETGAGDGPPEGSTSGAMSDDSEMRAAAGGAAVEGGQGADGVGNASGDWHCDSTWSEGHVTTTSTRTWVLPTYNNHLYKRLGESLQSNTYNGFSTPWGYFDFNRFHCHFSPRDWQRLINNNWGMRPKAMRVKIFNIQVKEVTTSNGETTVANNLTSTVQIFADSSYELPYVMDAGQEGSLPPFPNDVFMVPQYGYCGLVTGNTSQQQTDRNAFYCLEYFPSQMLRTGNNFEITYSFEKVPFHSMYAHSQSLDRLMNPLIDQYLWGLQSTTTGTTLNAGTATTNFTKLRPTNFSNFKKNWLPGPSIKQQGFSKTANQNDIPATGSDSLIKYETHSTLDGRWSALTPGPPMATAGPADSKFSNSQLIFAGPKQNGNTATVPGTLIFTSEEELAATNATDTDMWGNLPGGDQSNSNLPTVDRLTALGAVPGMVWQNRDIYYQGPIWAKIPHTDGHFHPSPLIGGFGLKHPPPQIFIKNTPVPANPATTFSSTPVNSFITQYSTGQVSVQIDWEIQKERSKRWNPEVQFTSNYGQQNSLLWAPDAAGKYTEPRAIGTRYLTHHL

SEQ ID NO: 1785 - protein, 735 aa, Artificial Sequence
  Description of Artificial Sequence: Synthetic polypeptide
MAADGYLPDWLEDNLSEGVREWWALQPGAPKPKANQQHQDNARGLVLPGYKYLGPGNGLDKGEPVNAADAAALEHDKAYDQQLKAGDNPYLKYNHADAEFQQRLQGDTSFGGNLGRAVFQAKKRVLEPLGLVEQAGETAPGKKRPLIESPQQPDSSTGIGKKGKQPAKKKLVFEDETGAGDGPPEGSTSGAMSDDSEMRAAAGGAAVEGGQGADGVGNASGDWHCDSTWSEGHVTTTSTRTWVLPTYNNHLYKRLGESLQSNTYNGFSTPWGYFDFNRFHCHFSPRDWQRLINNNWGMRPKAMRVKIFNIQVKEVTTSNGETTVANNLTSTVQIFADSSYELPYVMDAGQEGSLPPFPNDVFMVPQYGYCGLVTGNTSQQQTDRNAFYCLEYFPSQMLRTGNNFEITYSFEKVPFHSMYAHSQSLDRLMNPLIDQYLWGLQSTTTGTTLNAGTATTNFTKLRPTNFSNFKKNWLPGPSIKQQGFSKTANQNYIIPATGSDSLITYETHSTLDGRWSALTPGPPVATAGPADSKFSNSQLIFAGPKQNGNTATVPGTLIFTSEEELAATNATDTDMWGNLPFNDDSSSNLPTVDRSTFLGAVPGMVWQNRDIYYQGPIWAKIPHTDGHFHPSPLIGGFGLKHPPPQIFIKNTPVPANPATTFSSTPVNSFITQYSTGQVSVQIDWEIQKERSKRWNPEVQFTSNYGQQNSLLWAPDAAGKYTEPRAIGTRYLTHHL

SEQ ID NO: 1786 - protein, 733 aa, Artificial Sequence
  Description of Artificial Sequence: Synthetic polypeptide
MAADGYLPDWLEDNLSEGIREWWDLKPGAPKPKANQQKQDDGRGLVLPGYKYLGPFNGLDKGEPVNAADAAALEHDKAYDQQLKAGDNPYLRYNHADAEFQERLQEDTSFGGNLGRAVFQAKKRVLEPLGLVEEGAKTAPGKKRPLESPQEPDSSSGIGKKGKQPARKRLNFEEDTGAGDGPPEGSDTSAMSSDIEMRAAPGGNAVDAGQGSDGVGNASGDWHCDSTWSEGKVTTTSTRTWVLPTYNNHLYLRLGTTSSSNTYNGFSTPWGYFDFNRFHCHFSPRDWQRLINNNWGLRPKAMRVKIFNIQVKEVTTSNGETTVANNLTSTVQIFADSSYELPYVMDAGQEGSLPPFPNDVFMVPQYGYCGIVTGENQNQTDRNAFYCLEYFPSQMLRTGNNFEMAYNFEKVPFHSMYAHSQSLDRLMNPLLDQYLWHLQSTTSGETLNQGNAATTFGKIRSGDFAFYRKNWLPGPCVKQQRFSKTASQNYKIPASGGNALLKYDTHYTLNNRWSNIAPGPPMATAGPSDGDFSNAQLIFPGPSVTGNTTTSANNLLFTSEEEIAATNPRDTDMFGQIADNNQNATTAPITGNVTAMGVLPGMVWQNRDIYYQGPIWAKIPHADGHFHPSPLIGGFGLKHPPPQIFIKNTPVPANPATTFTAARVDSFITQYSTGQVAVQIEWEIEKERSKRWNPEVQFTSNYGNQSSMLWAPDTTGKYTEPRVIGSRYLTNHL

SEQ ID NO: 1787 - protein, 742 aa, Artificial Sequence; identical to SEQ ID NO: 1598
  Description of Artificial Sequence: Synthetic polypeptide

SEQ ID NO: 1788 - protein, 733 aa, Artificial Sequence; identical to SEQ ID NO: 421
  Description of Artificial Sequence: Synthetic polypeptide

SEQ ID NO: 1789 - protein, 733 aa, Artificial Sequence; identical to SEQ ID NO: 138
  Description of Artificial Sequence: Synthetic polypeptide

SEQ ID NO: 1790 - protein, 733 aa, Artificial Sequence; identical to SEQ ID NO: 425
  Description of Artificial Sequence: Synthetic polypeptide

SEQ ID NO: 1791 - protein, 735 aa, Artificial Sequence
  Description of Artificial Sequence: Synthetic polypeptide
MAADGYLPDWLEDNLSEGVREWWALQPGAPKPKANQQHQDNARGLVLPGYKYLGPGNGLDKGEPVNAADAAALEHDKAYDQQLKAGDNPYLKYNHADAEFQQRLQGDTSFGGNLGRAVFQAKKRVLEPLGLVEQAGETAPGKKRPLIESPQQPDSSTGIGKKGKQPAKKKLVFEDETGAGDGPPEGSTSGAMSDDSEMRAAAGGAAVEGGQGADGVGNASGDWHCDSTWSEGHVTTTSTRTWVLPTYNNHLYKRLGESLQSNTYNGFSTPWGYFDFNRFHCHFSPRDWQRLINNNWGMRPKAMRVKIFNIQVKEVTTSNGETTVANNLTSTVQIFADSSYELPYVMDAGQEGSLPPFPNDVFMVPQYGYCGLVTGNTSQQQTDRNAFYCLEYFPSQMLRTGNNFEITYSFEKVPFHSMYAHSQSLDRLMNPLIDQYLWGLQSTTTGTTLNAGTATTNFTKLRPTNFSNFKKNWLPGPSIKQQGFSKTANQNYEIPATGSDSLIEYETHSTLDGRWSALTPGPPMATAGPADSKFSNSQLIFAGPKQNGNTATVPGTLIFTSEEELAATNATDTDMWGNLPGGDQSSSNLPTVDRLTALGAVPGMVWQNRDIYYQGPIWAKIPHTDGHFHPSPLIGGFGLKHPPPQIFIKNTPVPANPATTFSSTPVNSFITQYSTGQVSVQIDWEIQKERSKRWNPEVQFTSNYGQQNSLLWAPDAAGKYTEPRAIGTRYLTHHL

SEQ ID NO: 1792 - protein, 735 aa, Artificial Sequence
  Description of Artificial Sequence: Synthetic polypeptide
MAADGYLPDWLEDNLSEGVREWWALQPGAPKPKANQQHQDNARGLVLPGYKYLGPGNGLDKGEPVNAADAAALEHDKAYDQQLKAGDNPYLKYNHADAEFQQRLQGDTSFGGNLGRAVFQAKKRVLEPLGLVEQAGETAPGKKRPLIESPQQPDSSTGIGKKGKQPAKKKLVFEDETGAGDGPPEGSTSGAMSDDSEMRAAAGGAAVEGGQGADGVGNASGDWHCDSTWSEGHVTTTSTRTWVLPTYNNHLYKRLGESLQSNTYNGFSTPWGYFDFNRFHCHFSPRDWQRLINNNWGMRPKAMRVKIFNIQVKEVTTSNGETTVANNLTSTVQIFADSSYELPYVMDAGQEGSLPPFPNDVFMVPQYGYCGLVTGNTSQQQTDRNAFYCLEYFPSQMLRTGNNFEITYSFEKVPFHSMYAHSQSLDRLMNPLIDQYLWGLQSTTTGTTLNAGTATTNFTKLRPTNFSNFKKNWLPGPSIKQQGFSKTANQNYEIPATGSDSLIEYETHSTLDGRWSALTPGPPMATAGPADSKFSNSQLIFAGPKQNGNTATVPGTLIFTSEEELAATNATDTDMWGNLPGGDQSSSNLPVVRGLRALGAVPGMVWQNRDIYYQGPIWAKIPHTDGHFHPSPLIGGFGLKHPPPQIFIKNTPVPANPATTFSSTPVNSFITQYSTGQVSVQIDWEIQKERSKRWNPEVQFTSNYGQQNSLLWAPDAAGKYTEPRAIGTRYLTHHL

SEQ ID NO: 1793 - protein, 735 aa, Artificial Sequence
  Description of Artificial Sequence: Synthetic polypeptide
MAADGYLPDWLEDNLSEGVREWWALQPGAPKPKANQQHQDNARGLVLPGYKYLGPGNGLDKGEPVNAADAAALEHDKAYDQQLKAGDNPYLKYNHADAEFQQRLQGDTSFGGNLGRAVFQAKKRVLEPLGLVEQAGETAPGKKRPLIESPQQPDSSTGIGKKGKQPAKKKLVFEDETGAGDGPPEGSTSGAMSDDSEMRAAAGGAAVEGGQGADGVGNASGDWHCDSTWSEGHVTTTSTRTWVLPTYNNHLYKRLGESLQSNTYNGFSTPWGYFDFNRFHCHFSPRDWQRLINNNWGMRPKAMRVKIFNIQVKEVTTSNGETTVANNLTSTVQIFADSSYELPYVMDAGQEGSLPPFPNDVFMVPQYGYCGLVTGNTSQQQTDRNAFYCLEYFPSQMLRTGNNFEITYSFEKVPFHSMYAHSQSLDRLMNPLIDQYLWGLQSTTTGTTLNAGTATTNFTKLRPTNFSNFKKNWLPGPSIKQQGFSKTANQNYEIPATGSDSLIEYETHSTLDGRWSALTPGPPMATAGPADSKFSNSQLIFAGPKQNGNTATVPGTLIFTSEEELAATNATDTDMWGNLPGGDQSSSNLPVVNRLSALGAVPGMVWQNRDIYYQGPIWAKIPHTDGHFHPSPLIGGFGLKHPPPQIFIKNTPVPANPATTFSSTPVNSFITQYSTGQVSVQIDWEIQKERSKRWNPEVQFTSNYGQQNSLLWAPDAAGKYTEPRAIGTRYLTHHL

SEQ ID NO: 1794 - protein, 735 aa, Artificial Sequence
  Description of Artificial Sequence: Synthetic polypeptide
MAADGYLPDWLEDNLSEGVREWWALQPGAPKPKANQQHQDNARGLVLPGYKYLGPGNGLDKGEPVNAADAAALEHDKAYDQQLKAGDNPYLKYNHADAEFQQRLQGDTSFGGNLGRAVFQAKKRVLEPLGLVEQAGETAPGKKRPLIESPQQPDSSTGIGKKGKQPAKKKLVFEDETGAGDGPPEGSTSGAMSDDSEMRAAAGGAAVEGGQGADGVGNASGDWHCDSTWSEGHVTTTSTRTWVLPTYNNHLYKRLGESLQSNTYNGFSTPWGYFDFNRFHCHFSPRDWQRLINNNWGMRPKAMRVKIFNIQVKEVTTSNGETTVANNLTSTVQIFADSSYELPYVMDAGQEGSLPPFPNDVFMVPQYGYCGLVTGNTSQQQTDRNAFYCLEYFPSQMLRTGNNFEITYSFEKVPFHSMYAHSQSLDRLMNPLIDQYLWGLQSTTTGTTLNAGTATTNFTKLRPTNFSNFKKNWLPGPSIKQQGFSKTANQNYEIPATGSDSLIEYETHSTLDGRWSALTPGPPMATAGPADSKFSNSQLIFAGPKQNGNTATVPGTLIFTSEEELAATNATDTDMWGNLPGGDQSSSNLPPVMGLGALGAVPGMVWQNRDIYYQGPIWAKIPHTDGHFHPSPLIGGFGLKHPPPQIFIKNTPVPANPATTFSSTPVNSFITQYSTGQVSVQIDWEIQKERSKRWNPEVQFTSNYGQQNSLLWAPDAAGKYTEPRAIGTRYLTHHL

SEQ ID NO: 1795 - protein, 736 aa, Artificial Sequence
  Description of Artificial Sequence: Synthetic polypeptide
MAADGYLPDWLEDNLSEGVREWWALQPGAPKPKANQQHQDNARGLVLPGYKYLGPGNGLDKGEPVNAADAAALEHDKAYDQQLKAGDNPYLKYNHADAEFQQRLQGDTSFGGNLGRAVFQAKKRVLEPLGLVEQAGETAPGKKRPLIESPQQPDSSTGIGKKGKQPAKKKLVFEDETGAGDGPPEGSTSGAMSDDSEMRAAAGGAAVEGGQGADGVGNASGDWHCDSTWSEGHVTTTSTRTWVLPTYNNHLYKRLGESLQSNTYNGFSTPWGYFDFNRFHCHFSPRDWQRLINNNWGMRPKAMRVKIFNIQVKEVTTSNGETTVANNLTSTVQIFADSSYELPYVMDAGQEGSLPPFPNDVFMVPQYGYCGLVTGNTSQQQTDRNAFYCLEYFPSQMLRTGNNFEITYSFEKVPFHSMYAHSQSLDRLMNPLIDQYLWGLQSTTTGTTLNAGTATTNFTKLRPTNFSNFKKNWLPGPSIKQQGFSKTANQNYEIPATGSDSLIEYETHSTLDGRWSALTPGPPMATAGPADSKFSNSQLIFAGPKQNGNTATVPGTLIFTSEEELAATNATDTDMWGNLPGGDQSRVDRLPTVDRLTALGAVPGMVWQNRDIYYQGPIWAKIPHTDGHFHPSPLIGGFGLKHPPPQIFIKNTPVPANPATTFSSTPVNSFITQYSTGQVSVQIDWEIQKERSKRWNPEVQFTSNYGQQNSLLWAPDAAGKYTEPRAIGTRYLTHHL

SEQ ID NO: 1796 - protein, 736 aa, Artificial Sequence
  Description of Artificial Sequence: Synthetic polypeptide
MAADGYLPDWLEDNLSEGVREWWALQPGAPKPKANQQHQDNARGLVLPGYKYLGPGNGLDKGEPVNAADAAALEHDKAYDQQLKAGDNPYLKYNHADAEFQQRLQGDTSFGGNLGRAVFQAKKRVLEPLGLVEQAGETAPGKKRPLIESPQQPDSSTGIGKKGKQPAKKKLVFEDETGAGDGPPEGSTSGAMSDDSEMRAAAGGAAVEGGQGADGVGNASGDWHCDSTWSEGHVTTTSTRTWVLPTYNNHLYKRLGESLQSNTYNGFSTPWGYFDFNRFHCHFSPRDWQRLINNNWGMRPKAMRVKIFNIQVKEVTTSNGETTVANNLTSTVQIFADSSYELPYVMDAGQEGSLPPFPNDVFMVPQYGYCGLVTGNTSQQQTDRNAFYCLEYFPSQMLRTGNNFEITYSFEKVPFHSMYAHSQSLDRLMNPLIDQYLWGLQSTTTGTTLNAGTATTNFTKLRPTNFSNFKKNWLPGPSIKQQGFSKTANQNYEIPATGSDSLIEYETHSTLDGRWSALTPGPPMATAGPADSKFSNSQLIFAGPKQNGNTATVPGTLIFTSEEELAATNATDTDMWGNLPGGDQSRALRLPTVDRLTALGAVPGMVWQNRDIYYQGPIWAKIPHTDGHFHPSPLIGGFGLKHPPPQIFIKNTPVPANPATTFSSTPVNSFITQYSTGQVSVQIDWEIQKERSKRWNPEVQFTSNYGQQNSLLWAPDAAGKYTEPRAIGTRYLTHHL

SEQ ID NO: 1797 - DNA, 1172 bp, Artificial Sequence
  Description of Artificial Sequence: Synthetic polynucleotide
cttaattaggctgcgcgctcgctcgctcactgaggccgcccgggcaaagcccgggcgtcgggcgacctttggtcgcccggcctcagtgagcgagcgagcgcgcagagagggagtggccaactccatcactaggggttccttgtagttaatgattaacccgccatgctacttatctaccagggtaatggggatcctctagaactatagctagtcgacattgattattgactagttattaatagtaatcaattacggggtcattagttcatagcccatatatggagttccgcgttacataacttacggtaaatggcccgcctggctgaccgcccaacgacccccgcccattgacgtcaataatgacgtatgttcccatagtaacgccaatagggactttccattgacgtcaatgggtggactatttacggtaaactgcccacttggcagtacatcaagtgtatcatatgccaagtacgccccctattgacgtcaatgacggtaaatggcccgcctggcattatgcccagtacatgaccttatgggactttcctacttggcagtacatctacgtattagtcatcgctattaccatgtcgaggccacgttctgcttcactctccccatctcccccccctccccacccccaattttgtatttatttattttttaattattttgtgcagcgatgggggcggggggggggggcgcgcgccaggcggggcggggcggggcgaggggcggggcggggcgaggcggagaggtgcggcggcagccaatcagagcggcgcgctccgaaagtttccttttatggcgaggcggcggcggcggcggccctataaaaagcgaagcgcgcggcgggcgggagcaagctttattgcggtagtttatcacagttaaattgctaacgcagtcagtgcttctgacacaacagtctcgaacttaagctgcagaagttggtcgtgaggcactgggcaggtaagtatcaaggttacaagacaggtttaaggagaccaatagaaactgggcttgtcgagacagagaagactcttgcgtttctgataggcacctattggtcttactgacatccactttgcctttctctccacaggtgtccactcccagttcaattacagctcttaaggctagagtacttaatacgactcsactatagg

SEQ ID NO: 1798 - DNA, 3231 bp, Artificial Sequence
  Description of Artificial Sequence: Synthetic polynucleotide
taagaattcacgcgtggtacctctagagtcgacccgggcggcctcgaggacggggtgaactacgcctgaggatccgatctttttccctctgccaaaaattatggggacatcatgaagccccttgagcatctgacttctggctaataaaggaaatttattttcattgcaatagtgtgttggaattttttgtgtctctcactcggaagcaattcgttgatctgaatttcgaccacccataatacccattaccctggtagataagtagcatggcgggttaatcattaactacaaggaacccctagtgatggagttggccactccctctctgcgcgctcgctcgctcactgaggccgggcgaccaaaggtcgcccgacgcccgggctttgcccgggcggcctcagtgagcgagcgagcgcgcagccttaattaacctaattcactggccgtcgttttacaacgtcgtgactgggaaaaccctggcgttacccaacttaatcgccttgcagcacatccccctttcgccagctggcgtaatagcgaagaggcccgcaccgatcgcccttcccaacagttgcgcagcctgaatggcgaatgggacgcgccctgtagcggcgcattaagcgcggcgggtgtggtggttacgcgcagcgtgaccgctacacttgccagcgccctagcgcccgctcctttcgctttcttcccttcctttctcgccacgttcgccggctttccccgtcaagctctaaatcgggggctccctttagggttccgatttagtgctttacggcacctcgaccccaaaaaacttgattagggtgatggttcacgtagtgggccatcgccctgatagacggtttttcgccctttgacgttggagtccacgttctttaatagtggactcttgttccaaactggaacaacactcaaccctatctcggtctattcttttgatttataagggattttgccgatttcggcctattggttaaaaaatgagctgatttaacaaaaatttaacgcgaattttaacaaaatattaacgcttacaatttaggtggcacttttcggggaaatgtgcgcggaacccctatttgtttatttttctaaatacattcaaatatgtatccgctcatgagacaataaccctgataaatgcttcaataatattgaaaaaggaagagtatgagtattcaacatttccgtgtcgcccttattcccttttttgcggcattttgccttcctgtttttgctcacccagaaacgctggtgaaagtaaaagatgctgaagatcagttgggtgcacgagtgggttacatcgaactggatctcaacagcggtaagatccttgagagttttcgccccgaagaacgttttccaatgatgagcacttttaaagttctgctatgtggcgcggtattatcccgtattgacgccgggcaagagcaactcggtcgccgcatacactattctcagaatgacttggttgagtactcaccagtcacagaaaagcatcttacggatggcatgacagtaagagaattatgcagtgctgccataaccatgagtgataacactgcggccaacttacttctgacaacgatcggaggaccgaaggagctaaccgcttttttgcacaacatgggggatcatgtaactcgccttgatcgttgggaaccggagctgaatgaagccataccaaacgacgagcgtgacaccacgatgcctgtagcaatggcaacaacgttgcgcaaactattaactggcgaactacttactctagcttcccggcaacaattaatagactggatggaggcggataaagttgcaggaccacttctgcgctcggcccttccggctggctggtttattgctgataaatctggagccggtgagcgtgggtctcgcggtatcattgcagcactggggccagatggtaagccctcccgtatcgtagttatctacacgacggggagtcaggcaactatggatgaacgaaatagacagatcgctgagataggtgcctcactgattaagcattggtaactgtcagaccaagtttactcatatatactttagattgatttaaaacttcatttttaatttaaaaggatctaggtgaagatcctttttgataatctcatgaccaaaatcccttaacgtgagttttcgttccactgagcgtcagaccccgtagaaaagatcaaaggatcttcttgagatcctttttttctgcgcgtaatctgctgcttgcaaacaaaaaaaccaccgctaccagcggtggtttgtttgccggatcaagagctaccaactctttttccgaaggtaactggcttcagcagagcgcagataccaaatactgttcttctagtgtagccgtagttaggccaccacttcaagaactctgtagcaccgcctacatacctcgctctgctaatcctgttaccagtggctgctgccagtggcgataagtcgtgtcttaccgggttggactcaagacgatagttaccggataaggcgcagcggtcgggctgaacggggggttcgtgcacacagcccagcttggagcgaacgacctacaccgaactgagatacctacagcgtgagctatgagaaagcgccacgcttcccgaagggagaaaggcggacaggtatccggtaagcggcagggtcggaacaggagagcgcacgagggagcttccagggggaaacgcctggtatctttatagtcctgtcgggtttcgccacctctgacttgagcgtcgatttttgtgatgctcgtcaggggggcggagcctatggaaaaacgccagcaacgcggcctttttacggttcctggccttttgctggccttttgctcacatgttctttcctgcgttatcccctgattctgtggataaccgtattaccgcctttgagtgagctgataccgctcgccgcagccgaacgaccgagcgcagcgagtcagtgagcgaggaagcggaagagcgcccaatacgcaaaccgcctctccccgcgcgttggccgattcattaatgcagctggcacgacaggtttcccgactggaaagcgggcagtgagcgcaacgcaattaatgtgagttagctcactcattaggcaccccaggctttacactttatgcttccggctcgtatgttgtgtggaattgtgagcggataacaatttcacacaggaaacagctatgaccatgattacgccagatttaattaaggc

SEQ ID NO: 1799 - protein, 737 aa, Artificial Sequence
  Description of Artificial Sequence: Synthetic polypeptide
  misc_feature (264)..(264): Xaa can be any naturally occurring amino acid
  misc_feature (266)..(266): Xaa can be any naturally occurring amino acid
  misc_feature (268)..(268): Xaa can be any naturally occurring amino acid
  misc_feature (448)..(448): Xaa can be any naturally occurring amino acid
  misc_feature (459)..(460): Xaa can be any naturally occurring amino acid
  misc_feature (467)..(467): Xaa can be any naturally occurring amino acid
  misc_feature (470)..(471): Xaa can be any naturally occurring amino acid
  misc_feature (474)..(474): Xaa can be any naturally occurring amino acid
  misc_feature (495)..(495): Xaa can be any naturally occurring amino acid
  misc_feature (516)..(516): Xaa can be any naturally occurring amino acid
  misc_feature (533)..(533): Xaa can be any naturally occurring amino acid
  misc_feature (547)..(547): Xaa can be any naturally occurring amino acid
  misc_feature (551)..(551): Xaa can be any naturally occurring amino acid
  misc_feature (555)..(555): Xaa can be any naturally occurring amino acid
  misc_feature (557)..(557): Xaa can be any naturally occurring amino acid
  misc_feature (561)..(561): Xaa can be any naturally occurring amino acid
  misc_feature (563)..(563): Xaa can be any naturally occurring amino acid
  misc_feature (577)..(577): Xaa can be any naturally occurring amino acid
  misc_feature (583)..(583): Xaa can be any naturally occurring amino acid
  misc_feature (593)..(593): Xaa can be any naturally occurring amino acid
  misc_feature (596)..(596): Xaa can be any naturally occurring amino acid
  misc_feature (661)..(662): Xaa can be any naturally occurring amino acid
  misc_feature (664)..(665): Xaa can be any naturally occurring amino acid
  misc_feature (710)..(710): Xaa can be any naturally occurring amino acid
  misc_feature (717)..(719): Xaa can be any naturally occurring amino acid
  misc_feature (723)..(723): Xaa can be any naturally occurring amino acid
MAADGYLPDWLEDNLSEGIREWWDLKPGAPKPKANQQKQDDGRGLVLPGYKYLGPFNGLDKGEPVNAADAAALEHDKAYDQQLKAGDNPYLRYNHADAEFQERLQEDTSFGGNLGRAVFQAKKRVLEPLGLVEEGAKTAPGKKRPVEPSPQRSPDSSTGIGKKGQQPAKKRLNFGQTGDSESVPDPQPLGEPPAGPSGLGSGTMAAGGGAPMADNNEGADGVGNASGNWHCDSTWLGDRVITTSTRTWALPTYNNHLYKQISSXSXGXTNDNHYFGYSTPWGYFDFNRFHCHFSPRDWQRLINNNWGFRPKRLNFKLFNIQVKEVTTNDGVTTIANNLTSTVQVFSDSEYQLPYVLGSAHQGCLPPFPADVFMIPQYGYLTLNNGSQAVGRSSFYCLEYFPSQMLRTGNNFTFSYTFEDVPFHSSYAHSQSLDRLMNPLIDQYLYYLXRTQSTGGTAGXXELLFSQXGPXXMSXQAKNWLPGPCYRQQRVSKTLXQNNNSNFAWTGATKYHLNGRXSLVNPGVAMATHKDDEXRFFPSSGVLIFGKXGAGXNNTXLXNVMXTXEEEIKTTNPVATEXYGVVAXNLQSSNTAPXTGXVNSQGALPGMVWQNRDVYLQGPIWAKIPHTDGNFHPSPLMGGFGLKHPPPQILIKNTPVPANPPXXFXXAKFASFITQYSTGQVSVEIEWELQKENSKRWNPEIQYTSNYAKSXNVDFAVXXXGVYXEPRPIGTRYLTRNL

SEQ ID NO: 1800 - protein, 737 aa, Artificial Sequence
  Description of Artificial Sequence: Synthetic polypeptide
MAADGYLPDWLEDNLSEGIREWWDLKPGAPKPKANQQKQDDGRGLVLPGYKYLGPFNGLDKGEPVNAADAAALEHDKAYDQQLKAGDNPYLRYNHADAEFQERLQEDTSFGGNLGRAVFQAKKRVLEPLGLVEEGAKTAPGKKRPVEPSPQRSPDSSTGIGKKGQQPAKKRLNFGQTGDSESVPDPQPLGEPPAGPSGLGSGTMAAGGGAPMADNNEGADGVGNASGNWHCDSTWLGDRVITTSTRTWALPTYNNHLYKQISSASSGSTNDNHYFGYSTPWGYFDFNRFHCHFSPRDWQRLINNNWGFRPKRLNFKLFNIQVKEVTTNDGVTTIANNLTSTVQVFSDSEYQLPYVLGSAHQGCLPPFPADVFMIPQYGYLTLNNGSQAVGRSSFYCLEYFPSQMLRTGNNFTFSYTFEDVPFHSSYAHSQSLDRLMNPLIDQYLYYLARTQSTGGTAGNRELLFSQGGPSNMSAQAKNWLPGPCYRQQRVSKTLAQNNNSNFAWTGATKYHLNGRDSLVNPGVAMATHKDDEDRFFPSSGVLIFGKEGAGANNTALENVMLTNEEEIKTTNPVATEQYGVVASNLQSSNTAPATGAVNSQGALPGMVWQNRDVYLQGPIWAKIPHTDGNFHPSPLMGGFGLKHPPPQILIKNTPVPANPPATFTPAKFASFITQYSTGQVSVEIEWELQKENSKRWNPEIQYTSNYAKSTNVDFAVNNEGVYSEPRPIGTRYLTRNL

SEQ ID NO: 1801 - protein, 737 aa, Artificial Sequence
  Description of Artificial Sequence: Synthetic polypeptide
MAADGYLPDWLEDNLSEGIREWWDLKPGAPKPKANQQKQDDGRGLVLPGYKYLGPFNGLDKGEPVNAADAAALEHDKAYDQQLKAGDNPYLRYNHADAEFQERLQEDTSFGGNLGRAVFQAKKRVLEPLGLVEEGAKTAPGKKRPVEPSPQRSPDSSTGIGKKGQQPAKKRLNFGQTGDSESVPDPQPLGEPPAGPSGLGSGTMAAGGGAPMADNNEGADGVGNASGNWHCDSTWLGDRVITTSTRTWALPTYNNHLYKQISSQSSGSTNDNHYFGYSTPWGYFDFNRFHCHFSPRDWQRLINNNWGFRPKRLNFKLFNIQVKEVTTNDGVTTIANNLTSTVQVFSDSEYQLPYVLGSAHQGCLPPFPADVFMIPQYGYLTLNNGSQAVGRSSFYCLEYFPSQMLRTGNNFTFSYTFEDVPFHSSYAHSQSLDRLMNPLIDQYLYYLSRTQSTGGTAGNRELLFSQGGPANMSAQAKNWLPGPCYRQQRVSKTLSQNNNSNFAWTGATKYHLNGRDSLVNPGVAMATHKDDEERFFPSSGVLIFGKQGAGANNTTLDNVMMTSEEEIKTTNPVATEQYGVVASNLQSSNTAPQTGTVNSQGALPGMVWQNRDVYLQGPIWAKIPHTDGNFHPSPLMGGFGLKHPPPQILIKNTPVPANPPAVFSPAKFASFITQYSTGQVSVEIEWELQKENSKRWNPEIQYTSNYAKSTNVDFAVNSEGVYSEPRPIGTRYLTRNL

SEQ ID NO: 1802 - protein, 737 aa, Artificial Sequence
  Description of Artificial Sequence: Synthetic polypeptide
MAADGYLPDWLEDNLSEGIREWWDLKPGAPKPKANQQKQDDGRGLVLPGYKYLGPFNGLDKGEPVNAADAAALEHDKAYDQQLKAGDNPYLRYNHADAEFQERLQEDTSFGGNLGRAVFQAKKRVLEPLGLVEEGAKTAPGKKRPVEPSPQRSPDSSTGIGKKGQQPAKKRLNFGQTGDSESVPDPQPLGEPPAGPSGLGSGTMAAGGGAPMADNNEGADGVGNASGNWHCDSTWLGDRVITTSTRTWALPTYNNHLYKQISSASSGSTNDNHYFGYSTPWGYFDFNRFHCHFSPRDWQRLINNNWGFRPKRLNFKLFNIQVKEVTTNDGVTTIANNLTSTVQVFSDSEYQLPYVLGSAHQGCLPPFPADVFMIPQYGYLTLNNGSQAVGRSSFYCLEYFPSQMLRTGNNFTFSYTFEDVPFHSSYAHSQSLDRLMNPLIDQYLYYLARTQSTGGTAGTRELLFSQGGPSNMSAQAKNWLPGPCYRQQRVSKTLTQNNNSNFAWTGATKYHLNGRDSLVNPGVAMATHKDDEDRFFPSSGVLIFGKQGAGANNTALDNVMITNEEEIKTTNPVATEQYGVVASNLQSSNTAPATGTVNSQGALPGMVWQNRDVYLQGPIWAKIPHTDGNFHPSPLMGGFGLKHPPPQILIKNTPVPANPPTVFSPAKFASFITQYSTGQVSVEIEWELQKENSKRWNPEIQYTSNYAKSTNVDFAVNSEGVYTEPRPIGTRYLTRNL

SEQ ID NO: 1803 - protein, 737 aa, Artificial Sequence
  Description of Artificial Sequence: Synthetic polypeptide
  misc_feature (264)..(264): Xaa can be any naturally occurring amino acid
  misc_feature (448)..(448): Xaa can be any naturally occurring amino acid
  misc_feature (459)..(459): Xaa can be any naturally occurring amino acid
  misc_feature (470)..(470): Xaa can be any naturally occurring amino acid
  misc_feature (495)..(495): Xaa can be any naturally occurring amino acid
  misc_feature (533)..(533): Xaa can be any naturally occurring amino acid
  misc_feature (547)..(547): Xaa can be any naturally occurring amino acid
  misc_feature (555)..(555): Xaa can be any naturally occurring amino acid
  misc_feature (557)..(557): Xaa can be any naturally occurring amino acid
  misc_feature (561)..(561): Xaa can be any naturally occurring amino acid
  misc_feature (563)..(563): Xaa can be any naturally occurring amino acid
  misc_feature (593)..(593): Xaa can be any naturally occurring amino acid
  misc_feature (596)..(596): Xaa can be any naturally occurring amino acid
  misc_feature (661)..(662): Xaa can be any naturally occurring amino acid
  misc_feature (664)..(664): Xaa can be any naturally occurring amino acid
  misc_feature (718)..(718): Xaa can be any naturally occurring amino acid
  misc_feature (723)..(723): Xaa can be any naturally occurring amino acid
MAADGYLPDWLEDNLSEGIREWWDLKPGAPKPKANQQKQDDGRGLVLPGYKYLGPFNGLDKGEPVNAADAAALEHDKAYDQQLKAGDNPYLRYNHADAEFQERLQEDTSFGGNLGRAVFQAKKRVLEPLGLVEEGAKTAPGKKRPVEPSPQRSPDSSTGIGKKGQQPAKKRLNFGQTGDSESVPDPQPLGEPPAGPSGLGSGTMAAGGGAPMADNNEGADGVGNASGNWHCDSTWLGDRVITTSTRTWALPTYNNHLYKQISSXSSGSTNDNHYFGYSTPWGYFDFNRFHCHFSPRDWQRLINNNWGFRPKRLNFKLFNIQVKEVTTNDGVTTIANNLTSTVQVFSDSEYQLPYVLGSAHQGCLPPFPADVFMIPQYGYLTLNNGSQAVGRSSFYCLEYFPSQMLRTGNNFTFSYTFEDVPFHSSYAHSQSLDRLMNPLIDQYLYYLXRTQSTGGTAGXRELLFSQGGPXNMSAQAKNWLPGPCYRQQRVSKTLXQNNNSNFAWTGATKYHLNGRDSLVNPGVAMATHKDDEXRFFPSSGVLIFGKXGAGANNTXLXNVMXTXEEEIKTTNPVATEQYGVVASNLQSSNTAPXTGXVNSQGALPGMVWQNRDVYLQGPIWAKIPHTDGNFHPSPLMGGFGLKHPPPQILIKNTPVPANPPXXFXPAKFASFITQYSTGQVSVEIEWELQKENSKRWNPEIQYTSNYAKSTNVDFAVNXEGVYXEPRPIGTRYLTRNL

SEQ ID NO: 1804 - protein, 737 aa, Artificial Sequence
  Description of Artificial Sequence: Synthetic polypeptide
  misc_feature (264)..(264): Xaa can be any naturally occurring amino acid
  misc_feature (448)..(448): Xaa can be any naturally occurring amino acid
  misc_feature (470)..(470): Xaa can be any naturally occurring amino acid
  misc_feature (533)..(533): Xaa can be any naturally occurring amino acid
  misc_feature (547)..(547): Xaa can be any naturally occurring amino acid
  misc_feature (555)..(555): Xaa can be any naturally occurring amino acid
  misc_feature (557)..(557): Xaa can be any naturally occurring amino acid
  misc_feature (561)..(561): Xaa can be any naturally occurring amino acid
  misc_feature (563)..(563): Xaa can be any naturally occurring amino acid
  misc_feature (593)..(593): Xaa can be any naturally occurring amino acid
  misc_feature (596)..(596): Xaa can be any naturally occurring amino acid
  misc_feature (662)..(662): Xaa can be any naturally occurring amino acid
  misc_feature (664)..(664): Xaa can be any naturally occurring amino acid
  misc_feature (718)..(718): Xaa can be any naturally occurring amino acid
MAADGYLPDWLEDNLSEGIREWWDLKPGAPKPKANQQKQDDGRGLVLPGYKYLGPFNGLDKGEPVNAADAAALEHDKAYDQQLKAGDNPYLRYNHADAEFQERLQEDTSFGGNLGRAVFQAKKRVLEPLGLVEEGAKTAPGKKRPVEPSPQRSPDSSTGIGKKGQQPAKKRLNFGQTGDSESVPDPQPLGEPPAGPSGLGSGTMAAGGGAPMADNNEGADGVGNASGNWHCDSTWLGDRVITTSTRTWALPTYNNHLYKQISSXSSGSTNDNHYFGYSTPWGYFDFNRFHCHFSPRDWQRLINNNWGFRPKRLNFKLFNIQVKEVTTNDGVTTIANNLTSTVQVFSDSEYQLPYVLGSAHQGCLPPFPADVFMIPQYGYLTLNNGSQAVGRSSFYCLEYFPSQMLRTGNNFTFSYTFEDVPFHSSYAHSQSLDRLMNPLIDQYLYYLXRTQSTGGTAGNRELLFSQGGPXNMSAQAKNWLPGPCYRQQRVSKTLSQNNNSNFAWTGATKYHLNGRDSLVNPGVAMATHKDDEXRFFPSSGVLIFGKXGAGANNTXLXNVMXTXEEEIKTTNPVATEQYGVVASNLQSSNTAPXTGXVNSQGALPGMVWQNRDVYLQGPIWAKIPHTDGNFHPSPLMGGFGLKHPPPQILIKNTPVPANPPAXFXPAKFASFITQYSTGQVSVEIEWELQKENSKRWNPEIQYTSNYAKSTNVDFAVNXEGVYSEPRPIGTRYLTRNL

SEQ ID NO: 1805 - DNA, 2217 bp, Artificial Sequence
  Description of Artificial Sequence: Synthetic polynucleotide
atggctgccgatggttatcttccagattggctcgaggacactctctctgaaggaataagacagtggtggaagctcaaacctggcccaccaccaccaaagcccgcagagcggcataaggacgacagcaggggtcttgtgcttcctgggtacaagtacctcggacccttcaacggactcgacaagggagagccggtcaacgaggcagacgccgcggccctcgagcacgacaaagcctacgaccggcagctcgacagcggagacaacccgtacctcaagtacaaccacgccgacgcggagtttcaggagcgccttaaagaagatacgtcttttgggggcaacctcggacgagcagtcttccaggcgaaaaagagggttcttgaacctctgggcctggttgaggaacctgttaagacggctccgggaaagaagagaccggtagagccatcaccccagcgttctccagactcctctacgggcatcggcaagaaaggccaacagcccgccagaaaaagactcaattttggtcagactggcgactcagagtcagttccagaccctcaacctctcggagaacctccagcagcgccctctggtgtgggacctaatacaatggctgcaggcggtggcgcaccaatggcagacaataacgaaggcgccgacggagtgggtagttcctcgggaaattggcattgcgattccacatggctgggcgacagagtcatcaccaccagcacccgaacctgggccctgcccacctacaacaaccacctctacaagcaaatctccaacgggacatcgggaggagccaccaacgacaacacctacttcggctacagcaccccctgggggtattttgactttaacagattccactgccacttttcaccacgtgactggcagcgactcatcaacaacaactggggattccggcccaagagactcagcttcaagctcttcaacatccaggtcaaggaggtcacgcagaatgaaggcaccaagaccatcgccaataacctcaccagcaccatccaggtgtttacggactcggagtaccagctgccgtacgttctcggctctgcccaccagggctgcctgcctccgttcccggcggacgtgttcatgattccccagtacggctacctaacactcaacaacggtagtcaggccgtgggacgctcctccttctactgcctggaatactttccttcgcagatgctgagaaccggcaacaacttccagtttacttacaccttcgaggacgtgcctttccacagcagctacgcccacagccagagcttggaccggctgatgaatcctctgattgaccagtacctgtactacttgtctcggactcaaacaacaggaggcacggcaaatacgcagactctgggcttcagccaaggtgggcctaatacaatggccaatcaggcaaagaactggctgccaggaccctgttaccgccaacaacgcgtctcaacgacaaccgggcaaaacaacaatagcaactttgcctggactgctgggaccaaataccatctgaatggaagaaattcattggctaatcctggcatcgctatggcaacacacaaagacgacgaggagcgtttttttcccagtaacgggatcctgatttttggcaaacaaaatgctgccagagacaatgcggattacagcgatgtcatgctcaccagcgaggaagaaatcaaaaccactaaccctgtggctacagaggaatacggtatcgtggcagataacttgcagcagcaaaacacggctcctcaaattggaactgtcaacagccagggggccttacccggtatggtctggcagaaccgggacgtgtacctgcagggtcccatctgggccaagattcctcacacggacggcaacttccacccgtctccgctgatgggcggctttggcctgaaacatcctccgcctcagatcctgatcaagaacacgcctgtacctgcggatcctccgaccaccttcaaccagtcaaagctgaactctttcatcacgcaatacagcaccggacaggtcagcgtggaaattgaatgggagctgcagaaggaaaacagcaagcgctggaaccccgagatccagtacacctccaactactacaaatctacaagtgtggactttgctgttaatacagaaggcgtgtactctgaaccccgccccattggcacccgttacctcacccgtaatctgtaa

SEQ ID NO: 1806 - protein, 733 aa, Artificial Sequence; identical to SEQ ID NO: 1591
  Description of Artificial Sequence: Synthetic polypeptide

SEQ ID NO: 1807 - DNA, 2203 bp, Artificial Sequence
  Description of Artificial Sequence: Synthetic polynucleotide
atgtcttttgttgatcaccctccagattggttggaagaagttggtgaaggtcttcgcgagtttttgggccttgaagcgggcccaccgaaaccaaaacccaatcagcagcatcaagatcaagcccgtggtcttgtgctgcctggttataactatctcggacccggaaacggtctcgatcgaggagagcctgtcaacagggcagacgaggtcgcgcgagagcacgacatctcgtacaacgagcagcttgaggcgggagacaacccctacctcaagtacaaccacgcggacgccgagtttcaggagaagctcgccgacgacacatccttcgggggaaacctcggaaaggcagtctttcaggccaagaaaagggttctcgaaccttttggcctggttgaagagggtgctaagacggcccctaccggaaagcggatagacgaccactttccaaaaagaaagaaggctcggaccgaagaggactccaagccttccacctcgtcagacgccgaagctggacccagcggatcccagcagctgcaaatcccagcccaaccagcctcaagtttgggagctgatacaatgtctgcgggaggtggcggcccattgggcgacaataaccaaggtgccgatggagtgggcaatgcctcgggagattggcattgcgattccacgtggatgggggacagagtcgtcaccaagtccacccgaacctgggtgctgcccagctacaacaaccaccagtaccgagagatcaaaagcggctccgtcgacggaagcaacgccaacgcctactttggatacagcaccccctgggggtactttgactttaaccgcttccacagccactggagcccccgagactggcaaagactcatcaacaactactggggcttcagaccccggtccctcagagtcaaaatcttcaacattcaagtcaaagaggtcacggtgcaggactccaccaccaccatcgccaacaacctcacctccaccgtccaagtgtttacggacgacgactaccagctgccctacgtcgtcggcaacgggaccgagggatgcctgccggccttccctccgcaggtctttacgctgccgcagtacggttacgcgacgctgaaccgcgacaacacagaaaatcccaccgagaggagcagcttcttctgcctagagtactttcccagcaagatgctgagaacgggcaacaactttgagtttacctacaactttgaggaggtgcccttccactccagcttcgctcccagtcagaacctgttcaagctggccaacccgctggtggaccagtacttgtaccgcttcgtgagcacaaataacactggcggagtccagttcaacaagaacctggccgggagatacgccaacacctacaaaaactggttcccggggcccatgggccgaacccagggctggaacctgggctccggggtcaaccgcgccagtgtcagcgccttcgccacgaccaataggatggagctcgagggcgcgagttaccaggtgcccccgcagccgaacggcatgaccaacaacctccagggcagcaacacctatgccctggagaacactatgatcttcaacagccagccggcgaacccgggcaccaccgccacgtacctcgagggcaacatgctcatcaccagcgagagcgagacgcagccggtgaaccgcgtggcgtacaacgtcggcgggcaggtggccaccaacaaccagagctccaccactgcccccgcgaccggcacgtacaacctccaggaaatcgtgcccggcagcgtgtggatggagagggacgtgtacctccaaggacccatctgggccaagatcccagagacgggggcgcactttcacccctctccggccatgggcggattcggactcaaacacccaccgcccatgatgctcatcaagaacacgcctgtgcccggaaatatcaccagcttctcggacgtgcccgtcagcagcttcatcacccagtacagcaccgggcaggtcaccgtggagatggagtgggagctcaagaaggaaaactccaagaggtggaacccagagatccagtacacaaacaactacaacgacccccagtttgtggactttgccccggacagcaccggggaatacagaaccaccagacctatcggaacccgataccttacccgacccctttaacccattcatgtcgcataccctcaataaa

SEQ ID NO: 1808 - protein, 724 aa, Artificial Sequence
  Description of Artificial Sequence: Synthetic polypeptide
MSFVDHPPDWLEEVGEGLREFLGLEAGPPKPKPNQQHQDQARGLVLPGYNYLGPGNGLDRGEPVNRADEVAREHDISYNEQLEAGDNPYLKYNHADAEFQEKLADDTSFGGNLGKAVFQAKKRVLEPFGLVEEGAKTAPTGKRIDDHFPKRKKARTEEDSKPSTSSDAEAGPSGSQQLQIPAQPASSLGADTMSAGGGGPLGDNNQGADGVGNASGDWHCDSTWMGDRVVTKSTRTWVLPSYNNHQYREIKSGSVDGSNANAYFGYSTPWGYFDFNRFHSHWSPRDWQRLINNYWGFRPRSLRVKIFNIQVKEVTVQDSTTTIANNLTSTVQVFTDDDYQLPYVVGNGTEGCLPAFPPQVFTLPQYGYATLNRDNTENPTERSSFFCLEYFPSKMLRTGNNFEFTYNFEEVPFHSSFAPSQNLFKLANPLVDQYLYRFVSTNNTGGVQFNKNLAGRYANTYKNWFPGPMGRTQGWNLGSGVNRASVSAFATTNRMELEGASYQVPPQPNGMTNNLQGSNTYALENTMIFNSQPANPGTTATYLEGNMLITSESETQPVNRVAYNVGGQVATNNQSSTTAPATGTYNLQEIVPGSVWMERDVYLQGPIWAKIPETGAHFHPSPAMGGFGLKHPPPMMLIKNTPVPGNITSFSDVPVSSFITQYSTGQVTVEMEWELKKENSKRWNPEIQYTNNYNDPQFVDFAPDSTGEYRTTRPIGTRYLTRPL

SEQ ID NO: 1809 - DNA, 2203 bp, Artificial Sequence
  Description of Artificial Sequence: Synthetic polynucleotide
atgtcttttgttgatcaccctccagattggttggaagaagttggtgaaggtcttcgcgagtttttgggccttgaagcgggcccaccgaaaccaaaacccaatcagcagcatcaagatcaagcccgtggtcttgtgctgcctggttataactatctcggacccggaaacggtctcgatcgaggagagcctgtcaacagggcagacgaggtcgcgcgagagcacgacatctcgtacaacgagcagcttgaggcgggagacaacccctacctcaagtacaaccacgcggacgccgagtttcaggagaagctcgccgacgacacatccttcgggggaaacctcggaaaggcagtctttcaggccaagaaaagggttctcgaaccttttggcctggttgaagagggtgctaagacggcccctaccggaaagcggatagacgaccactttccaaaaagaaagaaggctcggaccgaagaggactccaagccttccacctcgtcagacgccgaagctggacccagcggatcccagcagctgcaaatcccagcccaaccagcctcaagtttgggagctgatacaatgtctgcgggaggtggcggcccattgggcgacaataaccaaggtgccgatggagtgggcaatgcctcgggagattggcattgcgattccacgtggatgggggacagagtcgtcaccaagtccacccgaacctgggtgctgcccagctacaacaaccaccagtaccgagagatcaaaagcggctccgtcgacggaagcaacgccaacgcctactttggatacagcaccccctgggggtactttgactttaaccgcttccacagccactggagcccccgagactggcaaagactcatcaacaactactggggcttcagaccccggtccctcagagtcaaaatcttcaacattcaagtcaaagaggtcacggtgcaggactccaccaccaccatcgccaacaacctcacctccaccgtccaagtgtttacggacgacgactaccagctgccctacgtcgtcggcaacgggaccgagggatgcctgccggccttccctccgcaggtctttacgctgccgcagtacggttacgcgacgctgaaccgcgacaacacagaaaatcccaccgagaggagcagcttcttctgcctagagtactttcccagcaagatgctgagaacgggcaacaactttgagtttacctacaactttgaggaggtgcccttccactccagcttcgctcccagtcagaacctgttcaagctggccaacccgctggtggaccagtacttgtaccgcttcgtgagcacaaataacactggcggagtccagttcaacaagaacctggccgggagatacgccaacacctacaaaaactggttcccggggcccatgggccgaacccagggctggaacctgggctccggggtcaaccgcgccagtgtcagcgccttcgccacgaccaataggatggagctcgagggcgcgagttaccaggtgcccccgcagccgaacggcatgaccaacaacctccagggcagcaacacctatgccctggagaacactatgatcttcaacagccagccggcgaacccgggcaccaccgccacgtacctcgagggcaacatgctcatcaccagcgagagcgagacgcagccggtgaaccgcgtggcgtacaacgtcggcgggcagatggccaccaacaaccagagctccaccactgcccccgcgaccggcacggtcaacctccaggaaatcgtgcccggcagcgtgtggatggagagggacgtgtacctccaaggacccatctgggccaagatcccagagacgggggcgcactttcacccctctccggccatgggcggattcggactcaaacacccaccgcccatgatgctcatcaagaacacgcctgtgcccggaaatatcaccagcttctcggacgtgcccgtcagcagcttcatcacccagtacagcaccgggcaggtcaccgtggagatggagtgggagctcaagaaggaaaactccaagaggtggaacccagagatccagtacacaaacaactacaacgacccccagtttgtggactttgccccggacagcaccggggaatacagaaccaccagacctatcggaacccgataccttacccgacccctttaacccattcatgtcgcataccctcaataaa

SEQ ID NO: 1810 - protein, 724 aa, Artificial Sequence
  Description of Artificial Sequence: Synthetic polypeptide
MSFVDHPPDWLEEVGEGLREFLGLEAGPPKPKPNQQHQDQARGLVLPGYNYLGPGNGLDRGEPVNRADEVAREHDISYNEQLEAGDNPYLKYNHADAEFQEKLADDTSFGGNLGKAVFQAKKRVLEPFGLVEEGAKTAPTGKRIDDHFPKRKKARTEEDSKPSTSSDAEAGPSGSQQLQIPAQPASSLGADTMSAGGGGPLGDNNQGADGVGNASGDWHCDSTWMGDRVVTKSTRTWVLPSYNNHQYREIKSGSVDGSNANAYFGYSTPWGYFDFNRFHSHWSPRDWQRLINNYWGFRPRSLRVKIFNIQVKEVTVQDSTTTIANNLTSTVQVFTDDDYQLPYVVGNGTEGCLPAFPPQVFTLPQYGYATLNRDNTENPTERSSFFCLEYFPSKMLRTGNNFEFTYNFEEVPFHSSFAPSQNLFKLANPLVDQYLYRFVSTNNTGGVQFNKNLAGRYANTYKNWFPGPMGRTQGWNLGSGVNRASVSAFATTNRMELEGASYQVPPQPNGMTNNLQGSNTYALENTMIFNSQPANPGTTATYLEGNMLITSESETQPVNRVAYNVGGQMATNNQSSTTAPATGTVNLQEIVPGSVWMERDVYLQGPIWAKIPETGAHFHPSPAMGGFGLKHPPPMMLIKNTPVPGNITSFSDVPVSSFITQYSTGQVTVEMEWELKKENSKRWNPEIQYTNNYNDPQFVDFAPDSTGEYRTTRPIGTRYLTRPL

SEQ ID NO: 1811 - DNA, 2203 bp, Artificial Sequence
  Description of Artificial Sequence: Synthetic polynucleotide
atgtcttttgttgatcaccctccagattggttggaagaagttggtgaaggtcttcgcgagtttttgggccttgaagcgggcccaccgaaaccaaaacccaatcagcagcatcaagatcaagcccgtggtcttgtgctgcctggttataactatctcggacccggaaacggtctcgatcgaggagagcctgtcaacagggcagacgaggtcgcgcgagagcacgacatctcgtacaacgagcagcttgaggcgggagacaacccctacctcaagtacaaccacgcggacgccgagtttcaggagaagctcgccgacgacacatccttcgggggaaacctcggaaaggcagtctttcaggccaagaaaagggttctcgaaccttttggcctggttgaagagggtgctaagacggcccctaccggaaagcggatagacgaccactttccaaaaagaaagaaggctcggaccgaagaggactccaagccttccacctcgtcagacgccgaagctggacccagcggatcccagcagctgcaaatcccagcccaaccagcctcaagtttgggagctgatacaatgtctgcgggaggtggcggcccattgggcgacaataaccaaggtgccgatggagtgggcaatgcctcgggagattggcattgcgattccacgtggatgggggacagagtcgtcaccaagtccacccgaacctgggtgctgcccagctacaacaaccaccagtaccgagagatcaaaagcggctccgtcgacggaagcaacgccaacgcctactttggatacagcaccccctgggggtactttgactttaaccgcttccacagccactggagcccccgagactggcaaagactcatcaacaactactggggcttcagaccccggtccctcagagtcaaaatcttcaacattcaagtcaaagaggtcacggtgcaggactccaccaccaccatcgccaacaacctcacctccaccgtccaagtgtttacggacgacgactaccagctgccctacgtcgtcggcaacgggaccgagggatgcctgccggccttccctccgcaggtctttacgctgccgcagtacggttacgcgacgctgaaccgcgacaacacagaaaatcccaccgagaggagcagcttcttctgcctagagtactttcccagcaagatgctgagaacgggcaacaactttgagtttacctacaactttgaggaggtgcccttccactccagcttcgctcccagtcagaacctgttcaagctggccaacccgctggtggaccagtacttgtaccgcttcgtgagcacaaataacactggcggagtccagttcaacaagaacctggccgggagatacgccaacacctacaaaaactggttcccggggcccatgggccgaacccagggctggaacctgggctccggggtcaaccgcgccagtgtcagcgccttcgccacgaccaataggatggagctcgagggcgcgagttaccaggtgcccccgcagccgaacggcatgaccaacaacctccagggcagcaacacctatgccctggagaacactatgatcttcaacagccagccggcgaacccgggcaccaccgccacgtacctcgagggcaacatgctcatcaccagcgagagcgagacgcagccggtgaaccgcgtggcgtacaacgtcggcgggcagatggccaccaacaaccagagctccaccactgcccccgcgaccggcacgtacaacacccaggaaatcgtgcccggcagcgtgtggatggagagggacgtgtacctccaaggacccatctgggccaagatcccagagacgggggcgcactttcacccctctccggccatgggcggattcggactcaaacacccaccgcccatgatgctcatcaagaacacgcctgtgcccggaaatatcaccagcttctcggacgtgcccgtcagcagcttcatcacccagtacagcaccgggcaggtcaccgtggagatggagtgggagctcaagaaggaaaactccaagaggtggaacccagagatccagtacacaaacaactacaacgacccccagtttgtggactttgccccggacagcaccggggaatacagaaccaccagacctatcggaacccgataccttacccgacccctttaacccattcatgtcgcataccctcaataaa

SEQ ID NO: 1812 - protein, 724 aa, Artificial Sequence
  Description of Artificial Sequence: Synthetic polypeptide
MSFVDHPPDWLEEVGEGLREFLGLEAGPPKPKPNQQHQDQARGLVLPGYNYLGPGNGLDRGEPVNRADEVAREHDISYNEQLEAGDNPYLKYNHADAEFQEKLADDTSFGGNLGKAVFQAKKRVLEPFGLVEEGAKTAPTGKRIDDHFPKRKKARTEEDSKPSTSSDAEAGPSGSQQLQIPAQPASSLGADTMSAGGGGPLGDNNQGADGVGNASGDWHCDSTWMGDRVVTKSTRTWVLPSYNNHQYREIKSGSVDGSNANAYFGYSTPWGYFDFNRFHSHWSPRDWQRLINNYWGFRPRSLRVKIFNIQVKEVTVQDSTTTIANNLTSTVQVFTDDDYQLPYVVGNGTEGCLPAFPPQVFTLPQYGYATLNRDNTENPTERSSFFCLEYFPSKMLRTGNNFEFTYNFEEVPFHSSFAPSQNLFKLANPLVDQYLYRFVSTNNTGGVQFNKNLAGRYANTYKNWFPGPMGRTQGWNLGSGVNRASVSAFATTNRMELEGASYQVPPQPNGMTNNLQGSNTYALENTMIFNSQPANPGTTATYLEGNMLITSESETQPVNRVAYNVGGQMATNNQSSTTAPATGTYNTQEIVPGSVWMERDVYLQGPIWAKIPETGAHFHPSPAMGGFGLKHPPPMMLIKNTPVPGNITSFSDVPVSSFITQYSTGQVTVEMEWELKKENSKRWNPEIQYTNNYNDPQFVDFAPDSTGEYRTTRPIGTRYLTRPL

SEQ ID NO: 1813 - DNA, 2203 bp, Artificial Sequence
  Description of Artificial Sequence: Synthetic polynucleotide
atgtcttttgttgatcaccctccagattggttggaagaagttggtgaaggtcttcgcgagtttttgggccttgaagcgggcccaccgaaaccaaaacccaatcagcagcatcaagatcaagcccgtggtcttgtgctgcctggttataactatctcggacccggaaacggtctcgatcgaggagagcctgtcaacagggcagacgaggtcgcgcgagagcacgacatctcgtacaacgagcagcttgaggcgggagacaacccctacctcaagtacaaccacgcggacgccgagtttcaggagaagctcgccgacgacacatccttcgggggaaacctcggaaaggcagtctttcaggccaagaaaagggttctcgaaccttttggcctggttgaagagggtgctaagacggcccctaccggaaagcggatagacgaccactttccaaaaagaaagaaggctcggaccgaagaggactccaagccttccacctcgtcagacgccgaagctggacccagcggatcccagcagctgcaaatcccagcccaaccagcctcaagtttgggagctgatacaatgtctgcgggaggtggcggcccattgggcgacaataaccaaggtgccgatggagtgggcaatgcctcgggagattggcattgcgattccacgtggatgggggacagagtcgtcaccaagtccacccgaacctgggtgctgcccagctacaacaaccaccagtaccgagagatcaaaagcggctccgtcgacggaagcaacgccaacgcctactttggatacagcaccccctgggggtactttgactttaaccgcttccacagccactggagcccccgagactggcaaagactcatcaacaactactggggcttcagaccccggtccctcagagtcaaaatcttcaacattcaagtcaaagaggtcacggtgcaggactccaccaccaccatcgccaacaacctcacctccaccgtccaagtgtttacggacgacgactaccagctgccctacgtcgtcggcaacgggaccgagggatgcctgccggccttccctccgcaggtctttacgctgccgcagtacggttacgcgacgctgaaccgcgacaacacagaaaatcccaccgagaggagcagcttcttctgcctagagtactttcccagcaagatgctgagaacgggcaacaactttgagtttacctacaactttgaggaggtgcccttccactccagcttcgctcccagtcagaacctgttcaagctggccaacccgctggtggaccagtacttgtaccgcttcgtgagcacaaataacactggcggagtccagttcaacaagaacctggccgggagatacgccaacacctacaaaaactggttcccggggcccatgggccgaacccagggctggaacctgggctccggggtcaaccgcgccagtgtcagcgccttcgccacgaccaataggatggagctcgagggcgcgagttaccaggtgcccccgcagccgaacggcatgaccaacaacctccagggcagcaacacctatgccctggagaacactatgatcttcaacagccagccggcgaacccgggcaccaccgccacgtacctcgagggcaacatgctcatcaccagcgagagcgagacgcagccggtgaaccgcgtggcgtacaacgtcggcgggcagatggccaccaacaaccagagctccaccactgcccccgcgaccggcacggtcaacacccaggaaatcgtgcccggcagcgtgtggatggagagggacgtgtacctccaaggacccatctgggccaagatcccagagacgggggcgcactttcacccctctccggccatgggcggattcggactcaaacacccaccgcccatgatgctcatcaagaacacgcctgtgcccggaaatatcaccagcttctcggacgtgcccgtcagcagcttcatcacccagtacagcaccgggcaggtcaccgtggagatggagtgggagctcaagaaggaaaactccaagaggtggaacccagagatccagtacacaaacaactacaacgacccccagtttgtggactttgccccggacagcaccggggaatacagaaccaccagacctatcggaacccgataccttacccgacccctttaacccattcatgtcgcataccctcaataaa

SEQ ID NO: 1814 - protein, 724 aa, Artificial Sequence
  Description of Artificial Sequence: Synthetic polypeptide
MSFVDHPPDWLEEVGEGLREFLGLEAGPPKPKPNQQHQDQARGLVLPGYNYLGPGNGLDRGEPVNRADEVAREHDISYNEQLEAGDNPYLKYNHADAEFQEKLADDTSFGGNLGKAVFQAKKRVLEPFGLVEEGAKTAPTGKRIDDHFPKRKKARTEEDSKPSTSSDAEAGPSGSQQLQIPAQPASSLGADTMSAGGGGPLGDNNQGADGVGNASGDWHCDSTWMGDRVVTKSTRTWVLPSYNNHQYREIKSGSVDGSNANAYFGYSTPWGYFDFNRFHSHWSPRDWQRLINNYWGFRPRSLRVKIFNIQVKEVTVQDSTTTIANNLTSTVQVFTDDDYQLPYVVGNGTEGCLPAFPPQVFTLPQYGYATLNRDNTENPTERSSFFCLEYFPSKMLRTGNNFEFTYNFEEVPFHSSFAPSQNLFKLANPLVDQYLYRFVSTNNTGGVQFNKNLAGRYANTYKNWFPGPMGRTQGWNLGSGVNRASVSAFATTNRMELEGASYQVPPQPNGMTNNLQGSNTYALENTMIFNSQPANPGTTATYLEGNMLITSESETQPVNRVAYNVGGQMATNNQSSTTAPATGTVNTQEIVPGSVWMERDVYLQGPIWAKIPETGAHFHPSPAMGGFGLKHPPPMMLIKNTPVPGNITSFSDVPVSSFITQYSTGQVTVEMEWELKKENSKRWNPEIQYTNNYNDPQFVDFAPDSTGEYRTTRPIGTRYLTRPL

SEQ ID NO: 1815 - DNA, 2203 bp, Artificial Sequence
  Description of Artificial Sequence: Synthetic polynucleotide
atgtcttttgttgatcaccctccagattggttggaagaagttggtgaaggtcttcgcgagtttttgggccttgaagcgggcccaccgaaaccaaaacccaatcagcagcatcaagatcaagcccgtggtcttgtgctgcctggttataactatctcggacccggaaacggtctcgatcgaggagagcctgtcaacagggcagacgaggtcgcgcgagagcacgacatctcgtacaacgagcagcttgaggcgggagacaacccctacctcaagtacaaccacgcggacgccgagtttcaggagaagctcgccgacgacacatccttcgggggaaacctcggaaaggcagtctttcaggccaagaaaagggttctcgaaccttttggcctggttgaagagggtgctaagacggcccctaccggaaagcggatagacgaccactttccaaaaagaaagaaggctcggaccgaagaggactccaagccttccacctcgtcagacgccgaagctggacccagcggatcccagcagctgcaaatcccagcccaaccagcctcaagtttgggagctgatacaatgtctgcgggaggtggcggcccattgggcgacaataaccaaggtgccgatggagtgggcaatgcctcgggagattggcattgcgattccacgtggatgggggacagagtcgtcaccaagtccacccgaacctgggtgctgcccagctacaacaaccaccagtaccgagagatcaaaagcggctccgtcgacggaagcaacgccaacgcctactttggatacagcaccccctgggggtactttgactttaaccgcttccacagccactggagcccccgagactggcaaagactcatcaacaactactggggcttcagaccccggtccctcagagtcaaaatcttcaacattcaagtcaaagaggtcacggtgcaggactccaccaccaccatcgccaacaacctcacctccaccgtccaagtgtttacggacgacgactaccagctgccctacgtcgtcggcaacgggaccgagggatgcctgccggccttccctccgcaggtctttacgctgccgcagtacggttacgcgacgctgaaccgcgacaacacagaaaatcccaccgagaggagcagcttcttctgcctagagtactttcccagcaagatgctgagaacgggcaacaactttgagtttacctacaactttgaggaggtgcccttccactccagcttcgctcccagtcagaacctgttcaagctggccaacccgctggtggaccagtacttgtaccgcttcgtgagcacaaataacactggcggagtccagttcaacaagaacctggccgggagatacgccaacacctacaaaaactggttcccggggcccatgggccgaacccagggctggaacctgggctccggggtcaaccgcgccagtgtcagcgccttcgccacgaccaataggatggagctcgagggcgcgagttaccaggtgcccccgcagccgaacggcatgaccaacaacctccagggcagcaacacctatgccctggagaacactatgatcttcaacagccagccggcgaacccgggcaccaccgccacgtacctcgagggcaacatgctcatcaccagcgagagcgagacgcagccggtgaaccgcgtggcgtacaacgtcggcgggcagatggccaccaacaaccagagctccaccactgcccccgcgaccggcacgtacaacctccaggaaatcgtgcccggcagcgtgtggatggagagggacgtgtacctccaaggacccatctgggccaagatcccagagacgggggcgcactttcacccctctccggccatgggcggattcggactcaaacacccaccgcccatgatgctcatcaagaacacgcctgtgcccggaaatatcaccagcttctcggccgtgcccgtcagcagcttcatcacccagtacagcaccgggcaggtcaccgtggagatggagtgggagctcaagaaggaaaactccaagaggtggaacccagagatccagtacacaaacaactacaacgacccccagtttgtggactttgccccggacagcaccggggaatacagaaccaccagacctatcggaacccgataccttacccgacccctttaacccattcatgtcgcataccctcaataaa

SEQ ID NO: 1816 - protein, 724 aa, Artificial Sequence
  Description of Artificial Sequence: Synthetic polypeptide
MSFVDHPPDWLEEVGEGLREFLGLEAGPPKPKPNQQHQDQARGLVLPGYNYLGPGNGLDRGEPVNRADEVAREHDISYNEQLEAGDNPYLKYNHADAEFQEKLADDTSFGGNLGKAVFQAKKRVLEPFGLVEEGAKTAPTGKRIDDHFPKRKKARTEEDSKPSTSSDAEAGPSGSQQLQIPAQPASSLGADTMSAGGGGPLGDNNQGADGVGNASGDWHCDSTWMGDRVVTKSTRTWVLPSYNNHQYREIKSGSVDGSNANAYFGYSTPWGYFDFNRFHSHWSPRDWQRLINNYWGFRPRSLRVKIFNIQVKEVTVQDSTTTIANNLTSTVQVFTDDDYQLPYVVGNGTEGCLPAFPPQVFTLPQYGYATLNRDNTENPTERSSFFCLEYFPSKMLRTGNNFEFTYNFEEVPFHSSFAPSQNLFKLANPLVDQYLYRFVSTNNTGGVQFNKNLAGRYANTYKNWFPGPMGRTQGWNLGSGVNRASVSAFATTNRMELEGASYQVPPQPNGMTNNLQGSNTYALENTMIFNSQPANPGTTATYLEGNMLITSESETQPVNRVAYNVGGQMATNNQSSTTAPATGTYNLQEIVPGSVWMERDVYLQGPIWAKIPETGAHFHPSPAMGGFGLKHPPPMMLIKNTPVPGNITSFSAVPVSSFITQYSTGQVTVEMEWELKKENSKRWNPEIQYTNNYNDPQFVDFAPDSTGEYRTTRPIGTRYLTRPL

SEQ ID NO: 1817 - DNA, 2203 bp, Artificial Sequence
  Description of Artificial Sequence: Synthetic polynucleotide
atgtcttttgttgatcaccctccagattggttggaagaagttggtgaaggtcttcgcgagtttttgggccttgaagcgggcccaccgaaaccaaaacccaatcagcagcatcaagatcaagcccgtggtcttgtgctgcctggttataactatctcggacccggaaacggtctcgatcgaggagagcctgtcaacagggcagacgaggtcgcgcgagagcacgacatctcgtacaacgagcagcttgaggcgggagacaacccctacctcaagtacaaccacgcggacgccgagtttcaggagaagctcgccgacgacacatccttcgggggaaacctcggaaaggcagtctttcaggccaagaaaagggttctcgaaccttttggcctggttgaagagggtgctaagacggcccctaccggaaagcggatagacgaccactttccaaaaagaaagaaggctcggaccgaagaggactccaagccttccacctcgtcagacgccgaagctggacccagcggatcccagcagctgcaaatcccagcccaaccagcctcaagtttgggagctgatacaatgtctgcgggaggtggcggcccattgggcgacaataaccaaggtgccgatggagtgggcaatgcctcgggagattggcattgcgattccacgtggatgggggacagagtcgtcaccaagtccacccgaacctgggtgctgcccagctacaacaaccaccagtaccgagagatcaaaagcggctccgtcgacggaagcaacgccaacgcctactttggatacagcaccccctgggggtactttgactttaaccgcttccacagccactggagcccccgagactggcaaagactcatcaacaactactggggcttcagaccccggtccctcagagtcaaaatcttcaacattcaagtcaaagaggtcacggtgcaggactccaccaccaccatcgccaacaacctcacctccaccgtccaagtgtttatggacgacgactaccagctgccctacgtcgtcggcaacgggaccgagggatgcctgccggccttccctccgcaggtctttacgctgccgcagtacggttacgcgacgctgaaccgcgacaacacagaaaatcccaccgagaggagcagcttcttctgcctagagtactttcccagcaagatgctgagaacgggcaacaactttgagtttacctacaactttgaggaggtgcccttccactccagcttcgctcccagtcagaacctgttcaagctggccaacccgctggtggaccagtacttgtaccgcttcgtgagcacaaataacactggcggagtccagttcaacaagaacctggccgggagatacgccaacacctacaaaaactggttcccggggcccatgggccgaacccagggctggaacctgggctccggggtcaaccgcgccagtgtcagcgccttcgccacgaccaataggatggagctcgagggcgcgagttaccaggtgcccccgcagccgaacggcatgaccaacaacctccagggcagcaacacctatgccctggagaacactatgatcttcaacagccagccggcgaacccgggcaccaccgccacgtacctcgagggcaacatgctcatcaccagcgagagcgagacgcagccggtgaaccgcgtggcgtacaacgtcggcgggcagatggccaccaacaaccagagctccaccactgcccccgcgaccggcacgtacaacctccaggaaatcgtgcccggcagcgtgtggatggagagggacgtgtacctccaaggacccatctgggccaagatcccagagacgggggcgcactttcacccctctccggccatgggcggattcggactcaaacacccaccgcccatgatgctcatcaagaacacgcctgtgcccggaaatatcaccagcttctcggacgtgcccgtcagcagcttcatcacccagtacagcaccgggcaggtcaccgtggagatggagtgggagctcaagaaggaaaactccaagaggtggaacccagagatccagtacacaaacaactacaacgacccccagtttgtggactttgccccggacagcaccggggaatacagaaccaccagacctatcggaacccgataccttacccgacccctttaacccattcatgtcgcataccctcaataaa

SEQ ID NO: 1818 - protein, 724 aa, Artificial Sequence
  Description of Artificial Sequence: Synthetic polypeptide
MSFVDHPPDWLEEVGEGLREFLGLEAGPPKPKPNQQHQDQARGLVLPGYNYLGPGNGLDRGEPVNRADEVAREHDISYNEQLEAGDNPYLKYNHADAEFQEKLADDTSFGGNLGKAVFQAKKRVLEPFGLVEEGAKTAPTGKRIDDHFPKRKKARTEEDSKPSTSSDAEAGPSGSQQLQIPAQPASSLGADTMSAGGGGPLGDNNQGADGVGNASGDWHCDSTWMGDRVVTKSTRTWVLPSYNNHQYREIKSGSVDGSNANAYFGYSTPWGYFDFNRFHSHWSPRDWQRLINNYWGFRPRSLRVKIFNIQVKEVTVQDSTTTIANNLTSTVQVFMDDDYQLPYVVGNGTEGCLPAFPPQVFTLPQYGYATLNRDNTENPTERSSFFCLEYFPSKMLRTGNNFEFTYNFEEVPFHSSFAPSQNLFKLANPLVDQYLYRFVSTNNTGGVQFNKNLAGRYANTYKNWFPGPMGRTQGWNLGSGVNRASVSAFATTNRMELEGASYQVPPQPNGMTNNLQGSNTYALENTMIFNSQPANPGTTATYLEGNMLITSESETQPVNRVAYNVGGQMATNNQSSTTAPATGTYNLQEIVPGSVWMERDVYLQGPIWAKIPETGAHFHPSPAMGGFGLKHPPPMMLIKNTPVPGNITSFSDVPVSSFITQYSTGQVTVEMEWELKKENSKRWNPEIQYTNNYNDPQFVDFAPDSTGEYRTTRPIGTRYLTRPL

SEQ ID NO: 1819 - DNA, 2203 bp, Artificial Sequence
  Description of Artificial Sequence: Synthetic polynucleotide
atgtcttttgttgatcaccctccagattggttggaagaagttggtgaaggtcttcgcgagtttttgggccttgaagcgggcccaccgaaaccaaaacccaatcagcagcatcaagatcaagcccgtggtcttgtgctgcctggttataactatctcggacccggaaacggtctcgatcgaggagagcctgtcaacagggcagacgaggtcgcgcgagagcacgacatctcgtacaacgagcagcttgaggcgggagacaacccctacctcaagtacaaccacgcggacgccgagtttcaggagaagctcgccgacgacacatccttcgggggaaacctcggaaaggcagtctttcaggccaagaaaagggttctcgaaccttttggcctggttgaagagggtgctaagacggcccctaccggaaagcggatagacgaccactttccaaaaagaaagaaggctcggaccgaagaggactccaagccttccacctcgtcagacgccgaagctggacccagcggatcccagcagctgcaaatcccagcccaaccagcctcaagtttgggagctgatacaatgtctgcgggaggtggcggcccattgggcgacaataaccaaggtgccgatggagtgggcaatgcctcgggagattggcattgcgattccacgtggatgggggacagagtcgtcaccaagtccacccgaacctgggtgctgcccagctacaacaaccaccagtaccgagagatcaaaagcggctccgtcgacggaagcaacgccaacgcctactttggatacagcaccccctgggggtactttgactttaaccgcttccacagccactggagcccccgagactggcaaagactcatcaacaactactggggcttcagaccccggtccctcagagtcaaaatcttcaacattcaagtcaaagaggtcacggtgcaggactccaccaccaccatcgccaacaacctcacctccaccgtcgatgtgtttacggacgacgactaccagctgccctacgtcgtcggcaacgggaccgagggatgcctgccggccttccctccgcaggtctttacgctgccgcagtacggttacgcgacgctgaaccgcgacaacacagaaaatcccaccgagaggagcagcttcttctgcctagagtactttcccagcaagatgctgagaacgggcaacaactttgagtttacctacaactttgaggaggtgcccttccactccagcttcgctcccagtcagaacctgttcaagctggccaacccgctggtggaccagtacttgtaccgcttcgtgagcacaaataacactggcggagtccagttcaacaagaacctggccgggagatacgccaacacctacaaaaactggttcccggggcccatgggccgaacccagggctggaacctgggctccggggtcaaccgcgccagtgtcagcgccttcgccacgaccaataggatggagctcgagggcgcgagttaccaggtgcccccgcagccgaacggcatgaccaacaacctccagggcagcaacacctatgccctggagaacactatgatcttcaacagccagccggcgaacccgggcaccaccgccacgtacctcgagggcaacatgctcatcaccagcgagagcgagacgcagccggtgaaccgcgtggcgtacaacgtcggcgggcagatggccaccaacaaccagagctccaccactgcccccgcgaccggcacgtacaacctccaggaaatcgtgcccggcagcgtgtggatggagagggacgtgtacctccaaggacccatctgggccaagatcccagagacgggggcgcactttcacccctctccggccatgggcggattcggactcaaacacccaccgcccatgatgctcatcaagaacacgcctgtgcccggaaatatcaccagcttctcggacgtgcccgtcagcagcttcatcacccagtacagcaccgggcaggtcaccgtggagatggagtgggagctcaagaaggaaaactccaagaggtggaacccagagatccagtacacaaacaactacaacgacccccagtttgtggactttgccccggacagcaccggggaatacagaaccaccagacctatcggaacccgataccttacccgacccctttaacccattcatgtcgcataccctcaataaa

SEQ ID NO: 1820 - protein, 724 aa, Artificial Sequence
  Description of Artificial Sequence: Synthetic polypeptide
MSFVDHPPDWLEEVGEGLREFLGLEAGPPKPKPNQQHQDQARGLVLPGYNYLGPGNGLDRGEPVNRADEVAREHDISYNEQLEAGDNPYLKYNHADAEFQEKLADDTSFGGNLGKAVFQAKKRVLEPFGLVEEGAKTAPTGKRIDDHFPKRKKARTEEDSKPSTSSDAEAGPSGSQQLQIPAQPASSLGADTMSAGGGGPLGDNNQGADGVGNASGDWHCDSTWMGDRVVTKSTRTWVLPSYNNHQYREIKSGSVDGSNANAYFGYSTPWGYFDFNRFHSHWSPRDWQRLINNYWGFRPRSLRVKIFNIQVKEVTVQDSTTTIANNLTSTVDVFTDDDYQLPYVVGNGTEGCLPAFPPQVFTLPQYGYATLNRDNTENPTERSSFFCLEYFPSKMLRTGNNFEFTYNFEEVPFHSSFAPSQNLFKLANPLVDQYLYRFVSTNNTGGVQFNKNLAGRYANTYKNWFPGPMGRTQGWNLGSGVNRASVSAFATTNRMELEGASYQVPPQPNGMTNNLQGSNTYALENTMIFNSQPANPGTTATYLEGNMLITSESETQPVNRVAYNVGGQMATNNQSSTTAPATGTYNLQEIVPGSVWMERDVYLQGPIWAKIPETGAHFHPSPAMGGFGLKHPPPMMLIKNTPVPGNITSFSDVPVSSFITQYSTGQVTVEMEWELKKENSKRWNPEIQYTNNYNDPQFVDFAPDSTGEYRTTRPIGTRYLTRPL

SEQ ID NO: 1821 - DNA, 2203 bp, Artificial Sequence
  Description of Artificial Sequence: Synthetic polynucleotide
atgtcttttgttgatcaccctccagattggttggaagaagttggtgaaggtcttcgcgagtttttgggccttgaagcgggcccaccgaaaccaaaacccaatcagcagcatcaagatcaagcccgtggtcttgtgctgcctggttataactatctcggacccggaaacggtctcgatcgaggagagcctgtcaacagggcagacgaggtcgcgcgagagcacgacatctcgtacaacgagcagcttgaggcgggagacaacccctacctcaagtacaaccacgcggacgccgagtttcaggagaagctcgccgacgacacatccttcgggggaaacctcggaaaggcagtctttcaggccaagaaaagggttctcgaaccttttggcctggttgaagagggtgctaagacggcccctaccggaaagcggatagacgaccactttccaaaaagaaagaaggctcggaccgaagaggactccaagccttccacctcgtcagacgccgaagctggacccagcggatcccagcagctgcaaatcccagcccaaccagcctcaagtttgggagctgatacaatgtctgcgggaggtggcggcccattgggcgacaataaccaaggtgccgatggagtgggcaatgcctcgggagattggcattgcgattccacgtggatgggggacagagtcgtcaccaagtccacccgaacctgggtgctgcccagctacaacaaccaccagtaccgagagatcaaaagcggctccgtcgacggaagcaacgccaacgcctactttggatacagcaccccctgggggtactttgactttaaccgcttccacagccactggagcccccgagactggcaaagactcatcaacaactactggggcttcagaccccggtccctcagagtcaaaatcttcaacattcaagtcaaagaggtcacggtgcaggactccaccaccaccatcgccaacaacctcacctccaccgtccaagtgtttacggacgacgactaccagctgccctacgtcgtcggcaacgggacccagggatgcctgccggccttccctccgcaggtctttacgctgccgcagtacggttacgcgacgctgaaccgcgacaacacagaaaatcccaccgagaggagcagcttcttctgcctagagtactttcccagcaagatgctgagaacgggcaacaactttgagtttacctacaactttgaggaggtgcccttccactccagcttcgctcccagtcagaacctgttcaagctggccaacccgctggtggaccagtacttgtaccgcttcgtgagcacaaataacactggcggagtccagttcaacaagaacctggccgggagatacgccaacacctacaaaaactggttcccggggcccatgggccgaacccagggctggaacctgggctccggggtcaaccgcgccagtgtcagcgccttcgccacgaccaataggatggagctcgagggcgcgagttaccaggtgcccccgcagccgaacggcatgaccaacaacctccagggcagcaacacctatgccctggagaacactatgatcttcaacagccagccggcgaacccgggcaccaccgccacgtacctcgagggcaacatgctcatcaccagcgagagcgagacgcagccggtgaaccgcgtggcgtacaacgtcggcgggcagatggccaccaacaaccagagctccaccactgcccccgcgaccggcacgtacaacctccaggaaatcgtgcccggcagcgtgtggatggagagggacgtgtacctccaaggacccatctgggccaagatcccagagacgggggcgcactttcacccctctccggccatgggcggattcggactcaaacacccaccgcccatgatgctcatcaagaacacgcctgtgcccggaaatatcaccagcttctcggacgtgcccgtcagcagcttcatcacccagtacagcaccgggcaggtcaccgtggagatggagtgggagctcaagaaggaaaactccaagaggtggaacccagagatccagtacacaaacaactacaacgacccccagtttgtggactttgccccggacagcaccggggaatacagaaccaccagacctatcggaacccgataccttacccgacccctttaacccattcatgtcgcataccctcaataaa

SEQ ID NO: 1822 - protein, 724 aa, Artificial Sequence
  Description of Artificial Sequence: Synthetic polypeptide
MSFVDHPPDWLEEVGEGLREFLGLEAGPPKPKPNQQHQDQARGLVLPGYNYLGPGNGLDRGEPVNRADEVAREHDISYNEQLEAGDNPYLKYNHADAEFQEKLADDTSFGGNLGKAVFQAKKRVLEPFGLVEEGAKTAPTGKRIDDHFPKRKKARTEEDSKPSTSSDAEAGPSGSQQLQIPAQPASSLGADTMSAGGGGPLGDNNQGADGVGNASGDWHCDSTWMGDRVVTKSTRTWVLPSYNNHQYREIKSGSVDGSNANAYFGYSTPWGYFDFNRFHSHWSPRDWQRLINNYWGFRPRSLRVKIFNIQVKEVTVQDSTTTIANNLTSTVQVFTDDDYQLPYVVGNGTQGCLPAFPPQVFTLPQYGYATLNRDNTENPTERSSFFCLEYFPSKMLRTGNNFEFTYNFEEVPFHSSFAPSQNLFKLANPLVDQYLYRFVSTNNTGGVQFNKNLAGRYANTYKNWFPGPMGRTQGWNLGSGVNRASVSAFATTNRMELEGASYQVPPQPNGMTNNLQGSNTYALENTMIFNSQPANPGTTATYLEGNMLITSESETQPVNRVAYNVGGQMATNNQSSTTAPATGTYNLQEIVPGSVWMERDVYLQGPIWAKIPETGAHFHPSPAMGGFGLKHPPPMMLIKNTPVPGNITSFSDVPVSSFITQYSTGQVTVEMEWELKKENSKRWNPEIQYTNNYNDPQFVDFAPDSTGEYRTTRPIGTRYLTRPL

SEQ ID NO: 1823 - DNA, 2203 bp, Artificial Sequence
  Description of Artificial Sequence: Synthetic polynucleotide
atgtcttttgttgatcaccctccagattggttggaagaagttggtgaaggtcttcgcgagtttttgggccttgaagcgggcccaccgaaaccaaaacccaatcagcagcatcaagatcaagcccgtggtcttgtgctgcctggttataactatctcggacccggaaacggtctcgatcgaggagagcctgtcaacagggcagacgaggtcgcgcgagagcacgacatctcgtacaacgagcagcttgaggcgggagacaacccctacctcaagtacaaccacgcggacgccgagtttcaggagaagctcgccgacgacacatccttcgggggaaacctcggaaaggcagtctttcaggccaagaaaagggttctcgaaccttttggcctggttgaagagggtgctaagacggcccctaccggaaagcggatagacgaccactttccaaaaagaaagaaggctcggaccgaagaggactccaagccttccacctcgtcagacgccgaagctggacccagcggatcccagcagctgcaaatcccagcccaaccagcctcaagtttgggagctgatacaatgtctgcgggaggtggcggcccattgggcgacaataaccaaggtgccgatggagtgggcaatgcctcgggagattggcattgcgattccacgtggatgggggacagagtcgtcaccaagtccacccgaacctgggtgctgcccagctacaacaaccaccagtaccgagagatcaaaagcggctccgtcgacggaagcaacgccaacgcctactttggatacagcaccccctgggggtactttgactttaaccgcttccacagccactggagcccccgagactggcaaagactcatcaacaactactggggcttcagaccccggtccctcagagtcaaaatcttcaacattcaagtcaaagaggtcacggtgcaggactccaccaccaccatcgccaacaacctcacctccaccgtccaagtgtttacggacgacgactaccagctgccctacgtcgtcggcaacgggaccgagggatgcctgccggccttccctccgcaggtctttacgctgccgcagtacggttacgcgacgctgaaccgcgacaacacagaaaatcccaccgagaggagcagcttcttctgcctagagtactttcccagcaagatgctgagaacgggcaacaactttgagtttacctacaactttgaggaggtgcccttccactccagcttcgctcccagtcagaacctgttcaagctggccaacccgctggtggaccagtacttgtaccgcttcgtgagcacaaataacactggcggagtccagttcaacaagaacctggccgggagatacgccaacacctacaaaaactggttcccggggcccatgggccgaacccagggctggaacctgggctccggggtcaaccgcgccagtgtcagcgccttcgccacgaccaataggatggagctcgagggcgcgagttaccaggtgcccccgcagccgaacggcatgaccaacaacctccagggcagcaacacctatgccctggagaacactatgatcttcaacagccagtcggcgaacccgggcaccaccgccacgtacctcgagggcaacatgctcatcaccagcgagagcgagacgcagccggtgaaccgcgtggcgtacaacgtcggcgggcagatggccaccaacaaccagagctccaccactgcccccgcgaccggcacgtacaacctccaggaaatcgtgcccggcagcgtgtggatggagagggacgtgtacctccaaggacccatctgggccaagatcccagagacgggggcgcactttcacccctctccggccatgggcggattcggactcaaacacccaccgcccatgatgctcatcaagaacacgcctgtgcccggaaatatcaccagcttctcggacgtgcccgtcagcagcttcatcacccagtacagcaccgggcaggtcaccgtggagatggagtgggagctcaagaaggaaaactccaagaggtggaacccagagatccagtacacaaacaactacaacgacccccagtttgtggactttgccccggacagcaccggggaatacagaaccaccagacctatcggaacccgataccttacccgacccctttaacccattcatgtcgcataccctcaataaa

SEQ ID NO: 1824 - protein, 724 aa, Artificial Sequence
  Description of Artificial Sequence: Synthetic polypeptide
MSFVDHPPDWLEEVGEGLREFLGLEAGPPKPKPNQQHQDQARGLVLPGYNYLGPGNGLDRGEPVNRADEVAREHDISYNEQLEAGDNPYLKYNHADAEFQEKLADDTSFGGNLGKAVFQAKKRVLEPFGLVEEGAKTAPTGKRIDDHFPKRKKARTEEDSKPSTSSDAEAGPSGSQQLQIPAQPASSLGADTMSAGGGGPLGDNNQGADGVGNASGDWHCDSTWMGDRVVTKSTRTWVLPSYNNHQYREIKSGSVDGSNANAYFGYSTPWGYFDFNRFHSHWSPRDWQRLINNYWGFRPRSLRVKIFNIQVKEVTVQDSTTTIANNLTSTVQVFTDDDYQLPYVVGNGTEGCLPAFPPQVFTLPQYGYATLNRDNTENPTERSSFFCLEYFPSKMLRTGNNFEFTYNFEEVPFHSSFAPSQNLFKLANPLVDQYLYRFVSTNNTGGVQFNKNLAGRYANTYKNWFPGPMGRTQGWNLGSGVNRASVSAFATTNRMELEGASYQVPPQPNGMTNNLQGSNTYALENTMIFNSQSANPGTTATYLEGNMLITSESETQPVNRVAYNVGGQMATNNQSSTTAPATGTYNLQEIVPGSVWMERDVYLQGPIWAKIPETGAHFHPSPAMGGFGLKHPPPMMLIKNTPVPGNITSFSDVPVSSFITQYSTGQVTVEMEWELKKENSKRWNPEIQYTNNYNDPQFVDFAPDSTGEYRTTRPIGTRYLTRPL

SEQ ID NO: 1825 - DNA, 2203 bp, Artificial Sequence
  Description of Artificial Sequence: Synthetic polynucleotide
atgtcttttgttgatcaccctccagattggttggaagaagttggtgaaggtcttcgcgagtttttgggccttgaagcgggcccaccgaaaccaaaacccaatcagcagcatcaagatcaagcccgtggtcttgtgctgcctggttataactatctcggacccggaaacggtctcgatcgaggagagcctgtcaacagggcagacgaggtcgcgcgagagcacgacatctcgtacaacgagcagcttgaggcgggagacaacccctacctcaagtacaaccacgcggacgccgagtttcaggagaagctcgccgacgacacatccttcgggggaaacctcggaaaggcagtctttcaggccaagaaaagggttctcgaaccttttggcctggttgaagagggtgctaagacggcccctaccggaaagcggatagacgaccactttccaaaaagaaagaaggctcggaccgaagaggactccaagccttccacctcgtcagacgccgaagctggacccagcggatcccagcagctgcaaatcccagcccaaccagcctcaagtttgggagctgatacaatgtctgcgggaggtggcggcccattgggcgacaataaccaaggtgccgatggagtgggcaatgcctcgggagattggcattgcgattccacgtggatgggggacagagtcgtcaccaagtccacccgaacctgggtgctgcccagctacaacaaccaccagtaccgagagatcaaaagcggctccgtcgacggaagcaacgccaacgcctactttggatacagcaccccctgggggtactttgactttaaccgcttccacagccactggagcccccgagactggcaaagactcatcaacaactactggggcttcagaccccggtccctcagagtcaaaatcttcaacattcaagtcaaagaggtcacggtgcaggactccaccaccaccatcgccaacaacctcacctccaccgtccaagtgtttacggacgacgactaccagctgccctacgtcgtcggcaacgggaccgagggatgcctgccggccttccctccgcaggtctttacgctgccgcagtacggttacgcgacgctgaaccgcgacaacacagaaaatcccaccgagaggagcagcttcttctgcctagagtactttcccagcaagatgctgagaacgggcaacaactttgagtttacctacaactttgaggaggtgcccttccactccagcttcgctcccagtcagaacctgttcaagctggccaacccgctggtggaccagtacttgtaccgcttcgtgagcacaaataacactggcggagtccagttcaacaagaacctggccgggagatacgccaacacctacaaaaactggttcccggggcccatgggccgaacccagggctggaacctgggctccggggtcaaccgcgccagtgtcagcgccttcgccacgaccaataggatggagctcgagggcgcgagttaccaggtgcccccgcagccgaacggcatgaccaacaacctccagggcagcaacacctatgccctggagaacactatgatcttcaacagccagggggcgaacccgggcaccaccgccacgtacctcgagggcaacatgctcatcaccagcgagagcgagacgcagccggtgaaccgcgtggcgtacaacgtcggcgggcagatggccaccaacaaccagagctccaccactgcccccgcgaccggcacgtacaacctccaggaaatcgtgcccggcagcgtgtggatggagagggacgtgtacctccaaggacccatctgggccaagatcccagagacgggggcgcactttcacccctctccggccatgggcggattcggactcaaacacccaccgcccatgatgctcatcaagaacacgcctgtgcccggaaatatcaccagcttctcggacgtgcccgtcagcagcttcatcacccagtacagcaccgggcaggtcaccgtggagatggagtgggagctcaagaaggaaaactccaagaggtggaacccagagatccagtacacaaacaactacaacgacccccagtttgtggactttgccccggacagcaccggggaatacagaaccaccagacctatcggaacccgataccttacccgacccctttaacccattcatgtcgcataccctcaataaa

SEQ ID NO: 1826 - protein, 724 aa, Artificial Sequence
  Description of Artificial Sequence: Synthetic polypeptide
MSFVDHPPDWLEEVGEGLREFLGLEAGPPKPKPNQQHQDQARGLVLPGYNYLGPGNGLDRGEPVNRADEVAREHDISYNEQLEAGDNPYLKYNHADAEFQEKLADDTSFGGNLGKAVFQAKKRVLEPFGLVEEGAKTAPTGKRIDDHFPKRKKARTEEDSKPSTSSDAEAGPSGSQQLQIPAQPASSLGADTMSAGGGGPLGDNNQGADGVGNASGDWHCDSTWMGDRVVTKSTRTWVLPSYNNHQYREIKSGSVDGSNANAYFGYSTPWGYFDFNRFHSHWSPRDWQRLINNYWGFRPRSLRVKIFNIQVKEVTVQDSTTTIANNLTSTVQVFTDDDYQLPYVVGNGTEGCLPAFPPQVFTLPQYGYATLNRDNTENPTERSSFFCLEYFPSKMLRTGNNFEFTYNFEEVPFHSSFAPSQNLFKLANPLVDQYLYRFVSTNNTGGVQFNKNLAGRYANTYKNWFPGPMGRTQGWNLGSGVNRASVSAFATTNRMELEGASYQVPPQPNGMTNNLQGSNTYALENTMIFNSQGANPGTTATYLEGNMLITSESETQPVNRVAYNVGGQMATNNQSSTTAPATGTYNLQEIVPGSVWMERDVYLQGPIWAKIPETGAHFHPSPAMGGFGLKHPPPMMLIKNTPVPGNITSFSDVPVSSFITQYSTGQVTVEMEWELKKENSKRWNPEIQYTNNYNDPQFVDFAPDSTGEYRTTRPIGTRYLTRPL

SEQ ID NO: 1827 - DNA, 2194 bp, Artificial Sequence
  Description of Artificial Sequence: Synthetic polynucleotide
atgtcttttgttgatcaccctccagattggttggaagaagttggtgaaggtcttcgcgagtttttgggccttgaagcgggcccaccgaaaccaaaacccaatcagcagcatcaagatcaagcccgtggtcttgtgctgcctggttataactatctcggacccggaaacggtctcgatcgaggagagcctgtcaacagggcagacgaggtcgcgcgagagcacgacatctcgtacaacgagcagcttgaggcgggagacaacccctacctcaagtacaaccacgcggacgccgagtttcaggagaagctcgccgacgacacatccttcgggggaaacctcggaaaggcagtctttcaggccaagaaaagggttctcgaaccttttggcctggttgaagagggtgctaagacggcccctaccggaaagcggatagacgaccactttccaaaaagaaagaaggctcggaccgaagaggactccaagccttccacctcgtcagacgccgaagctggacccagcggatcccagcagctgcaaatcccagcccaaccagcctcaagtttgggagctgatacaatgtctgcgggaggtggcggcccattgggcgacaataaccaaggtgccgatggagtgggcaatgcctcgggagattggcattgcgattccacgtggatgggggacagagtcgtcaccaagtccacccgaacctgggtgctgcccagctacaacaaccaccagtaccgagagatcaaaagcggctccgtcgacggaagcaacgccaacgcctactttggatacagcaccccctgggggtactttgactttaaccgcttccacagccactggagcccccgagactggcaaagactcatcaacaactactggggcttcagaccccggtccctcagagtcaaaatcttcaacattcaagtcaaagaggtcacggtgcaggactccaccaccaccatcgccaacaacctcacctccaccgtccaagtgtttacggacgacgactaccagctgccctacgtcgtcggcaacgggaccgagggatgcctgccggccttccctccgcaggtctttacgctgccgcagtacggttacgcgacgctgaaccgcgacaacacagaaaatcccaccgagaggagcagcttcttctgcctagagtactttcccagcaagatgctgagaacgggcaacaactttgagtttacctacaactttgaggaggtgcccttccactccagcttcgctcccagtcagaacctgttcaagctggccaacccgctggtggaccagtacttgtaccgcttcgtgagcacaaataacactggcggagtccagttcaacaagaacctggccgggagatacgccaacacctacaaaaactggttcccggggcccatgggccgaacccagggctggaacctgggctccggggtcaaccgcgccagtgtcagcgccttcgccacgaccaataggatggagctcgagggcgcgagttaccaggtgcccccgcagccgaacggcatgaccaacaacctccagggcagcaacacctatgccctggagaacactatgatcttcgggaagcaaggctcagagaaaacaaatgtggacattgaaaaggtcatgatcaccagcgagagcgagacgcagccggtgaaccgcgtggcgtacaacgtcggcgggcagatggccaccaacaaccagagctccaccactgcccccgcgaccggcacgtacaacctccaggaaatcgtgcccggcagcgtgtggatggagagggacgtgtacctccaaggacccatctgggccaagatcccagagacgggggcgcactttcacccctctccggccatgggcggattcggactcaaacacccaccgcccatgatgctcatcaagaacacgcctgtgcccggaaatatcaccagcttctcggacgtgcccgtcagcagcttcatcacccagtacagcaccgggcaggtcaccgtggagatggagtgggagctcaagaaggaaaactccaagaggtggaacccagagatccagtacacaaacaactacaacgacccccagtttgtggactttgccccggacagcaccggggaatacagaaccaccagacctatcggaacccgataccttacccgacccctttaacccattcatgtcgcataccctcaataaa

SEQ ID NO: 1828 - protein, 721 aa, Artificial Sequence
  Description of Artificial Sequence: Synthetic polypeptide
MSFVDHPPDWLEEVGEGLREFLGLEAGPPKPKPNQQHQDQARGLVLPGYNYLGPGNGLDRGEPVNRADEVAREHDISYNEQLEAGDNPYLKYNHADAEFQEKLADDTSFGGNLGKAVFQAKKRVLEPFGLVEEGAKTAPTGKRIDDHFPKRKKARTEEDSKPSTSSDAEAGPSGSQQLQIPAQPASSLGADTMSAGGGGPLGDNNQGADGVGNASGDWHCDSTWMGDRVVTKSTRTWVLPSYNNHQYREIKSGSVDGSNANAYFGYSTPWGYFDFNRFHSHWSPRDWQRLINNYWGFRPRSLRVKIFNIQVKEVTVQDSTTTIANNLTSTVQVFTDDDYQLPYVVGNGTEGCLPAFPPQVFTLPQYGYATLNRDNTENPTERSSFFCLEYFPSKMLRTGNNFEFTYNFEEVPFHSSFAPSQNLFKLANPLVDQYLYRFVSTNNTGGVQFNKNLAGRYANTYKNWFPGPMGRTQGWNLGSGVNRASVSAFATTNRMELEGASYQVPPQPNGMTNNLQGSNTYALENTMIFGKQGSEKTNVDIEKVMITSESETQPVNRVAYNVGGQMATNNQSSTTAPATGTYNLQEIVPGSVWMERDVYLQGPIWAKIPETGAHFHPSPAMGGFGLKHPPPMMLIKNTPVPGNITSFSDVPVSSFITQYSTGQVTVEMEWELKKENSKRWNPEIQYTNNYNDPQFVDFAPDSTGEYRTTRPIGTRYLTRPL

SEQ ID NO: 1829 - protein, 519 aa, Artificial Sequence
  Description of Artificial Sequence: Synthetic polypeptide
DGVGSSSGNWHCDSTWLGDRVITTSTRTWALPTYNNHLYKQISNGTSGGATNDNTYFGYSTPWGYFDFNRFHCHFSPRDWQRLINNNWGFRPKRLSFKLFNIQVKEVTQNEGTKTIANNLTSTIQVFTDSEYQLPYVLGSAHQGCLPPFPADVFMIPQYGYLTLNNGSQAVGRSSFYCLEYFPSQMLRTGNNFQFTYTFEDVPFHSSYAHSQSLDRLMNPLIDQYLYYLSRTQTTGGTANTQTLGFSQGGPNTMANQAKNWLPGPCYRQQRVSTTTGQNNNSNFAWTAGTKYHLNGRNSLANPGIAMATHKDDEERFFPSNGILIFGKQNAARDNADYSDVMLTSEEEIKTTNPVATEEYGIVADNLQQQNTAPQIGTVNSQGALPGMVWQNRDVYLQGPIWAKIPHTDGNFHPSPLMGGFGLKHPPPQILIKNTPVPADPPTTFNQSKLNSFITQYSTGQVSVEIEWELQKENSKRWNPEIQYTSNYYKSTSVDFAVNTEGVYSEPRPIGTRYLTRNL

SEQ ID NO: 1830 - protein, 738 aa, Artificial Sequence
  Description of Artificial Sequence: Synthetic polypeptide
MAADGYLPDWLEDNLSEGIREWWALQPGAPKPKANQQHQDNARGLVLPGYKYLGPGNGLDKGEPVNAADAAALEHDKAYDQQLKAGDNPYLKYNHADAEFQERLKEDTSFGGNLGRAVFQAKKRLLEPLGLVEEAAKTAPGKKRPVEPSPQRSPDSSTGIGKKGQQPARKRLNFGQTGDSESVPDPQPLGEPPAAPSGVGPNTMAAGGGAPMADNNEGADGVGSSSGNWHCDSTWLGDRVITTSTRTWALPTYNNHLYKQISNGTSGGATNDNTYFGYSTPWGYFDFNRFHCHFSPRDWQRLINNNWGFRPKRLSFKLFNIQVKEVTQNEGTKTIANNLTSTIQVFTDSEYQLPYVLGSAHQGCLPPFPADVFMIPQYGYLTLNNGSQAVGRSSFYCLEYFPSQMLRTGNNFQFTYTFEDVPFHSSYAHSQSLDRLMNPLIDQYLYYLSRTQTTGGTANTQTLGFSQGGPNTMANQAKNWLPGPCYRQQRVSTTTGQNNNSNFAWTAGTKYHLNGRNSLANPGIAMATHKDDEERFFPSNGILIFGKQNAARDNADYSDVMLTSEEEIKTTNPVATEEYGIVADNLQQQNTAPQIGTVNSQGALPGMVWQNRDVYLQGPIWAKIPHTDGNFHPSPLMGGFGLKHPPPQILIKNTPVPADPPTTFNQSKLNSFITQYSTGQVSVEIEWELQKENSKRWNPEIQYTSNYYKSTSVDFAVNTEGVYSEPRPIGTRYLTRNL

SEQ ID NO: 1831 - protein, 725 aa, Artificial Sequence
  Description of Artificial Sequence: Synthetic polypeptide
MAADGYLPDWLEDNLSEGIREWWALQPGAPKPKANQQHQDNARGLVLPGYKYLGPGNGLDKGEPVNAADAAALEHDKAYDQQLKAGDNPYLKYNHADAEFQERLKEDTSFGGNLGRAVFQAKKRLLEPLGLVEEAAKTAPTGKRIDDHFPKRKKARTEEDSKPSTSSDAEAGPSGSQQLQIPAQPASSLGADTMSAGGGGPLGDNNQGADGVGNASGDWHCDSTWMGDRVVTKSTRTWVLPSYNNHQYREIKSGSVDGSNANAYFGYSTPWGYFDFNRFHSHWSPRDWQRLINNYWGFRPRSLRVKIFNIQVKEVTVQDSTTTIANNLTSTVQVFTDDDYQLPYVVGNGTEGCLPAFPPQVFTLPQYGYATLNRDNTENPTERSSFFCLEYFPSKMLRTGNNFEFTYNFEEVPFHSSFAPSQNLFKLANPLVDQYLYRFVSTNNTGGVQFNKNLAGRYANTYKNWFPGPMGRTQGWNLGSGVNRASVSAFATTNRMELEGASYQVPPQPNGMTNNLQGSNTYALENTMIFNSQPANPGTTATYLEGNMLITSESETQPVNRVAYNVGGQMATNNQSSTTAPATGTYNLQEIVPGSVWMERDVYLQGPIWAKIPETGAHFHPSPAMGGFGLKHPPPMMLIKNTPVPGNITSFSDVPVSSFITQYSTGQVTVEMEWELKKENSKRWNPEIQYTNNYNDPQFVDFAPDSTGEYRTTRPIGTRYLTRPL

SEQ ID NO: 1832 - protein, 736 aa, Artificial Sequence
  Description of Artificial Sequence: Synthetic polypeptide
MAADGYLPDWLEDNLSEGIREWWALKPGAPKPKANQQKQDDGRGLVLPGYKYLGPFNGLDKGEPVNAADAAALEHDKAYDQQLQAGDNPYLRYNHADAEFQERLQEDTSFGGNLGRAVFQAKKRVLEPLGLVEEGAKTAPGKKRPVDQSPQEPDSSSGVGKSGKQPARKRLNFGQTGDSESVPDPQPLGEPPAAPTSLGSNTMASGGGAPMADNNEGADGVGNSSGNWHCDSQWLGDRVITTSTRTWALPTYNNHLYKQISSQSGASNDNHYFGYSTPWGYFDFNRFHCHFSPRDWQRLINNNWGFRPKKLSFKLFNIQVKEVTQNDGTTTIANNLTSTVQVFTDSEYQLPYVLGSAHQGCLPPFPADVFMVPQYGYLTLNNGSQAVGRSSFYCLEYFPSQMLRTGNNFQFSYTFEDVPFHSSYAHSQSLDRLMNPLIDQYLYYLNRTQGTTSGTTNQSRLLFSQAGPQSMSLQARNWLPGPCYRQQRLSKTANDNNNSNFPWTAASKYHLNGRDSLVNPGPAMASHKDDEEKFFPMHGNLIFGKEGTTASNAELDNVMITDEEEIRTTNPVATEQYGTVANNLQSSNTAPTTRTVNDQGALPGMVWQDRDVYLQGPIWAKIPHTDGHFHPSPLMGGFGLKHPPPQIMIKNTPVPANPPTTFSPAKFASFITQYSTGQVSVEIEWELQKENSKRWNPEIQYTSNYNKSVNVDFTVDTNGVYSEPRPIGTRYLTRNL

SEQ ID NO: 1833 - protein, 735 aa, Artificial Sequence
  Description of Artificial Sequence: Synthetic polypeptide
MSFVDHPPDWLEEVGEGLREFLGLEAGPPKPKPNQQHQDQARGLVLPGYNYLGPGNGLDRGEPVNRADEVAREHDISYNEQLEAGDNPYLKYNHADAEFQEKLADDTSFGGNLGKAVFQAKKRVLEPFGLVEEGAKTAPGKKRPVDQSPQEPDSSSGVGKSGKQPARKRLNFGQTGDSESVPDPQPLGEPPAAPTSLGSNTMASGGGAPMADNNEGADGVGNSSGNWHCDSQWLGDRVITTSTRTWALPTYNNHLYKQISSQSGASNDNHYFGYSTPWGYFDFNRFHCHFSPRDWQRLINNNWGFRPKKLSFKLFNIQVKEVTQNDGTTTIANNLTSTVQVFTDSEYQLPYVLGSAHQGCLPPFPADVFMVPQYGYLTLNNGSQAVGRSSFYCLEYFPSQMLRTGNNFQFSYTFEDVPFHSSYAHSQSLDRLMNPLIDQYLYYLNRTQGTTSGTTNQSRLLFSQAGPQSMSLQARNWLPGPCYRQQRLSKTANDNNNSNFPWTAASKYHLNGRDSLVNPGPAMASHKDDEEKFFPMHGNLIFGKEGTTASNAELDNVMITDEEEIRTTNPVATEQYGTVANNLQSSNTAPTTRTVNDQGALPGMVWQDRDVYLQGPIWAKIPHTDGHFHPSPLMGGFGLKHPPPQIMIKNTPVPANPPTTFSPAKFASFITQYSTGQVSVEIEWELQKENSKRWNPEIQYTSNYNKSVNVDFTVDTNGVYSEPRPIGTRYLTRPL

SEQ ID NO: 1834 - protein, 736 aa, Artificial Sequence
  Description of Artificial Sequence: Synthetic polypeptide
MAADGYLPDWLEDNLSEGIREWWALKPGAPKPKANQQKQDDGRGLVLPGYKYLGPFNGLDKGEPVNAADAAALEHDKAYDQQLQAGDNPYLRYNHADAEFQERLQEDTSFGGNLGRAVFQAKKRVLEPLGLVEEGAKTAPGKKRPVEPSPQRSPDSSTGIGKKGQQPARKRLNFGQTGDSESVPDPQPLGEPPAAPSGVGPNTMAAGGGAPMADNNEGADGVGSSSGNWHCDSTWLGDRVITTSTRTWALPTYNNHLYKQISSQSGASNDNHYFGYSTPWGYFDFNRFHCHFSPRDWQRLINNNWGFRPKRLSFKLFNIQVKEVTQNEGTKTIANNLTSTIQVFTDSEYQLPYVLGSAHQGCLPPFPADVFMIPQYGYLTLNNGSQAVGRSSFYCLEYFPSQMLRTGNNFQFTYTFEDVPFHSSYAHSQSLDRLMNPLIDQYLYYLSRTQTTGGTANTQTLGFSQGGPNTMANQAKNWLPGPCYRQQRVSTTTGQNNNSNFAWTAGTKYHLNGRNSLANPGIAMATHKDDEERFFPSNGILIFGKQGTTASNAELDNVMITDEEEIKTTNPVATEEYGIVADNLQQQNTAPQIGTVNSQGALPGMVWQNRDVYLQGPIWAKIPHTDGNFHPSPLMGGFGLKHPPPQILIKNTPVPADPPTTFNQSKLNSFITQYSTGQVSVEIEWELQKENSKRWNPEIQYTSNYNKSVNVDFTVDTNGVYSEPRPIGTRYLTRNL

SEQ ID NO: 1835 - protein, 736 aa, Artificial Sequence
  Description of Artificial Sequence: Synthetic polypeptide
MAADGYLPDWLEDNLSEGIREWWALKPGAPKPKANQQKQDDGRGLVLPGYKYLGPFNGLDKGEPVNAADAAALEHDKAYDQQLQAGDNPYLRYNHADAEFQERLQEDTSFGGNLGRAVFQAKKRVLEPLGLVEEGAKTAPGKKRPVEPSPQRSPDSSTGIGKKGQQPARKRLNFGQTGDSESVPDPQPLGEPPAAPSGVGPNTMAAGGGAPMADNNEGADGVGSSSGNWHCDSTWLGDRVITTSTRTWALPTYNNHLYKQISSQSGASNDNHYFGYSTPWGYFDFNRFHCHFSPRDWQRLINNNWGFRPKRLSFKLFNIQVKEVTQNEGTKTIANNLTSTIQVFTDSEYQLPYVLGSAHQGCLPPFPADVFMIPQYGYLTLNNGSQAVGRSSFYCLEYFPSQMLRTGNNFQFTYTFEDVPFHSSYAHSQSLDRLMNPLIDQYLYYLSRTQTTGGTANTQTLGFSQGGPNTMANQAKNWLPGPCYRQQRVSTTTGQNNNSNFAWTAGTKYHLNGRNSLANPGIAMATHKDDEERFFPSNGILIFGKQNAARDNADYSDVMLTSEEEIKTTNPVATEEYGIVADNLQQQNTAPQIGTVNSQGALPGMVWQNRDVYLQGPIWAKIPHTDGNFHPSPLMGGFGLKHPPPQILIKNTPVPADPPTTFNQSKLNSFITQYSTGQVSVEIEWELQKENSKRWNPEIQYTSNYYKSTSVDFAVNTEGVYSEPRPIGTRYLTRNL

SEQ ID NO: 1836 - protein, 736 aa, Artificial Sequence
  Description of Artificial Sequence: Synthetic polypeptide
MAADGYLPDWLEDNLSEGIREWWDLKPGAPKPKANQQKQDDGRGLVLPGYKYLGPFNGLDKGEPVNAADAAALEHDKAYDQQLKAGDNPYLRYNHADAEFQERLQEDTSFGGNLGRAVFQAKKRVLEPLGLVEEGAKTAPGKKRPVEQSPQEPDSSSGIGKTGQQPAKKRLNFGQTGDTESVPDPQPLGEPPAAPSGLGPNTMASGGGAPMADNNEGADGVGNSSGNWHCDSTWLGDRVITTSTRTWALPTYNNHLYKQISNGTSGGSTNDNTYFGYSTPWGYFDFNRFHCHFSPRDWQRLINNNWGFRPKRLNFKLFNIQVKEVTTNEGTKTIANNLTSTVQVFTDSEYQLPYVLGSAHQGCLPPFPADVFMVPQYGYLTLNNGSQALGRSSFYCLEYFPSQMLRTGNNFQFSYTFEDVPFHSSYAHSQSLDRLMNPLIDQYLYYLVRTQTTGTGGTQTLAFSQAGPSSMASQARNWVPGPSYRQQRVSTTTNQNNNSNFAWTGAAKFKLNGRDSLMNPGVAMASHKDDEDRFFPSSGVLIFGKQGAGNDGVDYSQVLITDEEEIKATNPVATEEYGAVAINNQAANTQAQTGLVHNQGVIPGMVWQNRDVYLQGPIWAKIPHTDGNFHPSPLMGGFGLKHPPPQILIKNTPVPADPPLTFNQAKLNSFITQYSTGQVSVEIEWELQKENSKRWNPEIQYTSNYYKSTNVDFAVNTEGVYSEPRPIGTRYLTRNL

SEQ ID NO: 1837 - DNA, 3695 bp, Artificial Sequence
  Description of Artificial Sequence: Synthetic polynucleotide
ctctttgcgcttgcgttttcccttgtccagatagcccagtagctgacattcatccggggtcagcaccgtttctgcggactggctttctacgtgaaaaggatctaggtgaagatcctttttgataatctcatgcctgacatttatattccccagaacatcaggttaatggcgtttttgatgtcattttcgcggtggctgagatcagccacttcttccccgataacggagaccggcacactggccatatcggtggtcatcatgcgccagctttcatccccgatatgcaccaccgggtaaagttcacgggagactttatctgacagcagacgtgcactggccagggggatcaccatccgtcgccccggcgtgtcaataatatcactctgtacatccacaaacagacgataacggctctctcttttataggtgtaaaccttaaactgccgtacgtataggctgcgcaactgttgggaagggcgatcggtgcgggcctcttcgctattacgccagctggcgaaagggggatgtgctgcaaggcgattaagttgggtaacgccagggttttcccagtcacgacgttgtaaaacgacggccagtgaattgtaatacgactcactatagggcgaattgaatttagcggccgcgaattcgcccttatgatatctggtgggaggagggcaagatgacggccaaggtcgtggagtccgccaaggccattctcggcggcagcaaagtgcgcgtggaccaaaagtgcaagtcgtccgcccagatcgatcccactcccgtcattgtcacctccaacaccaacatgtgcgccgtgattgacgggaacagcaccaccttcgagcaccagcagccgttgcaggaccggatgttcaaatttgaacttacccgccgtctggagcatgactttggcaaggtgacaaagcaggaagtcaaagagttcttccgctgggcgcaggatcacgtgaccgaggtggcgcatgagttccacgtcagaaagggtggagccaacaagagacccgcccccgatgacgctgataaaagcgagcccaagcgggcctgcccctcagtcgcagatccatcgacgtcagacgcggaaggagctccggtggactttgccgacaggtaccaaaacaaatgttctcgtcacgcgggcatgcttcagatgctgtttccctgcaagacatgcgagagaatgaatcagaatttcaacatttgcttcacgcacgggaccagggactgttcggagtgcttccccggcgtgtcagaatctcaaccggtcgtcagaaaaaggacgtatcggaaactctgtgccattcatcatctgctggggagggctcccgagattgcttgctcggcctgcgatctggtcaacgtggacctggatgactgtgtctctgagcaataaatgacttaaaccaggtatggctgccgatggttatcttccagattggctcgaggacaacctctctgagggcattcgcgagtggtgggacttgaaacctggagccccgaaacccaaagccaaccagcaaaagcaggacgacggccggggtctggtgcttcctggctacaagtacctcggacccttcaacggactcgacaagggggagcccgtcaacgcggcggacgcagcggccctcgagcacgacaaggcctacgaccagcagctcaaagcgggtgacaatccgtacctgcggtataaccacgccgacgccgagtttcaggagcgtctgcaagaagatacgtcttttgggggcaacctcgggcgagcagtcttccaggccaagaagcgggttctcgaacctctcggtctggttgaggaaggcgctaagacggctcctggaaagaagagaccggtagagcagtcaccccaagaaccagactcctcatcgggcatcggcaagacaggccagcagcccgctaaaaagagactcaattttggtcagactggcgacacagagtcagtccccgacccacaacctctcggagaacctccagcagccccctcaggtctgggacctaatacaatggcttcaggcggtggcgctccaatggcagacaataacgaaggcgccgacggagtgggtaattcctcgggaaattggcattgcgattccacatggctgggggacagagtcatcaccaccagcacccgaacctgggccctgcccacctacaacaaccacctctacaagcaaatctccaacggcacctcgggaggaagcaccaacgacaacacctactttggctacagcaccccctgggggtattttgacttcaacagattccactgccacttttcaccacgtgactggcagcgactcatcaacaacaattggggattccggcccaagagactcaacttcaagctcttcaacatccaggtcaaggaagtcacgacgaacgaaggcaccaagaccatcgccaataatctcaccagcaccgtgcaggtctttacggactcggagtaccagctaccgtacgtgctaggatcagctcaccagggatgtctgcctccgttcccggcggacgtcttcatggttcctcagtacggttatctaactctgaacaatggcagccaggccctgggacgttcctccttctactgcctggagtatttcccatcgcagatgctgagaaccggcaacaactttcagttcagctacaccttcgaggacgtgcctttccacagcagctacgcgcacagccaaagcctggacaggctgatgaatcccctcatcgaccagtacctgtattacctggtcagaacgcagacaaccgggactggagggacgcagactctggcattcagccaagcaggccctagctcaatggccagccaggctagaaactgggtgcccggaccgagctaccggcagcagcgcgtctccacgacaaccaaccagaacaacaacagcaactttgcctggacgggagctgccaaatttaaactgaacggccgagactctctaatgaaccccggcgtggccatggcttcacacaaggatgacgaggaccgcttcttcccttctagcggggtcctgattttcggcaagcaaggagccgggaatgatggagtggattacagccaagtgctgattacagatgaggaagaaatcaaggctaccaaccccgtggcaacagaggaatatggagcagtggccatcaacaaccaggccgctaatacgcaggcgcagaccggactcgtgcacaaccagggggtgattcccggcatggtgtggcagaacagagacgtgtacctgcagggtcccatctgggccaaaattcctcacacggacggcaactttcacccgtctcccctgatgggcggctttggactgaagcacccgcctcctcaaattctcatcaagaacacaccggttccagcggacccgccgcttaccttcaaccaggccaagctgaactctttcatcacgcagtacagcaccggacaggtcagcgtggaaatcgagtgggagctgcagaaagaaaacagcaaacgctggaatccagagattcagtacacttccaactactacaaatctacaaatgtggactttgctgtcaacacggaaggagtgtatagcgagcctcgccccattggcacccgttacctcacccgcaacctgtaattgcctgttaatcaataaaccggttaattcgtttcagtaaggaagaattcgtttaaa

SEQ ID NO: 1838 - protein, 736 aa, Artificial Sequence; identical to SEQ ID NO: 507
  Description of Artificial Sequence: Synthetic polypeptide

SEQ ID NO: 1839 - protein, 736 aa, Artificial Sequence
  Description of Artificial Sequence: Synthetic polypeptide
MAADGYLPDWLEDNLSEGIREWWDLKPGAPKPKANQQKQDDGRGLVLPGYKYLGPFNGLDKGEPVNAADAAALEHDKAYDQQLKAGDNPYLRYNHADAEFQERLQEDTSFGGNLGRAVFQAKKRVLEPLGLVEEGAKTAPGKKRPVEQSPQEPDSSSGIGKTGQQPAKKRLNFGQTGDTESVPDPQPLGEPPAAPSGLGPNTMASGGGAPMADNNEGADGVGNSSGNWHCDSTWLGDRVITTSTRTWALPTYNNHLYKQISNGTSGGSTNDNTYFGYSTPWGYFDFNRFHCHFSPRDWQRLINNNWGFRPKRLNFKLFNIQVKEVTTNEGTKTIANNLTSTVQVFTDSEYQLPYVLGSAHQGCLPPFPADVFMVPQYGYLTLNNGSQALGRSSFYCLEYFPSQMLRTGNNFQFSYTFEDVPFHSSYAHSQSLDRLMNPLIDQYLYYLVRTQTTGTGGTQTLAFSQAGPSNMASQARNWVPGPSYRQQRVSTTTNQNNNSNFAWTGAAKFKLNGRDSLMNPGVAMASHKDDEDRFFPSSGVLIFGKQGAGNDGVDYSQVLITDEEEIKATNPVATEEYGAVAINNQAANTQAQTGLVHNQGVIPGMVWQNRDVYLQGPIWAKIPHTDGNFHPSPLMGGFGLKHPPPQILIKNTPVPADPPLTFNQAKLNSFITQYSTGQVSVEIEWELQKENSKRWNPEIQYTSNYYKSTNVDFAVNTEGVYSEPRPIGTRYLTRNL

SEQ ID NO: 1840 - protein, 738 aa, Artificial Sequence; identical to SEQ ID NO: 1534
  Description of Artificial Sequence: Synthetic polypeptide

SEQ ID NO: 1841 - protein, 736 aa, Artificial Sequence
  Description of Artificial Sequence: Synthetic polypeptide
MAADGYLPDWLEDNLSEGIREWWALQPGAPKPKANQQHQDNARGLVLPGYKYLGPGNGLDKGEPVNAADAAALEHDKAYDQQLKAGDNPYLKYNHADAEFQERLKEDTSFGGNLGRAVFQAKKRILEPLGLVEEAAKTAPGKKRPVDQSPQEPDSSSGVGKSGKQPARKRLNFGQTGDSESVPDPQPLGEPPAAPTSLGSNTMASGGGAPMADNNEGADGVGNSSGNWHCDSQWLGDRVITTSTRTWALPTYNNHLYKQISSQSGASNDNHYFGYSTPWGYFDFNRFHCHFSPRDWQRLINNNWGFRPKKLSFKLFNIQVKEVTQNDGTTTIANNLTSTVQVFTDSEYQLPYVLGSAHQGCLPPFPADVFMVPQYGYLTLNNGSQAVGRSSFYCLEYFPSQMLRTGNNFQFSYTFEDVPFHSSYAHSQSLDRLMNPLIDQYLYYLNRTQGTTSGTTNQSRLLFSQAGPQSMSLQARNWLPGPCYRQQRLSKTANDNNNSNFPWTAASKYHLNGRDSLVNPGPAMASHKDDEEKFFPMHGNLIFGKEGTTASNAELDNVMITDEEEIRTTNPVATEQYGTVANNLQSSNTAPTTRTVNDQGALPGMVWQDRDVYLQGPIWAKIPHTDGHFHPSPLMGGFGLKHPPPQIMIKNTPVPANPPTTFSPAKFASFITQYSTGQVSVEIEWELQKENSKRWNPEIQYTSNYNKSVNVDFTVDTNGVYSEPRPIGTRYLTRPL

SEQ ID NO: 1842 - protein, 736 aa, Artificial Sequence
  Description of Artificial Sequence: Synthetic polypeptide
MAADGYLPDWLEDNLSEGIREWWALQPGAPKPKANQQHQDNARGLVLPGYKYLGPGNGLDKGEPVNAADAAALEHDKAYDQQLKAGDNPYLKYNHADAEFQERLKEDTSFGGNLGRAVFQAKKRLLEPLGLVEEAAKTAPGKKRPVDQSPQEPDSSSGVGKSGKQPARKRLNFGQTGDSESVPDPQPLGEPPAAPTSLGSNTMASGGGAPMADNNEGADGVGNSSGNWHCDSQWLGDRVITTSTRTWALPTYNNHLYKQISSQSGASNDNHYFGYSTPWGYFDFNRFHCHFSPRDWQRLINNNWGFRPKKLSFKLFNIQVKEVTQNDGTTTIANNLTSTVQVFTDSEYQLPYVLGSAHQGCLPPFPADVFMVPQYGYLTLNNGSQAVGRSSFYCLEYFPSQMLRTGNNFQFSYTFEDVPFHSSYAHSQSLDRLMNPLIDQYLYYLNRTQGTTSGTTNQSRLLFSQAGPQSMSLQARNWLPGPCYRQQRLSKVANDNNNSNFPWTAASKYHLNGRDSLVNPGPAMASHKDDEEKFFPMHGNLIFGKEGTTASNAELDNVMITDEEEIRTTNPVATEQYGTVANNLQSSNTAPTTRTVNDQGALPGMVWQDRDVYLQGPIWAKIPHTDGHFHPSPLMGGFGLKHPPPQIMIKNTPVPANPPTTFVPAKFASFITQYSTGQVSVEIEWELQKENSKRWNPEIQYTSNYNKSVNVDFTVDTNGVYSEPRPIGTRYLTRPL

SEQ ID NO: 1843 - protein, 736 aa, Artificial Sequence
  Description of Artificial Sequence: Synthetic polypeptide
  misc_feature (168)..(168): Xaa can be any naturally occurring amino acid
  misc_feature (204)..(204): Xaa can be any naturally occurring amino acid
  misc_feature (266)..(266): Xaa can be any naturally occurring amino acid
  misc_feature (311)..(311): Xaa can be any naturally occurring amino acid
  misc_feature (411)..(411): Xaa can be any naturally occurring amino acid
  misc_feature (460)..(460): Xaa can be any naturally occurring amino acid
  misc_feature (493)..(493): Xaa can be any naturally occurring amino acid
  misc_feature (562)..(562): Xaa can be any naturally occurring amino acid
  misc_feature (576)..(576): Xaa can be any naturally occurring amino acid
  misc_feature (587)..(587): Xaa can be any naturally occurring amino acid
  misc_feature (609)..(609): Xaa can be any naturally occurring amino acid
MAADGYLPDWLEDNLSEGIREWWDLKPGAPKPKANQQKQDDGRGLVLPGYKYLGPFNGLDKGEPVNAADAAALEHDKAYDQQLKAGDNPYLRYNHADAEFQERLQEDTSFGGNLGRAVFQAKKRVLEPLGLVEEGAKTAPGKKRPVEQSPQEPDSSSGIGKKGQQPAXKRLNFGQTGDSESVPDPQPLGEPPAAPSGVGSNTMXAGGGAPMADNNEGADGVGNASGNWHCDSTWLGDRVITTSTRTWALPTYNNHLYKQISSQSGXSTNDNTYFGYSTPWGYFDFNRFHCHFSPRDWQRLINNNWGFRPKXLNFKLFNIQVKEVTTNDGTTTIANNLTSTVQVFTDSEYQLPYVLGSAHQGCLPPFPADVFMIPQYGYLTLNNGSQAVGRSSFYCLEYFPSQMLRTGNNFXFSYTFEDVPFHSSYAHSQSLDRLMNPLIDQYLYYLSRTQTTSGTAGNRXLQFSQAGPSSMANQAKNWLPGPCYRQQRVSKTXNQNNNSNFAWTGATKYHLNGRDSLVNPGPAMATHKDDEDKFFPMSGVLIFGKQGAGNSNVDLDNVMITXEEEIKTTNPVATEXYGTVATNLQSXNTAPATGTVNSQGALPGMVWQXRDVYLQGPIWAKIPHTDGHFHPSPLMGGFGLKHPPPQILIKNTPVPANPPTTFSPAKFASFITQYSTGQVSVEIEWELQKENSKRWNPEIQYTSNYNKSTNVDFAVDTNGVYSEPRPIGTRYLTRNL

SEQ ID NO: 1844 - DNA, 2208 bp, Artificial Sequence
  Description of Artificial Sequence: Synthetic polynucleotide
  misc_feature (502)..(504): n is a, c, g, or t
  misc_feature (610)..(612): n is a, c, g, or t
  misc_feature (796)..(798): n is a, c, g, or t
  misc_feature (931)..(933): n is a, c, g, or t
  misc_feature (1231)..(1233): n is a, c, g, or t
  misc_feature (1378)..(1380): n is a, c, g, or t
  misc_feature (1477)..(1479): n is a, c, g, or t
  misc_feature (1684)..(1686): n is a, c, g, or t
  misc_feature (1726)..(1728): n is a, c, g, or t
  misc_feature (1759)..(1761): n is a, c, g, or t
  misc_feature (1825)..(1827): n is a, c, g, or t
atggctgccgatggttatcttccagattggctcgaggacaacctctctgagggcattcgcgagtggtgggacttgaaacctggagccccgaaacccaaagccaaccagcaaaagcaggacgacggccggggtctggtgcttcctggctacaagtacctcggacccttcaacggactcgacaagggggagcccgtcaacgcggcggacgcagcggccctcgagcacgacaaggcctacgaccagcagctcaaagcgggtgacaatccgtacctgcggtataaccacgccgacgccgagtttcaggagcgtctgcaagaagatacgtcttttgggggcaacctcgggcgagcagtcttccaggccaagaagcgggttctcgaacctctcggtctggttgaggaaggcgctaagacggctcctggaaagaagagaccggtagagcaatcaccccaggaaccagactcctcttcgggcatcggcaagaaaggccagcagcccgcgnnnaagagactcaactttgggcagacaggcgactcagagtcagtgcccgaccctcaaccactcggagaaccccccgcagccccctctggtgtgggatctaatacaatgnnngcaggcggtggcgctccaatggcagacaataacgaaggcgccgacggagtgggtaacgcctcaggaaattggcattgcgattccacatggctgggcgacagagtcatcaccaccagcacccgaacctgggccctccccacctacaacaaccacctctacaagcaaatctccagccaatcgggannnagcaccaacgacaacacctacttcggctacagcaccccctgggggtattttgactttaacagattccactgccacttctcaccacgtgactggcagcgactcatcaacaacaactggggattccggcccaagnnnctcaacttcaagctcttcaacatccaggtcaaggaggtcacgacgaatgatggcaccacgaccatcgccaataaccttaccagcacggttcaggtctttacggactcggaataccagctcccgtacgtcctcggctctgcgcaccagggctgcctgcctccgttcccggcggacgtcttcatgattcctcagtacgggtacctgactctgaacaatggcagtcaggccgtgggccgttcctccttctactgcctggagtactttccttctcaaatgctgagaacgggcaacaactttnnnttcagctacacgtttgaggacgtgccttttcacagcagctacgcgcacagccaaagcctggaccggctgatgaaccccctcatcgaccagtacctgtactacctgtctcggactcagaccacgagtggtaccgcaggaaatcggnnnttgcaattttctcaggccgggcctagtagcatggcgaatcaggccaaaaactggctacccgggccctgctaccggcagcaacgcgtctccaagacannnaatcaaaataacaacagcaactttgcctggaccggtgccaccaagtatcatctgaatggcagagactctctggtaaatcccggtcccgctatggcaacccacaaggacgacgaagacaaattttttccgatgagcggagtcttaatatttgggaaacagggagctggaaatagcaacgtggaccttgacaacgttatgataaccnnngaggaagaaattaaaaccaccaacccagtggccacagaannntacggcacggtggccactaacctgcaatcgnnnaacaccgctcctgctacagggaccgtcaacagtcaaggagccttacctggcatggtctggcagnnncgggacgtgtacctgcagggtcctatctgggccaagattcctcacacggacggacactttcatccctcgccgctgatgggaggctttggactgaaacacccgcctcctcagatcctgattaagaatacacctgttcccgcgaatcctccaactaccttcagtccagctaagtttgcgtcgttcatcacgcagtacagcaccggacaggtcagcgtggaaattgaatgggagctgcagaaagaaaacagcaaacgctggaacccagagattcaatacacttccaactacaacaaatctacaaatgtggactttgctgttgacacaaatggcgtttattctgagcctcgccccatcggcacccgttacctcacccgtaatctg

SEQ ID NO: 1845 - protein, 737 aa, Artificial Sequence
  Description of Artificial Sequence: Synthetic polypeptide
  misc_feature (157)..(157): Xaa can be any naturally occurring amino acid
  misc_feature (168)..(168): Xaa can be any naturally occurring amino acid
  misc_feature (262)..(263): Xaa can be any naturally occurring amino acid
  misc_feature (312)..(312): Xaa can be any naturally occurring amino acid
  misc_feature (412)..(412): Xaa can be any naturally occurring amino acid
  misc_feature (460)..(461): Xaa can be any naturally occurring amino acid
  misc_feature (552)..(552): Xaa can be any naturally occurring amino acid
  misc_feature (556)..(557): Xaa can be any naturally occurring amino acid
  misc_feature (563)..(563): Xaa can be any naturally occurring amino acid
  misc_feature (580)..(580): Xaa can be any naturally occurring amino acid
  misc_feature (588)..(588): Xaa can be any naturally occurring amino acid
  misc_feature (664)..(664): Xaa can be any naturally occurring amino acid
MAADGYLPDWLEDNLSEGIREWWDLKPGAPKPKANQQKQDDGRGLVLPGYKYLGPFNGLDKGEPVNAADAAALEHDKAYDQQLKAGDNPYLRYNHADAEFQERLQEDTSFGGNLGRAVFQAKKRVLEPLGLVEEGAKTAPGKKRPVEQSPQEPDSSXGIGKKGQQPAXKRLNFGQTGDSESVPDPQPLGEPPAAPSGVGSNTMAAGGGAPMADNNEGADGVGNASGNWHCDSTWLGDRVITTSTRTWALPTYNNHLYKQISXXQSGGSTNDNTYFGYSTPWGYFDFNRFHCHFSPRDWQRLINNNWGFRPKXLNFKLFNIQVKEVTTNDGTTTIANNLTSTVQVFTDSEYQLPYVLGSAHQGCLPPFPADVFMIPQYGYLTLNNGSQAVGRSSFYCLEYFPSQMLRTGNNFXFSYTFEDVPFHSSYAHSQSLDRLMNPLIDQYLYYLSRTQTTGGTAGNXXLQFSQAGPSSMANQAKNWLPGPCYRQQRVSKTTNQNNNSNFAWTGATKYHLNGRDSLVNPGVAMATHKDDEDRFFPSSGVLIFGKQGAGNXNVDXXNVMITXEEEIKTTNPVATEEYGXVATNLQSXNTAPQTGTVNSQGALPGMVWQNRDVYLQGPIWAKIPHTDGNFHPSPLMGGFGLKHPPPQILIKNTPVPANPPTTFXPAKFASFITQYSTGQVSVEIEWELQKENSKRWNPEIQYTSNYNKSTNVDFAVDTEGVYSEPRPIGTRYLTRNL

SEQ ID NO: 1846 - DNA, 2211 bp, Artificial Sequence
  Description of Artificial Sequence: Synthetic polynucleotide
  misc_feature (469)..(471): n is a, c, g, or t
  misc_feature (502)..(504): n is a, c, g, or t
  misc_feature (784)..(789): n is a, c, g, or t
  misc_feature (934)..(936): n is a, c, g, or t
  misc_feature (1234)..(1236): n is a, c, g, or t
  misc_feature (1378)..(1383): n is a, c, g, or t
  misc_feature (1654)..(1656): n is a, c, g, or t
  misc_feature (1666)..(1671): n is a, c, g, or t
  misc_feature (1687)..(1689): n is a, c, g, or t
  misc_feature (1738)..(1740): n is a, c, g, or t
  misc_feature (1762)..(1764): n is a, c, g, or t
  misc_feature (1990)..(1992): n is a, c, g, or t
atggctgccgatggttatcttccagattggctcgaggacaacctctctgagggcattcgcgagtggtgggacttgaaacctggagccccgaaacccaaagccaaccagcaaaagcaggacgacggccggggtctggtgcttcctggctacaagtacctcggacccttcaacggactcgacaagggggagcccgtcaacgcggcggacgcagcggccctcgagcacgacaaggcctacgaccagcagctcaaagcgggtgacaatccgtacctgcggtataaccacgccgacgccgagtttcaggagcgtctgcaagaagatacgtcttttgggggcaacctcgggcgagcagtcttccaggccaagaagcgggttctcgaacctctcggtctggttgaggaaggcgctaagacggctcctggaaagaagagaccggtagagcaatcaccccaggaaccagactcctctnnnggcatcggcaagaaaggccagcagcccgcgnnnaagagactcaactttgggcagactggcgactcagagtcagtgcccgaccctcaaccactcggagaaccccccgcagccccctctggtgtgggatctaatacaatggctgcaggcggtggcgctccaatggcagacaataacgaaggcgccgacggagtgggtaatgcctcaggaaattggcattgcgattccacatggctgggcgacagagtcatcaccaccagcacccgaacctgggccctccccacctacaacaaccacctctacaagcaaatctccnnnnnncaatcgggaggaagcaccaacgacaacacctacttcggctacagcaccccctgggggtattttgactttaacagattccactgccacttctcaccacgtgactggcagcgactcatcaacaacaactggggattccggcccaagnnnctcaacttcaagctcttcaacatccaggtcaaggaggtcacgacgaatgatggcaccacgaccatcgccaataaccttaccagcacggttcaggtctttacggactcggaataccagctcccgtacgtcctcggctctgcgcaccagggctgcctgcctccgttcccggcggacgtcttcatgattcctcagtacgggtacctgactctgaacaatggcagtcaggccgtgggccgttcctccttctactgcctggagtactttccttctcaaatgctgagaacgggcaacaactttnnnttcagctacacgtttgaggacgtgccttttcacagcagctacgcgcacagccaaagcctggaccggctgatgaaccccctcatcgaccagtacctgtactacctgtctcggactcagaccacgggaggtaccgcaggaaatnnnnnnttgcaattttctcaggccgggcctagtagcatggcgaatcaggccaaaaactggctacccgggccctgctaccggcagcaacgcgtctccaagacaacgaatcaaaataacaacagcaactttgcctggaccggtgccaccaagtatcatctgaatggcagagactctctggtaaatcccggtgtcgctatggcaacccacaaggacgacgaagaccgattttttccgtccagcggagtcttaatatttgggaaacagggagctggaaatnnnaacgtggacnnnnnnaacgttatgataaccnnngaggaagaaattaaaaccaccaacccagtggccacagaagagtacggcnnngtggccactaacctgcaatcgnnnaacaccgctcctcaaacagggaccgtcaacagtcaaggagccttacctggcatggtctggcagaaccgggacgtgtacctgcagggtcctatctgggccaagattcctcacacggacggaaactttcatccctcgccgctgatgggaggctttggactgaaacacccgcctcctcagatcctgattaagaatacacctgttcccgcgaatcctccaactaccttcnnnccagctaagtttgcgtcgttcatcacgcagtacagcaccggacaggtcagcgtggaaattgaatgggagctgcagaaagaaaacagcaaacgctggaacccagagattcaatacacttccaactacaacaaatctacaaatgtggactttgctgttgacacagaaggcgtttattctgagcctcgccccatcggcacccgttacctcacccgtaatctg

SEQ ID NO: 1847 - protein, 738 aa, Artificial Sequence
  Description of Artificial Sequence: Synthetic polypeptide
  misc_feature (158)..(158): Xaa can be any naturally occurring amino acid
  misc_feature (169)..(169): Xaa can be any naturally occurring amino acid
  misc_feature (564)..(564): Xaa can be any naturally occurring amino acid
MAADGYLPDWLEDNLSEGIREWWDLKPGAPKPKANQQKQDDGRGLVLPGYKYLGPFNGLDKGEPVNAADAAALEHDKAYDQQLKAGDNPYLRYNHADAEFQERLQEDTSFGGNLGRAVFQAKKRVLEPLGLVEEGAKTAPGKKRPVEQSPQREPDSSXGIGKKGQQPAXKRLNFGQTGDSESVPDPQPLGEPPAAPSGVGSNTMAAGGGAPMADNNEGADGVGNSSGNWHCDSTWLGDRVITTSTRTWALPTYNNHLYKQISNGTSGGSTNDNTYFGYSTPWGYFDFNRFHCHFSPRDWQRLINNNWGFRPKRLNFKLFNIQVKEVTTNEGTKTIANNLTSTVQVFTDSEYQLPYVLGSAHQGCLPPFPADVFMIPQYGYLTLNNGSQAVGRSSFYCLEYFPSQMLRTGNNFQFSYTFEDVPFHSSYAHSQSLDRLMNPLIDQYLYYLSRTQTTGGTAGTQTLQFSQAGPSSMANQAKNWLPGPCYRQQRVSTTTNQNNNSNFAWTGATKYHLNGRDSLVNPGVAMATHKDDEDRFFPSSGVLIFGKQGAGNDNVDYSNVMITXEEEIKTTNPVATEEYGVVATNLQSANTAPQTGTVNSQGALPGMVWQNRDVYLQGPIWAKIPHTDGNFHPSPLMGGFGLKHPPPQILIKNTPVPADPPTTFNQAKLNSFITQYSTGQVSVEIEWELQKENSKRWNPEIQYTSNYYKSTNVDFAVNTEGVYSEPRPIGTRYLTRNL

SEQ ID NO: 1848 - DNA, 2214 bp, Artificial Sequence
  Description of Artificial Sequence: Synthetic polynucleotide
  misc_feature (472)..(474): n is a, c, g, or t
  misc_feature (505)..(507): n is a, c, g, or t
  misc_feature (1690)..(1692): n is a, c, g, or t
atggctgccgatggttatcttccagattggctcgaggacaacctctctgagggcattcgcgagtggtgggacctgaaacctggagccccgaaacccaaagccaaccagcaaaagcaggacgacggccggggtctggtgcttcctggctacaagtacctcggacccttcaacggactcgacaagggggagcccgtcaacgcggcggacgcagcggccctcgagcacgacaaggcctacgaccagcagctcaaagcgggtgacaatccgtacctgcggtataatcacgccgacgccgagtttcaggagcgtctgcaagaagatacgtcttttgggggcaacctcgggcgagcagtcttccaggccaagaagcgggttctcgaacctctcggtctggttgaggaaggcgctaagacggctcctggaaagaagagaccggtagagcagtcaccacagcgtgagcccgactcctccnnnggcatcggcaagaaaggccagcagcccgccnnnaagagactcaatttcggtcagactggcgactcagagtcagtccccgaccctcaacctctcggagaacctccagcagcgccctctggtgtgggatctaatacaatggctgcaggcggtggcgcaccaatggcagacaataacgaaggtgccgacggagtgggtaattcctcgggaaattggcattgcgattccacatggctgggcgacagagtcatcaccaccagcacccgaacctgggccctgcccacctacaacaaccacctctacaagcaaatctccaacgggacctcgggaggcagcaccaacgacaacacctactttggctacagcaccccctgggggtattttgactttaacagattccactgccacttctcaccacgtgactggcagcgactcatcaacaacaactggggattccggcccaagagactcaacttcaagctcttcaacatccaggtcaaagaggtcacgacgaatgaaggcaccaagaccatcgccaataacctcaccagcaccgtccaggtgtttacggactcggaataccagctgccgtacgtcctcggctctgcccaccagggctgcctgcctccgttcccggcggacgtcttcatgattcctcagtacggctacctgactctcaacaacggtagtcaggccgtgggacgttcctccttctactgcctggagtacttcccctctcagatgctgagaacgggcaacaactttcaattcagctacactttcgaggacgtgcctttccacagcagctacgcgcacagccagagtttggacaggctgatgaatcctctcatcgaccagtacctgtactacctgtcaagaacccagactacgggaggcacagcgggaacccagacgttgcagttttctcaggccgggcctagcagcatggcgaatcaggccaaaaactggctgcctggaccctgctacagacagcagcgcgtctccacgacaacgaatcaaaacaacaacagcaactttgcctggactggtgccaccaagtatcatctgaacggcagagactctctggtgaatccgggcgtcgccatggcaacccacaaggacgacgaggaccgcttcttcccatccagcggcgtcctcatatttggcaagcagggagctggaaatgacaacgtggactatagcaacgtgatgataaccnnngaggaagaaatcaagaccaccaaccccgtggccacagaagagtatggcgtggtggctactaacctacagtcggcaaacaccgctcctcaaacggggaccgtcaacagccagggagccttacctggcatggtctggcagaaccgggacgtgtacctgcagggtcctatttgggccaagattcctcacacagatggcaactttcacccgtctcctttaatgggcggctttggacttaaacatccgcctcctcagatcctcatcaaaaacactcctgttcctgcggatcctccaacaacgttcaaccaggccaagctgaattctttcatcacgcagtacagcaccggacaagtcagcgtggagatcgagtgggagctgcagaaggagaacagcaagcgctggaacccagagattcagtatacttccaactactacaaatctacaaatgtggactttgctgttaatactgagggtgtttactctgagcctcgccccattggcactcgttacctcacccgtaatctg

SEQ ID NO: 1849 - protein, 738 aa, Artificial Sequence
  Description of Artificial Sequence: Synthetic polypeptide
  misc_feature (158)..(158): Xaa can be any naturally occurring amino acid
  misc_feature (169)..(169): Xaa can be any naturally occurring amino acid
  misc_feature (315)..(315): Xaa can be any naturally occurring amino acid
  misc_feature (413)..(413): Xaa can be any naturally occurring amino acid
  misc_feature (472)..(472): Xaa can be any naturally occurring amino acid
  misc_feature (534)..(534): Xaa can be any naturally occurring amino acid
  misc_feature (542)..(542): Xaa can be any naturally occurring amino acid
  misc_feature (595)..(595): Xaa can be any naturally occurring amino acid
MAADGYLPDWLEDNLSEGIREWWDLKPGAPKPKANQQKQDDGRGLVLPGYKYLGPFNGLDKGEPVNAADAAALEHDKAYDQQLKAGDNPYLRYNHADAEFQERLQEDTSFGGNLGRAVFQAKKRVLEPLGLVEEGAKTAPGKKRPVEQSPQREPDSSXGIGKKGQQPAXKRLNFGQTGDSESVPDPQPLGEPPAAPSGVGSNTMAAGGGAPMADNNEGADGVGSSSGNWHCDSTWLGDRVITTSTRTWALPTYNNHLYKQISNGTSGGSTNDNTYFGYSTPWGYFDFNRFHCHFSPRDWQRLINNNWGFRPKRLXFKLFNIQVKEVTQNEGTKTIANNLTSTIQVFTDSEYQLPYVLGSAHQGCLPPFPADVFMIPQYGYLTLNNGSQAVGRSSFYCLEYFPSQMLRTGNNFXFSYTFEDVPFHSSYAHSQSLDRLMNPLIDQYLYYLSRTQTTGGTAGTQTLQFSQAGPSXMANQAKNWLPGPCYRQQRVSTTTSQNNNSNFAWTGATKYHLNGRDSLVNPGVAMATHKDDEXRFFPSSGXLIFGKQGAGKDNVDYSNVMLTSEEEIKTTNPVATEEYGVVADNLQQQNTAPQXGTVNSQGALPGMVWQNRDVYLQGPIWAKIPHTDGNFHPSPLMGGFGLKHPPPQILIKNTPVPADPPTTFNQAKLNSFITQYSTGQVSVEIEWELQKENSKRWNPEIQYTSNYYKSTNVDFAVNTEGVYSEPRPIGTRYLTRNL

SEQ ID NO: 1850 - DNA, 2214 bp, Artificial Sequence
  Description of Artificial Sequence: Synthetic polynucleotide
  misc_feature (472)..(474): n is a, c, g, or t
  misc_feature (505)..(507): n is a, c, g, or t
  misc_feature (943)..(945): n is a, c, g, or t
  misc_feature (1237)..(1239): n is a, c, g, or t
  misc_feature (1414)..(1416): n is a, c, g, or t
  misc_feature (1600)..(1602): n is a, c, g, or t
  misc_feature (1624)..(1626): n is a, c, g, or t
  misc_feature (1783)..(1785): n is a, c, g, or t
atggctgccgatggttatcttccagattggctcgaggacaacctctctgagggcattcgcgagtggtgggacctgaaacctggagccccgaaacccaaagccaaccagcaaaagcaggacgacggccggggtctggtgcttcctggctacaagtacctcggacccttcaacggactcgacaagggggagcccgtcaacgcggcggacgcagcggccctcgagcacgacaaggcctacgaccagcagctcaaagcgggtgacaatccgtacctgcggtataatcacgccgacgccgagtttcaggagcgtctgcaagaagatacgtcttttgggggcaacctcgggcgagcagtcttccaggccaagaagcgggttctcgaacctctcggtctggttgaggaaggcgctaagacggctcctggaaagaagagaccggtagagcagtcaccacagcgtgagcccgactcctccnnnggcatcggcaagaaaggccagcagcccgccnnnaagagactcaatttcggtcagactggcgactcagagtcagtccccgaccctcaacctctcggagaacctccagcagcgccctctggtgtgggatctaatacaatggctgcaggcggtggcgcaccaatggcagacaataacgaaggtgccgacggagtgggtagttcctcgggaaattggcattgcgattccacatggctgggcgacagagtcatcaccaccagcacccgaacctgggccctgcccacctacaacaaccacctctacaagcaaatctccaacgggacctcgggaggcagcaccaacgacaacacctactttggctacagcaccccctgggggtattttgactttaacagattccactgccacttctcaccacgtgactggcagcgactcatcaacaacaactggggattccggcccaagagactcnnnttcaagctcttcaacatccaggtcaaagaggtcacgcagaatgaaggcaccaagaccatcgccaataacctcaccagcaccatccaggtgtttacggactcggaataccagctgccgtacgtcctcggctctgcccaccagggctgcctgcctccgttcccggcggacgtcttcatgattcctcagtacggctacctgactctcaacaacggtagtcaggccgtgggacgttcctccttctactgcctggagtacttcccctctcagatgctgagaacgggcaacaactttnnnttcagctacactttcgaggacgtgcctttccacagcagctacgcgcacagccagagtttggacaggctgatgaatcctctcatcgaccagtacctgtactacctgtcaagaacccagactacgggaggcacagcgggaacccagacgttgcagttttctcaggccgggcctagcnnnatggcgaatcaggccaaaaactggctgcctggaccctgctacagacagcagcgcgtctccacgacaacgtcgcaaaacaacaacagcaactttgcctggactggtgccaccaagtatcatctgaacggcagagactctctggtgaatccgggcgtcgccatggcaacccacaaggacgacgagnnncgcttcttcccatccagcggcnnnctcatatttggcaagcagggagctggaaaagacaacgtggactatagcaacgtgatgctaaccagcgaggaagaaatcaagaccaccaaccccgtggccacagaagagtatggcgtggtggctgataacctacagcagcaaaacaccgctcctcaannngggaccgtcaacagccagggagccttacctggcatggtctggcagaaccgggacgtgtacctgcagggtcctatttgggccaagattcctcacacagatggcaactttcacccgtctcctttaatgggcggctttggacttaaacatccgcctcctcagatcctcatcaaaaacactcctgttcctgcggatcctccaacaacgttcaaccaggccaagctgaattctttcatcacgcagtacagcaccggacaagtcagcgtggagatcgagtgggagctgcagaaggagaacagcaagcgctggaacccagagattcagtatacttccaactactacaaatctacaaatgtggactttgctgttaatactgagggtgtttactctgagcctcgccccattggcactcgttacctcacccgtaatctg

SEQ ID NO: 1851 - protein, 738 aa, Artificial Sequence
  Description of Artificial Sequence: Synthetic polypeptide
  misc_feature (169)..(169): Xaa can be any naturally occurring amino acid
  misc_feature (315)..(315): Xaa can be any naturally occurring amino acid
  misc_feature (534)..(534): Xaa can be any naturally occurring amino acid
  misc_feature (542)..(542): Xaa can be any naturally occurring amino acid
MAADGYLPDWLEDNLSEGIREWWDLKPGAPKPKANQQKQDDGRGLVLPGYKYLGPFNGLDKGEPVNAADAAALEHDKAYDQQLKAGDNPYLRYNHADAEFQERLQEDTSFGGNLGRAVFQAKKRVLEPLGLVEEGAKTAPGKKRPVEPSPQRSPDSSTGIGKKGQQPAXKRLNFGQTGDSESVPDPQPIGEPPAAPSGVGSGTMAAGGGAPMADNNEGADGVGSSSGNWHCDSTWLGDRVITTSTRTWALPTYNNHLYKQISNGTSGGSTNDNTYFGYSTPWGYFDFNRFHCHFSPRDWQRLINNNWGFRPKRLXFKLFNIQVKEVTQNEGTKTIANNLTSTIQVFTDSEYQLPYVLGSAHQGCLPPFPADVFMIPQYGYLTLNNGSQAVGRSSFYCLEYFPSQMLRTGNNFEFSYTFEDVPFHSSYAHSQSLDRLMNPLIDQYLYYLSRTQSTGGTAGTQQLLFSQAGPSNMSAQAKNWLPGPCYRQQRVSTTLSQNNNSNFAWTGATKYHLNGRDSLVNPGVAMATHKDDEXRFFPSSGXLMFGKQGAGKDNVDYSNVMLTSEEEIKTTNPVATEQYGVVADNLQQQNTAPIVGAVNSQGALPGMVWQNRDVYLQGPIWAKIPHTDGNFHPSPLMGGFGLKHPPPQILIKNTPVPADPPTTFNQAKLNSFITQYSTGQVSVEIEWELQKENSKRWNPEIQYTSNYYKSTNVDFAVNTEGVYSEPRPIGTRYLTRNL

SEQ ID NO: 1852 - DNA, 2214 bp, Artificial Sequence
  Description of Artificial Sequence: Synthetic polynucleotide
  misc_feature (505)..(507): n is a, c, g, or t
  misc_feature (943)..(945): n is a, c, g, or t
  misc_feature (1600)..(1602): n is a, c, g, or t
  misc_feature (1624)..(1626): n is a, c, g, or t
atggctgccgatggttatcttccagattggctcgaggacaacctctctgagggcattcgcgagtggtgggacctgaaacctggagccccgaaacccaaagccaaccagcaaaagcaggacgacggccggggtctggtgcttcctggctacaagtacctcggacccttcaacggactcgacaagggggagcccgtcaacgcggcggacgcagcggccctcgagcacgacaaggcctacgaccagcagctcaaagcgggtgacaatccgtacctgcggtataatcacgccgacgccgagtttcaggagcgtctgcaagaagatacgtcttttgggggcaacctcgggcgagcagtcttccaggccaagaagcgggttctcgaacctctcggtctggttgaggaaggcgctaagacggctcctggaaagaagagaccggtagagccgtcaccacagcgttcccccgactcctccacgggcatcggcaagaaaggccagcagcccgccnnnaagagactcaatttcggtcagactggcgactcagagtcagtccccgaccctcaacctatcggagaacctccagcagcgccctctggtgtgggatctggtacaatggctgcaggcggtggcgcaccaatggcagacaataacgaaggtgccgacggagtgggtagttcctcgggaaattggcattgcgattccacatggctgggcgacagagtcatcaccaccagcacccgaacctgggccctgcccacctacaacaaccacctctacaagcaaatctccaacgggacctcgggaggcagcaccaacgacaacacctactttggctacagcaccccctgggggtattttgactttaacagattccactgccacttctcaccacgtgactggcagcgactcatcaacaacaactggggattccggcccaagagactcnnnttcaagctcttcaacatccaggtcaaagaggtcacgcagaatgaaggcaccaagaccatcgccaataacctcaccagcaccatccaggtgtttacggactcggaataccagctgccgtacgtcctcggctctgcccaccagggctgcctgcctccgttcccggcggacgtcttcatgattcctcagtacggctacctgactctcaacaacggtagtcaggccgtgggacgttcctccttctactgcctggagtacttcccctctcagatgctgagaacgggcaacaactttgagttcagctacactttcgaggacgtgcctttccacagcagctacgcgcacagccagagtttggacaggctgatgaatcctctcatcgaccagtacctgtactacctgtcaagaacccagtctacgggaggcacagcgggaacccagcagttgctgttttctcaggccgggcctagcaacatgtcggctcaggccaaaaactggctgcctggaccctgctacagacagcagcgcgtctccacgacactgtcgcaaaacaacaacagcaactttgcctggactggtgccaccaagtatcatctgaacggcagagactctctggtgaatccgggcgtcgccatggcaacccacaaggacgacgagnnncgcttcttcccatccagcggcnnnctcatgtttggcaagcagggagctggaaaagacaacgtggactatagcaacgtgatgctaaccagcgaggaagaaatcaagaccaccaaccccgtggccacagaacagtatggcgtggtggctgataacctacagcagcaaaacaccgctcctattgtgggggccgtcaacagccagggagccttacctggcatggtctggcagaaccgggacgtgtacctgcagggtcctatttgggccaagattcctcacacagatggcaactttcacccgtctcctttaatgggcggctttggacttaaacatccgcctcctcagatcctcatcaaaaacactcctgttcctgcggatcctccaacaacgttcaaccaggccaagctgaattctttcatcacgcagtacagcaccggacaagtcagcgtggagatcgagtgggagctgcagaaggagaacagcaagcgctggaacccagagattcagtatacttccaactactacaaatctacaaatgtggactttgctgttaatactgagggtgtttactctgagcctcgccccattggcactcgttacctcacccgtaatctg

SEQ ID NO: 1853 - protein, 738 aa, Artificial Sequence
  Description of Artificial Sequence: Synthetic polypeptide
  misc_feature (471)..(471): Xaa can be any naturally occurring amino acid
MAADGYLPDWLEDNLSEGIREWWDLKPGAPKPKANQQKQDDGRGLVLPGYKYLGPFNGLDKGEPVNAADAAALEHDKAYDQQLKAGDNPYLRYNHADAEFQERLQEDTSFGGNLGRAVFQAKKRVLEPLGLVEEGAKTAPGKKRPVEPSPQRSPDSSTGIGKKGQQPAKKRLNFGQTGDSESVPDPQPIGEPPAGPSGLGSGTMAAGGGAPMADNNEGADGVGSSSGNWHCDSTWLGDRVITTSTRTWALPTYNNHLYKQISNGTSGGSTNDNTYFGYSTPWGYFDFNRFHCHFSPRDWQRLINNNWGFRPKRLNFKLFNIQVKEVTQNEGTKTIANNLTSTIQVFTDSEYQLPYVLGSAHQGCLPPFPADVFMIPQYGYLTLNNGSQAVGRSSFYCLEYFPSQMLRTGNNFEFSYTFEDVPFHSSYAHSQSLDRLMNPLIDQYLYYLSRTQSTGGTAGTQQLLFSQAGPXNMSAQAKNWLPGPCYRQQRVSTTLSQNNNSNFAWTGATKYHLNGRDSLVNPGVAMATHKDDEERFFPSSGVLMFGKQGAGKDNVDYSSVMLTSEEEIKTTNPVATEQYGVVADNLQQQNTAPIVGAVNSQGALPGMVWQNRDVYLQGPIWAKIPHTDGNFHPSPLMGGFGLKHPPPQILIKNTPVPADPPTTFSQAKLASFITQYSTGQVSVEIEWELQKENSKRWNPEIQYTSNYYKSTNVDFAVNTEGTYSEPRPIGTRYLTRNL

SEQ ID NO: 1854 - DNA, 2214 bp, Artificial Sequence
  Description of Artificial Sequence: Synthetic polynucleotide
  misc_feature (1411)..(1413): n is a, c, g, or t
atggctgccgatggttatcttccagattggctcgaggacaacctctctgagggcattcgcgagtggtgggacttgaaacctggagccccgaaacccaaagccaaccagcaaaagcaggacgacggccggggtctggtgcttcctggctacaagtacctcggacccttcaacggactcgacaagggggagcccgtcaacgcggcggacgcagcggccctcgagcacgacaaggcctacgaccagcagctcaaagcgggtgacaatccgtacctgcggtataaccacgccgacgccgagtttcaggagcgtctgcaagaagatacgtcttttgggggcaacctcgggcgagcagtcttccaggccaagaagcgggttctcgaacctctcggtctggttgaggaaggcgctaagacggctcctggaaagaagagaccggtagagccatcaccccagcgttctccagactcctctacgggcatcggcaagaaaggccagcagcccgcgaaaaagagactcaactttgggcagactggcgactcagagtcagtgcccgaccctcaaccaatcggagaaccccccgcaggcccctctggtctgggatctggtacaatggctgcaggcggtggcgctccaatggcagacaataacgaaggcgccgacggagtgggtagttcctcaggaaattggcattgcgattccacatggctgggcgacagagtcatcaccaccagcacccgaacctgggccctccccacctacaacaaccacctctacaagcaaatctccaacgggacttcgggaggaagcaccaacgacaacacctacttcggctacagcaccccctgggggtattttgactttaacagattccactgccacttctcaccacgtgactggcagcgactcatcaacaacaactggggattccggcccaagagactcaacttcaagctcttcaacatccaggtcaaggaggtcacgcagaatgaaggcaccaagaccatcgccaataaccttaccagcacgattcaggtctttacggactcggaataccagctcccgtacgtcctcggctctgcgcaccagggctgcctgcctccgttcccggcggacgtcttcatgattcctcagtacgggtacctgactctgaacaatggcagtcaggccgtgggccgttcctccttctactgcctggagtactttccttctcaaatgctgagaacgggcaacaactttgagttcagctacacgtttgaggacgtgccttttcacagcagctacgcgcacagccaaagcctggaccggctgatgaaccccctcatcgaccagtacctgtactacctgtctcggactcagtccacgggaggtaccgcaggaactcagcagttgctattttctcaggccgggcctnnnaacatgtcggctcaggccaaaaactggctacccgggccctgctaccggcagcaacgcgtctccacgacactgtcgcaaaataacaacagcaactttgcctggaccggtgccaccaagtatcatctgaatggcagagactctctggtaaatcccggtgtcgctatggcaacccacaaggacgacgaagagcgattttttccgtccagcggagtcttaatgtttgggaaacagggagctggaaaagacaacgtggactatagcagcgttatgctaaccagtgaggaagaaattaaaaccaccaacccagtggccacagaacagtacggcgtggtggccgataacctgcaacagcaaaacaccgctcctattgtaggggccgtcaacagtcaaggagccttacctggcatggtctggcagaaccgggacgtgtacctgcagggtcctatctgggccaagattcctcacacggacggaaactttcatccctcgccgctgatgggaggctttggactgaaacacccgcctcctcagatcctgattaagaatacacctgttcccgcggatcctccaactaccttcagtcaagctaagctggcgtcgttcatcacgcagtacagcaccggacaggtcagcgtggaaattgaatgggagctgcagaaagaaaacagcaaacgctggaacccagagattcaatacacttccaactactacaaatctacaaatgtggactttgctgttaacacagaaggcacttattctgagcctcgccccatcggcacccgttacctcacccgtaatctg

SEQ ID NO: 1855 - protein, 737 aa, Artificial Sequence
  Description of Artificial Sequence: Synthetic polypeptide
  misc_feature (148)..(148): Xaa can be any naturally occurring amino acid
  misc_feature (169)..(169): Xaa can be any naturally occurring amino acid
  misc_feature (314)..(314): Xaa can be any naturally occurring amino acid
  misc_feature (466)..(466): Xaa can be any naturally occurring amino acid
  misc_feature (563)..(563): Xaa can be any naturally occurring amino acid
  misc_feature (580)..(580): Xaa can be any naturally occurring amino acid
  misc_feature (588)..(588): Xaa can be any naturally occurring amino acid
MAADGYLPDWLEDNLSEGIREWWDLKPGAPKPKANQQKQDDGRGLVLPGYKYLGPFNGLDKGEPVNAADAAALEHDKAYDQQLKAGDNPYLRYNHADAEFQERLQEDTSFGGNLGRAVFQAKKRVLEPLGLVEEGAKTAPGKKRPVEXSPQRSPDSSTGIGKKGQQPAXKRLNFGQTGDSESVPDPQPLGEPPAAPSGVGSGTMAAGGGAPMADNNEGADGVGNASGNWHCDSTWLGDRVITTSTRTWALPTYNNHLYKQISSQSAGSTNDNTYFGYSTPWGYFDFNRFHCHFSPRDWQRLINNNWGFRPKKLXFKLFNIQVKEVTTNDGVTTIANNLTSTVQVFSDSEYQLPYVLGSAHQGCLPPFPADVFMIPQYGYLTLNNGSQSVGRSSFYCLEYFPSQMLRTGNNFEFSYTFEDVPFHSSYAHSQSLDRLMNPLIDQYLYYLARTQSTTGGTAGNRELQFXQAGPSTMAEQAKNWLPGPCYRQQRVSKTLDQNNNSNFAWTGATKYHLNGRNSLVNPGVAMATHKDDEDRFFPSSGVLIFGKTGAANKTTLENVLMTXEEEIKTTNPVATEEYGXVSSNLQSXNTAPQTQTVNSQGALPGMVWQNRDVYLQGPIWAKIPHTDGNFHPSPLMGGFGLKHPPPQILIKNTPVPANPPEVFTPAKFASFITQYSTGQVSVEIEWELQKENSKRWNPEIQYTSNYDKSTNVDFAVDSEGVYSEPRPIGTRYLTRNL

SEQ ID NO: 1856 - DNA, 2211 bp, Artificial Sequence
  Description of Artificial Sequence: Synthetic polynucleotide
  misc_feature (442)..(444): n is a, c, g, or t
  misc_feature (505)..(507): n is a, c, g, or t
  misc_feature (940)..(942): n is a, c, g, or t
  misc_feature (1396)..(1398): n is a, c, g, or t
  misc_feature (1687)..(1689): n is a, c, g, or t
  misc_feature (1738)..(1740): n is a, c, g, or t
  misc_feature (1762)..(1764): n is a, c, g, or t
atggctgccgatggttatcttccagattggctcgaggacaacctctctgagggcattcgcgagtggtgggacctgaaacctggagccccgaaacccaaagccaaccagcaaaagcaggacgacggccggggtctggtgcttcctggctacaagtacctcggacccttcaacggactcgacaagggggagcccgtcaacgcggcggacgcagcggccctcgagcacgacaaggcctacgaccagcagctcaaagcgggtgacaatccgtacctgcggtataaccacgccgacgccgagtttcaggagcgtctgcaagaagatacgtcatttgggggcaacctcgggcgagcagtcttccaggccaagaagcgggttctcgaacctctcggtctggttgaggaaggcgctaagacggctcctggaaagaagagaccggtagagnnntcacctcagcgttcccccgactcctccacgggcatcggcaagaaaggccagcagcccgccnnnaagagactcaatttcggtcagactggcgactcagagtcagtccccgaccctcaacctctcggagaacctccagcagcgccctctggtgtgggatctggtacaatggctgcaggcggtggcgcaccaatggcagacaataacgaaggtgccgacggagtgggtaatgcctcaggaaattggcattgcgattccacatggctgggcgacagagtcattaccaccagcacccgaacctgggccctgcccacctacaacaaccacctctacaagcaaatctccagtcaaagtgcaggtagtaccaacgacaacacctacttcggctacagcaccccctgggggtattttgactttaacagattccactgccacttctcaccacgtgactggcagcgactcatcaacaacaactggggattccggcccaagaagctgnnnttcaagctcttcaacatccaggtcaaggaggtcacgacgaatgacggcgttacgaccatcgctaataaccttaccagcacggttcaggtattctcggactcggaataccagctgccgtacgtcctcggctctgcgcaccagggctgcctgcctccgttcccggcggacgtcttcatgattcctcagtacggctacctgactctcaacaatggcagtcagtctgtgggacgttcctccttctactgcctggagtacttcccctctcagatgctgagaacgggcaacaactttgagttcagctacaccttcgaggacgtgcctttccacagcagctacgcacacagccagagcctggaccggctgatgaatcccctcatcgaccagtacttgtactacctggccagaacacagagtaccacaggaggcacagctggcaatcgggaactgcagtttnnncaggccgggccttcaactatggccgaacaagccaagaattggttacctggaccttgctaccggcaacaaagagtctccaaaacgctggatcaaaacaacaacagcaactttgcttggactggtgccaccaaatatcacctgaacggcagaaactcgttggttaatcccggcgtcgccatggcaactcacaaggacgacgaggaccgctttttcccatccagcggagtcctgatttttggaaaaactggagcagctaacaaaactacattggaaaatgtgttaatgacannngaagaagaaattaaaactactaatcctgtagccacggaagaatacgggnnngtcagcagcaacttacaatcgnnnaatactgcaccccagacacaaactgtcaacagccagggagccttacctggcatggtctggcagaaccgggacgtgtacctgcagggtcccatctgggccaagattcctcacacggatggcaactttcacccgtctcctttgatgggcggctttggacttaaacatccgcctcctcagatcctgatcaagaacactcccgttcccgctaatcctccggaggtgtttactcctgccaagtttgcttcgttcatcacacagtacagcaccggacaagtcagcgtggaaatcgagtgggagctgcagaaggaaaacagcaagcgctggaacccggagattcagtacacctccaactatgataagtcgactaatgtggactttgccgttgacagcgagggtgtttactctgagcctcgccctattggcactcgttacctcacccgtaatctg

SEQ ID NO: 1857 - protein, 735 aa, Artificial Sequence
  Description of Artificial Sequence: Synthetic polypeptide
  misc_feature (162)..(162): Xaa can be any naturally occurring amino acid
  misc_feature (168)..(168): Xaa can be any naturally occurring amino acid
  misc_feature (224)..(224): Xaa can be any naturally occurring amino acid
  misc_feature (310)..(310): Xaa can be any naturally occurring amino acid
  misc_feature (410)..(410): Xaa can be any naturally occurring amino acid
  misc_feature (446)..(446): Xaa can be any naturally occurring amino acid
  misc_feature (461)..(461): Xaa can be any naturally occurring amino acid
  misc_feature (471)..(471): Xaa can be any naturally occurring amino acid
  misc_feature (708)..(708): Xaa can be any naturally occurring amino acid
MAADGYLPDWLEDNLSEGIREWWDLKPGAPKPKANQQKQDDGRGLVLPGYKYLGPFNGLDKGEPVNAADAAALEHDKAYDQQLKAGDNPYLRYNHADAEFQERLQEDTSFGGNLGRAVFQAKKRVLEPLGLVEEGAKTAPGKKRPVEQSPQEPDSSSGIGKXGQQPAXKRLNFGQTGDSESVPDPQPLGEPPAAPSGVGSNTMASGGGAPMADNNEGADGVGNXSGNWHCDSTWLGDRVITTSTRTWALPTYNNHLYKQISSQSGASNDNHYFGYSTPWGYFDFNRFHCHFSPRDWQRLINNNWGFRPKXLNFKLFNIQVKEVTTNDGTTTIANNLTSTVQVFTDSEYQLPYVLGSAHQGCLPPFPADVFMIPQYGYLTLNNGSQAVGRSSFYCLEYFPSQMLRTGNNFXFSYTFEDVPFHSSYAHSQSLDRLMNPLIDQYLYYLXRTQTTSGTAQNRELXFSQAGPSSMXNQAKNWLPGPCYRQQRVSKTANDNNNSNFAWTGATKYHLNGRDSLVNPGPAMASHKDDEDKFFPMSGVLIFGKQGAGASNVDLDNVMITDEEEIKTTNPVATEQYGTVATNLQSSNTAPATGTVNSQGALPGMVWQDRDVYLQGPIWAKIPHTDGHFHPSPLMGGFGLKHPPPQILIKNTPVPANPPTTFSPAKFASFITQYSTGQVSVEIEWELQKENSKRWNPEIQYTSNYNKSXNVDFTVDTNGVYSEPRPIGTRYLTRNL

SEQ ID NO: 1858 - DNA, 2205 bp, Artificial Sequence
  Description of Artificial Sequence: Synthetic polynucleotide
  misc_feature (484)..(486): n is a, c, g, or t
  misc_feature (502)..(504): n is a, c, g, or t
  misc_feature (670)..(672): n is a, c, g, or t
  misc_feature (928)..(930): n is a, c, g, or t
  misc_feature (1228)..(1230): n is a, c, g, or t
  misc_feature (1336)..(1338): n is a, c, g, or t
  misc_feature (1381)..(1383): n is a, c, g, or t
  misc_feature (1411)..(1413): n is a, c, g, or t
  misc_feature (2122)..(2124): n is a, c, g, or t
atggctgccgatggttatcttccagattggctcgaggacaacctctctgagggcattcgcgagtggtgggacttgaaacctggagccccgaaacccaaagccaaccagcaaaagcaggacgacggccggggtctggtgcttcctggctacaagtacctcggacccttcaacggactcgacaagggggagcccgtcaacgcggcggatgcagcggccctcgagcacgacaaggcctacgaccagcagctcaaagcgggtgacaatccgtacctgcggtataaccacgccgacgccgagtttcaggagcgtctgcaagaagatacgtcttttgggggcaacctcgggcgagcagtcttccaggccaagaagagggttctcgaacctcttggtctggttgaggaaggtgctaagacggctcctggaaagaaacgtccggtagagcagtcgccacaagagccagactcctcctcgggcattggcaagnnnggccagcagcccgctnnnaagagactcaattttggtcagactggcgactcagagtcagtccccgacccacaacctctcggagaacctccagcagccccctctggtgtgggatctaatacaatggcttcaggcggtggcgcaccaatggcagacaataacgaaggcgccgacggagtgggtaatnnntcaggaaattggcattgcgattccacatggctgggcgacagagtcatcaccaccagcacccgaacatgggccttgcccacctataacaaccacctctacaagcaaatctccagtcaatcaggggccagcaacgacaaccactacttcggctacagcaccccctgggggtattttgatttcaacagattccactgccatttctcaccacgtgactggcagcgactcatcaacaacaattggggattccggcccaagnnnctcaacttcaagctcttcaacatccaagtcaaggaggtcacgacgaatgatggcaccacgaccatcgctaataaccttaccagcacggttcaagtcttcacggactcggagtaccagttgccgtacgtcctcggctctgcgcaccagggctgcctccctccgttcccggcggacgtgttcatgattccgcagtacggctacctaacgctcaacaatggcagccaggcagtgggacggtcatccttttactgcctggaatatttcccatcgcagatgctgagaacgggcaataactttnnnttcagctacaccttcgaggacgtgcctttccacagcagctacgcgcacagccagagcctggaccggctgatgaatcctctcatcgaccagtacctgtattacctgnnnagaactcagactacgtccggaactgcccaaaacagggagttgnnntttagccaggcgggtccatctagcatgnnnaatcaggccaaaaactggctacctggaccctgttaccggcagcagcgcgtttctaaaacagcaaatgacaacaacaacagcaactttgcctggactggtgctacaaaatatcaccttaatgggcgtgattctttagtcaaccctggccctgctatggcctcacacaaagacgacgaagacaagttctttcccatgagcggtgtcttgatttttggaaagcagggcgccggagcttcaaacgttgatttggacaatgtcatgatcacagacgaagaggaaatcaaaaccactaaccccgtggccaccgaacaatatgggactgtggcaaccaatctccagagcagcaacacagcccctgcgaccggaactgtgaattctcagggagccttacctggaatggtgtggcaagacagagacgtatacctgcagggtcctatttgggccaaaattcctcacacggatggacactttcacccgtctcctctcatgggcggctttggacttaagcacccgcctcctcagatcctcatcaaaaacacgcctgttcctgcgaatcctccgacaacgttttcgcctgcaaagtttgcttcattcatcacccagtattccacaggacaagtgagcgtggagattgaatgggagctgcagaaagaaaacagcaaacgctggaatcccgaaatacagtatacatctaactataataaatctnnnaacgttgatttcactgtggacaccaatggagtttatagtgagcctcgccccattggcacccgttacctcacccgtaacctg

SEQ ID NO: 1859 - protein, 735 aa, Artificial Sequence
  Description of Artificial Sequence: Synthetic polypeptide
  misc_feature (42)..(42): Xaa can be any naturally occurring amino acid
  misc_feature (168)..(168): Xaa can be any naturally occurring amino acid
  misc_feature (310)..(310): Xaa can be any naturally occurring amino acid
  misc_feature (410)..(410): Xaa can be any naturally occurring amino acid
  misc_feature (446)..(446): Xaa can be any naturally occurring amino acid
  misc_feature (461)..(461): Xaa can be any naturally occurring amino acid
  misc_feature (471)..(471): Xaa can be any naturally occurring amino acid
  misc_feature (475)..(475): Xaa can be any naturally occurring amino acid
  misc_feature (504)..(504): Xaa can be any naturally occurring amino acid
  misc_feature (539)..(539): Xaa can be any naturally occurring amino acid
MAADGYLPDWLEDNLSEGIREWWDLKPGAPQPKANQQHQDDXRGLVLPGYKYLGPFNGLDKGEPVNEADAAALEHDKAYDQQLKAGDNPYLKYNHADAEFQERLQEDTSFGGNLGRAVFQAKKRVLEPLGLVEEAAKTAPGKKRPVEQSPQEPDSSSGIGKSGQQPAXKRLNFGQTGDSESVPDPQPLGEPPAAPSGVGSNTMASGGGAPMADNNEGADGVGNSSGNWHCDSTWLGDRVITTSTRTWALPTYNNHLYKQISSQSGASNDNHYFGYSTPWGYFDFNRFHCHFSPRDWQRLINNNWGFRPKXLNFKLFNIQVKEVTQNDGTTTIANNLTSTVQVFTDSEYQLPYVLGSAHQGCLPPFPADVFMIPQYGYLTLNNGSQAVGRSSFYCLEYFPSQMLRTGNNFXFSYTFEDVPFHSSYAHSQSLDRLMNPLIDQYLYYLXRTQTTSGTTQQSRLXFSQAGPSSMXQQAXNWLPGPCYRQQRVSKTANDNNNSNFAWTXATKYHLNGRDSLVNPGPAMASHKDDEEKFFPMHGXLIFGKQGTGASNVDLDNVMITDEEEIRTTNPVATEQYGTVATNLQSSNTAPATGTVNSQGALPGMVWQDRDVYLQGPIWAKIPHTDGHFHPSPLMGGFGLKHPPPQILIKNTPVPANPPTTFSPAKFASFITQYSTGQVSVEIEWELQKENSKRWNPEIQYTSNYNKSVNVDFTVDTNGVYSEPRPIGTRYLTRNL

SEQ ID NO: 1860 - DNA, 2205 bp, Artificial Sequence
  Description of Artificial Sequence: Synthetic polynucleotide
  misc_feature (124)..(126): n is a, c, g, or t
  misc_feature (502)..(504): n is a, c, g, or t
  misc_feature (928)..(930): n is a, c, g, or t
  misc_feature (1228)..(1230): n is a, c, g, or t
  misc_feature (1336)..(1338): n is a, c, g, or t
  misc_feature (1381)..(1383): n is a, c, g, or t
  misc_feature (1411)..(1413): n is a, c, g, or t
  misc_feature (1423)..(1425): n is a, c, g, or t
  misc_feature (1510)..(1512): n is a, c, g, or t
  misc_feature (1615)..(1617): n is a, c, g, or t
atggctgctgacggttatcttccagattggctcgaggacaacctttctgaaggcattcgtgagtggtgggatctgaaacctggagcccctcaacccaaagcgaaccaacaacaccaggacgacnnncggggtcttgtgcttccgggttacaaatacctcggaccctttaacggactcgacaaaggagagccggtcaacgaggcggacgcggcagccctcgaacacgacaaagcttacgaccagcagctcaaggccggtgacaacccgtacctcaagtacaaccacgccgacgccgagtttcaggagcgtcttcaagaagatacgtcttttgggggcaaccttggcagagcagtcttccaggccaaaaagagggtccttgagcctcttggtctggttgaggaagcagctaaaacggctcctggaaagaagaggcctgtagaacagtctcctcaggaaccggactcatcatctggtattggcaaatcgggccaacagcctgccnnnaaaagactaaatttcggtcagactggagactcagagtcagtcccagaccctcaacctctcggagaaccaccagcagccccctcaggtgtgggatctaatacaatggcttcaggcggtggcgcaccaatggcagacaataacgagggtgccgatggagtgggtaattcctcaggaaattggcattgcgattccacatggctgggcgacagagtcatcaccaccagcaccagaacctgggccctgcccacttacaacaaccatctctacaagcaaatctccagccaatcaggagcttcaaacgacaaccactactttggctacagcaccccttgggggtattttgactttaacagattccactgccacttctcaccacgtgactggcagcgactcattaacaacaactggggattccggcccaagnnnctcaacttcaagctcttcaacatccaagttaaagaggtcacgcagaacgatggcacgacgactattgccaataaccttaccagcacggttcaagtgtttacggactcggagtatcagctcccgtacgtgctcgggtcggcgcaccaaggctgtctcccgccgtttccagcggacgtcttcatgatccctcagtatggatacctcaccctgaacaacggaagtcaagcggtgggacgctcatccttttactgcctggagtacttcccttcgcagatgctaaggactggaaataacttcnnnttcagctataccttcgaggatgtaccttttcacagcagctacgctcacagccagagtttggatcgcttgatgaatcctcttattgatcagtatctgtactacctgnnnagaacgcaaacaacctctggaacaacccaacaatcacggctgnnntttagccaggctgggccttcgtctatgnnncagcaggccnnnaattggctacctgggccctgctaccggcaacagagagtttcaaagactgctaacgacaacaacaacagtaactttgcttggacannngccaccaaatatcatctcaatggccgcgactcgctggtgaatccaggaccagctatggccagtcacaaggacgatgaagaaaaatttttccctatgcacggcnnnctaatatttggcaaacaagggacaggggcaagtaacgtagatttagataatgtaatgattacggatgaagaagagattcgtaccaccaatcctgtggcaacagagcagtatggaactgtggcaactaacttgcagagctcaaatacagctcccgcgactggaactgtcaatagtcagggggccttacctggcatggtgtggcaagatcgtgacgtgtaccttcaaggacctatctgggcaaagattcctcacacggatggacactttcatccttctcctctgatgggaggctttggactgaaacatccgcctcctcaaatcttgatcaaaaatactccggtaccggcaaatcctccgacgactttcagcccggccaagtttgcttcatttatcactcagtactccactggacaggtcagcgtggaaattgagtgggagctacagaaagaaaacagcaaacgttggaatccagagattcagtacacttccaactacaacaagtctgttaatgtggactttactgtagacactaatggtgtttatagtgaacctcgccctattggaacccggtatctcacacgaaacttg

SEQ ID NO: 1861 - protein, 736 aa, Artificial Sequence; identical to SEQ ID NO: 1569
  Description of Artificial Sequence: Synthetic polypeptide

SEQ ID NO: 1862 - protein, 736 aa, Artificial Sequence; identical to SEQ ID NO: 1570
  Description of Artificial Sequence: Synthetic polypeptide

SEQ ID NO: 1863 - protein, 736 aa, Artificial Sequence; identical to SEQ ID NO: 1571
  Description of Artificial Sequence: Synthetic polypeptide

SEQ ID NO: 1864 - protein, 736 aa, Artificial Sequence; identical to SEQ ID NO: 1572
  Description of Artificial Sequence: Synthetic polypeptide

SEQ ID NO: 1865 - protein, 736 aa, Artificial Sequence; identical to SEQ ID NO: 1573
  Description of Artificial Sequence: Synthetic polypeptide

SEQ ID NO: 1866 - protein, 736 aa, Artificial Sequence; identical to SEQ ID NO: 1574
  Description of Artificial Sequence: Synthetic polypeptide

SEQ ID NO: 1867 - protein, 736 aa, Artificial Sequence; identical to SEQ ID NO: 1575
  Description of Artificial Sequence: Synthetic polypeptide

SEQ ID NO: 1868 - protein, 736 aa, Artificial Sequence; identical to SEQ ID NO: 1576
  Description of Artificial Sequence: Synthetic polypeptide

SEQ ID NO: 1869 - DNA, 2211 bp, Artificial Sequence; identical to SEQ ID NO: 1577
  Description of Artificial Sequence: Synthetic polynucleotide

SEQ ID NO: 1870 - protein, 738 aa, Artificial Sequence; identical to SEQ ID NO: 7
  Description of Artificial Sequence: Synthetic polypeptide

SEQ ID NO: 1871 - protein, 738 aa, Artificial Sequence; identical to SEQ ID NO: 7
  Description of Artificial Sequence: Synthetic polypeptide

SEQ ID NO: 1872 - protein, 738 aa, Artificial Sequence
  Description of Artificial Sequence: Synthetic polypeptide
  misc_feature (157)..(157): Xaa can be any naturally occurring amino acid
  misc_feature (169)..(169): Xaa can be any naturally occurring amino acid
  misc_feature (457)..(457): Xaa can be any naturally occurring amino acid
  misc_feature (463)..(463): Xaa can be any naturally occurring amino acid
  misc_feature (508)..(508): Xaa can be any naturally occurring amino acid
  misc_feature (510)..(511): Xaa can be any naturally occurring amino acid
  misc_feature (558)..(558): Xaa can be any naturally occurring amino acid
  misc_feature (585)..(585): Xaa can be any naturally occurring amino acid
  misc_feature (587)..(587): Xaa can be any naturally occurring amino acid
MAADGYLPDWLEDNLSEGIREWWDLKPGAPKPKANQQKQDDGRGLVLPGYKYLGPFNGLDKGEPVNAADAAALEHDKAYDQQLKAGDNPYLRYNHADAEFQERLQEDTSFGGNLGRAVFQAKKRVLEPLGLVEEGAKTAPGKKRPVEQSPQEPDSSXLGIGKTGQQPAXKRLNFGQTGDSESVPDPQPLGEPPAAPSGVGSNTMASGGGAPMADNNEGADGVGNSSGNWHCDSTWLGDRVITTSTRTWALPTYNNHLYKQISNGTSGGSTNDNTYFGYSTPWGYFDFNRFHCHFSPRDWQRLINNNWGFRPKRLNFKLFNIQVKEVTTNEGTKTIANNLTSTVQVFTDSEYQLPYVLGSAHQGCLPPFPADVFMIPQYGYLTLNNGSQAVGRSSFYCLEYFPSQMLRTGNNFQFSYTFEDVPFHSSYAHSQSLDRLMNPLIDQYLYYLSRTQTTGTXGTQTLXFSQAGPSSMANQARNWVPGPCYRQQRVSTTTNQNNNSNFAWTGAXKXXLNGRDSLMNPGVAMASHKDDEDRFFPSSGVLIFGKQGAGNDNVDYSXVMITNEEEIKTTNPVATEEYGAVATNXQXLANTQAQTGLVHNQGVLPGMVWQNRDVYLQGPIWAKIPHTDGNFHPSPLMGGFGLKHPPPQILIKNTPVPADPPTTFNQAKLNSFITQYSTGQVSVEIEWELQKENSKRWNPEIQYTSNYYKSTNVDFAVNTEGVYSEPRPIGTRYLTRNL

SEQ ID NO: 1873 - DNA, 2211 bp, Artificial Sequence
  Description of Artificial Sequence: Synthetic polynucleotide
  misc_feature (469)..(471): n is a, c, g, or t
  misc_feature (502)..(504): n is a, c, g, or t
  misc_feature (1366)..(1368): n is a, c, g, or t
  misc_feature (1384)..(1386): n is a, c, g, or t
  misc_feature (1519)..(1521): n is a, c, g, or t
  misc_feature (1525)..(1530): n is a, c, g, or t
  misc_feature (1669)..(1671): n is a, c, g, or t
  misc_feature (1750)..(1752): n is a, c, g, or t
  misc_feature (1756)..(1758): n is a, c, g, or t
atggctgccgatggttatcttccagattggctcgaggacaacctctctgagggcattcgcgagtggtgggacttgaaacctggagccccgaaacccaaagccaaccagcaaaagcaggacgacggccggggtctggtgcttcctggctacaagtacctcggacccttcaacggactcgacaagggggagcccgtcaacgcggcggacgcagcggccctcgagcacgacaaagcctacgaccagcagctcaaagcgggtgacaatccgtacctgcggtataatcacgccgacgccgagtttcaggagcgtctgcaagaagatacgtcttttgggggcaacctcgggcgagcagtcttccaggccaagaagcgggttctcgaacctctcggtctggttgaggaaggcgctaagacggctcctggaaagaagaggccggtagagcagtcgccacaagagccagactcctccnnnggcatcggcaagacaggccagcagcccgctnnnaagagactcaattttggtcagactggcgactcagagtcagtccccgacccacaacctctcggagaacctccagcagccccctcaggtgtgggatctaatacaatggcttcaggcggtggcgctccaatggcagacaataacgaaggcgccgacggagtgggtaattcctcgggaaattggcattgcgattccacatggctgggggacagagtcatcaccaccagcacccgaacctgggccctgcccacctacaacaaccacctctacaagcaaatctccaacggcacctcgggaggaagcaccaacgacaacacctattttggctacagcaccccctgggggtattttgacttcaacagattccactgtcacttttcaccacgtgactggcaacgactcatcaacaacaattggggattccggcccaaaagactcaacttcaagctgttcaacatccaggtcaaggaagtcacgacgaacgaaggcaccaagaccatcgccaataatctcaccagcaccgtgcaggtctttacggactcggagtaccagttaccgtacgtgctaggatccgctcaccagggatgtctgcctccgttcccggcggacgtcttcatgattcctcagtacggctatttaactttaaacaatggaagccaagccgtgggacgttcctccttctactgtctggagtatttcccatcgcagatgctgagaaccggcaacaactttcagttcagctacaccttcgaggacgtgcctttccacagcagctacgcgcacagccagagcctggacaggctgatgaatcccctcatcgaccagtacctgtactacctgtccagaacgcaaacgactggaactnnngggacgcagactctgnnnttcagccaagcgggtcctagctcaatggccaaccaggctagaaattgggtgcccggaccttgctaccggcagcagcgcgtctccacgacaaccaaccagaacaacaacagcaactttgcctggacgggagctnnnaagnnnnnnctgaacggccgagactctctaatgaatccgggcgtggcaatggcttcccacaaggatgacgaggaccgcttcttcccttcgagcggggtcctgatttttggcaagcaaggagccgggaacgataatgtggattacagcnnngtgatgattacaaatgaggaagaaatcaagactaccaaccccgtggccacagaagaatatggagcagtggccaccaacnnncagnnngccaatacgcaggcgcagaccggactcgtgcacaaccagggggtgcttcccggcatggtgtggcagaatagagacgtgtacctgcagggtcccatctgggccaaaattcctcacacggacggcaactttcacccgtctcccctgatgggcggctttggactgaagcacccgcctcctcaaattctcatcaagaacacaccggttccagcggacccgccgactaccttcaaccaggccaagctgaactctttcatcacgcagtacagcaccggacaggtcagcgtggaaatcgagtgggagctgcagaaagaaaacagcaaacgctggaatccagagattcaatacacttccaactactacaaatctacaaatgtggactttgctgtcaacacggagggggtttatagcgagcctcgccccattggcacccgttacctcacccgcaacctgtaa

SEQ ID NO: 1874 - protein, 733 aa, Artificial Sequence; identical to SEQ ID NO: 423
  Description of Artificial Sequence: Synthetic polypeptide

SEQ ID NO: 1875 - DNA, 4472 bp, Artificial Sequence
  Description of Artificial Sequence: Synthetic polynucleotide
ctccatcactaggggtaaccgcgaagcgcctcccacgctgccgcgtcagcgctgacgtaaattacgtcataggggagtggtcctgtattagctgtcacgtgagtgcttttgcgacattttgcgacaccacgtggccattcatggtatatatggccgagtgagcgagcaggatctccattttgaccgcgaaatttgaacgagcagcagccatgccgggcttctacgagatcgtgcttaaggtgccgagcgacctggacgagcacctgccgggcatttctgactcgtttgtgaactgggtggcagagaaggaatgggagctgcccccggattctgacatggatcggaatctgattgagcaggcacccctgaccgtggccgagaagctacagcgcgacttcctggtccaatggcgccgcgtgagtaaggccccggaggccctcttctttgttcagttcgagaagggcgagtcctacttccacctccatattctggtagagaccacgggggtcaaatccatggtgctgggccgcttcctgagtcagattcgggacaagctggtgcagaccatctaccgcgggatcgagccgaccctgcccaactggttcgcggtgacaaagacgcgtaatggcgccggaggggggaacaaggtggtggacgagtgctacatccccaactacctgctgcccaagactcagcccgagctgcagtgggcgtggactaacatggaggagtatataagcgcgtgcttgaacctggccgagcgcaaacggctcgtggcgcagcacctgacccacgtcagccagacccaggagcagaacaaggagaatctgaacccgaattctgacgcgcctgtcatccggtcaaaaacctccgcgcgctacatggagctggtcgggtggctggtggaccggggcatcacctccgagaagcagtggatccaggaggaccaggcctcgtacatctccttcaacgccgcctccaactcgcggtctcagatcaaggccgcgctggacaatgccggcaagatcatggcgctgaccaaatccgcgcccgactacctggtaggccccgctctgcccgcggacattaaatccaaccgcatctaccgcatcctggagctgaatggctacgaccctgcctacgccggttccgtctttctcggctgggcccagaaaaagtttggcaaaaggaacaccatctggctgtttgggccggccaccacgggcaagaccaacatcgcggaagccatcgcccacgccgtgcccttctacggctgcgtcaactggaccaatgagaactttcccttcaacgattgcgtcgacaagatggtgatctggtgggaggagggcaagatgacggccaaggtcgtggagtccgccaaggccattctcggcggcagcaaggtgcgcgtggaccaaaagtgcaagtcgtccgcccagatcgatcccacccccgtgatcgtcacctccaacaccaacatgtgcgccgtgattgacgggaacagcaccaccttcgagcaccagcagccgttgcaggaccggatgttcaaatttgaacttacccgccgtctggagcacgactttggcaaggtgacaaagcaggaagtcaaagagttcttccgctgggcgcaggatcacgtgaccgaggtggcgcatgagttctacgtcagaaagggtggagctaacaaaagacccgcccccgatgacgcggatataagcgagcccaagcgggcctgcccctcagtcgcggatccatcgacgtcagacgcggaaggagctccggtggactttgccgacaggtaccaaaacaaatgttctcgtcacgcgggcatgcttcagatgctgtttccctgcaaaacatgcgagagaatgaatcagaatttcaacatttgcttcacgcacgggaccagagactgttcagaatgtttccctggcgtgtcagaatctcaaccggtcgtcagaaaaaagacgtatcggaaactctgtgcgattcatcatctgctggggcgggcacccgagattgcttgctcggcctgcgacctggtcaacgtggacctggatgactgtgtttctgagcaataaatgacttaaaccaggtatggctgccgatggttatcttccagattggctcgaggacaacctctctgagggcattcgcgagtggtgggacctgaaacctggagccccgaaacccaaagccaaccagcaaaagcaggacaacggccggggtctggtgcttcctggctacaagtacctcggacccttcaacggactcgacaagggggagcccgtcaacgcggcggacgcagcggccctcgagcacgacaaggcctacgaccagcagctccaagcgggtgacaatccgtacctgcggtataatcacgccgacgccgagtttcaggagcgtctgcaagaagatacgtcttttgggggcaacctcgggcgcgcagtcttccaggccaaaaagcgggttctcgaacctctgggcctggttgaatcgccggttaagacggctcctggaaagaagagaccggtagagccatcaccccagcgctctccagactcctctacgggcatcggcaagaaaggccagcagcccgcaaaaaagagactcaattttgggcagactggcgactcagagtcagtccccgaccctcaaccaatcggagaaccaccagcaggcccctctggtctgggatctggtacaatggctgcaggcggtggcgctccaatggcagacaataacgaaggcgccgacggagtgggtagttcctcaggaaattggcattgcgattccacatggctgggcgacagagtcatcaccaccagcacccgcacctgggccctgcccacctacaacaaccacctctacaagcaaatctccaacgggacctcgggaggaagcaccaacgacaacacctacttcggctacagcaccccctgggggtattttgacttcaacagattccactgccacttttcaccacgtgactggcagcgactcatcaacaacaactggggattccggcccaagaggctcaacttcaagctcttcaacatccaagtcaaggaggtcacgcagaatgaaggcaccaagaccatcgccaataaccttaccagcacgattcaggtctttacggactcggaataccagctcccgtacgtgctcggctcggcgcaccagggctgcctgcctccgttcccggcggacgtcttcatgattcctcagtacgggtacctgactctgaacaatggcagtcaggctgtgggccggtcgtccttctactgcctggagtactttccttctcaaatgctgagaacgggcaacaactttgaattcagctacaacttcgaggacgtgcccttccacagcagctacgcgcacagccagagcctggaccggctgatgaaccctctcatcgaccagtacttgtactacctgtcccggactcaaagcacgggcggtactgcaggaactcagcagttgctattttctcaggccgggcctaacaacatgtcggctcaggccaagaactggctacccggtccctgctaccggcagcaacgcgtctccacgacactgtcgcagaacaacaacagcaactttgcctggacgggtgccaccaagtatcatctgaatggcagagactctctggtgaatcctggcgttgccatggctacccacaaggacgacgaagagcgattttttccatccagcggagtcttaatgtttgggaaacagggagctggaaaagacaacgtggactatagcagcgtgatgctaaccagcgaggaagaaataaagaccaccaacccagtggccacagaacagtacggcgtggtggccgataacctgcaacagcaaaacgccgctcctattgtaggggccgtcaatagtcaaggagccttacctggcatggtgtggcagaaccgggacgtgtacctgcagggtcccatctgggccaagattcctcatacggacggcaactttcatccctcgccgctgatgggaggctttggactgaagcatccgcctcctcagatcctgattaaaaacacacctgttcccgcggatcctccgaccaccttcactaaggccaagctggcttctttcatcacgcagtacagtaccggccaggtcagcgtggagatcgagtgggagctgcagaaggagaacagcaaacgctggaacccagagattcagtacacttccaactactacaaatctacaaatgtggactttgctgtcaatactgagggtacttattccgagcctcgccccattggcacccgttacctcacccgtaatctgtaattacatgttaatcaataaaccggttaattcgtttcagttgaactttggtctcctgtccttcttatcttatcggttaccatagaaactggttacttattaactgcttggtgcgcttcgcgataaaagacttacgtcatcgggttacccctagtgatgga

SEQ ID NO: 1876 - DNA, 2208 bp, Artificial Sequence
  Description of Artificial Sequence: Synthetic polynucleotide
atggctgccgatggttatcttccagattggctcgaggacactctctctgaaggaataagacagtggtggaagctcaaacctggcccaccaccaccaaagcccgcagagcggcataaggacgacagcaggggtcttgtgcttcctgggtacaagtacctcggacccttcaacggactcgacaagggagagccggtcaacgaggcagacgccgcggccctcgagcacgacaaagcctacgaccggcagctcgacagcggagacaacccgtacctcaagtacaaccacgccgacgcggagtttcaggagcgccttaaagaagatacgtcttttgggggcaacctcggacgagcagtcttccaggcgaaaaagagggttcttgaacctctgggcctggttgaggaacctgttaagaaggctccgggaaaaaagaggccggtagagcactctcctgtggagccagactcctcctcgggaaccggaaaggcgggccagcagcctgcaagaaaaagattgaattttggtcagactggagacgcagactcagtacctgacccccagcctctcggacagccaccagcagccccctctggtctgggaactaataccatggctacaggcagtggcgcaccaatggcagacaataacgagggtgccgacggagtgggtaattcctcgggaaattggcattgcgattccacatggatgggcgacagagtcatcaccaccagcacccgaacctgggccctgcccacctacaacaaccacctctacaaacaaatttccagccaatcaggagcctcgaacgacaatcactactttggctacagcaccccttgggggtattttgacttcaacagattccactgccacttttcaccacgtgactggcaaagactcatcaacaacaactggggattccgacccaagagactcaacttcaagctctttaacattcaagtcaaagaggtcacgcagaatgacggtacgacgacgattgccaataaccttaccagcacggttcaggtgtttactgactcggagtaccagctcccgtacgtcctcggctcggcgcatcaaggatgcctcccgccgttcccagcagacgtcttcatggtgccacagtatggatacctcaccctgaacaacgggagtcaggcagtaggacgctcttcattttactgcctggagtactttccttctcagatgctgcgtaccggaaacaactttaccttcagctacacttttgaggacgttcctttccacagcagctacgctcacagccagagtctggaccgtctcatgaatcctctcatcgaccagtacctgtattacttgagcagaacaaacactccaagtggaaccaccacgcagtcaaggcttcagttttctcaggccggagcgagtgacattcgggaccagtctaggaactggcttcctggaccctgttaccgccagcagcgagtatcaaagacatctgcggataacaacaacagtgaatactcgtggactggagctaccaagtaccacctcaatggcagagactctctggtgaatccgggcccggctatggcaagccacaaggacgatgaagaaaagttttttcctcagagcggggttctcatctttgggaagcaaggctcagagaaaacaaatgtggacattgaaaaggtcatgattacagacgaagaggaaatcaggacaaccaatcccgtggctacggagcagtatggttctgtatctaccaacctccagagaggcaacagacaagcagctaccgcagatgtcaacacacaaggcgttcttccaggcatggtctggcaggacagagatgtgtaccttcaggggcccatctgggcaaagattccacacacggacggacattttcacccctctcccctcatgggtggattcggacttaaacaccctcctccacagattctcatcaagaacaccccggtgcctgcgaatccttcgaccaccttcagtgcggcaaagtttgcttccttcatcacacagtactccacgggacaggtcagcgtggagatcgagtgggagctgcagaaggaaaacagcaaacgctggaatcccgaaattcagtacacttccaactacaacaagtctgttaatgtggactttactgtggacactaatggcgtgtattcagagcctcgccccattggcaccagatacctgactcgtaatctgtaa

SEQ ID NO: 1877 - protein, 735 aa, Artificial Sequence
  Description of Artificial Sequence: Synthetic polypeptide
MAADGYLPDWLEDTLSEGIRQWWKLKPGPPPPKPAERHKDDSRGLVLPGYKYLGPFNGLDKGEPVNEADAAALEHDKAYDRQLDSGDNPYLKYNHADAEFQERLKEDTSFGGNLGRAVFQAKKRVLEPLGLVEEPVKKAPGKKRPVEHSPVEPDSSSGTGKAGQQPARKRLNFGQTGDADSVPDPQPLGQPPAAPSGLGTNTMATGSGAPMADNNEGADGVGNSSGNWHCDSTWMGDRVITTSTRTWALPTYNNHLYKQISSQSGASNDNHYFGYSTPWGYFDFNRFHCHFSPRDWQRLINNNWGFRPKRLNFKLFNIQVKEVTQNDGTTTIANNLTSTVQVFTDSEYQLPYVLGSAHQGCLPPFPADVFMVPQYGYLTLNNGSQAVGRSSFYCLEYFPSQMLRTGNNFTFSYTFEDVPFHSSYAHSQSLDRLMNPLIDQYLYYLSRTNTPSGTTTQSRLQFSQAGASDIRDQSRNWLPGPCYRQQRVSKTSADNNNSEYSWTGATKYHLNGRDSLVNPGPAMASHKDDEEKFFPQSGVLIFGKQGSEKTNVDIEKVMITDEEEIRTTNPVATEQYGSVSTNLQRGNRQAATADVNTQGVLPGMVWQDRDVYLQGPIWAKIPHTDGHFHPSPLMGGFGLKHPPPQILIKNTPVPANPSTTFSAAKFASFITQYSTGQVSVEIEWELQKENSKRWNPEIQYTSNYNKSVNVDFTVDTNGVYSEPRPIGTRYLTRNL

SEQ ID NO: 1878 - DNA, 8376 bp, Artificial Sequence
  Description of Artificial Sequence: Synthetic polynucleotide
aattcccatcatcaataatataccttattttggattgaagccaatatgataatgagggggtggagtttgtgacgtggcgcggggcgtgggaacggggcgggtgacgtagtagtctctagagtcctgtattagaggtcacgtgagtgttttgcgacattttgcgacaccatgtggtcacgctgggtatttaagcccgagtgagcacgcagggtctccattttgaagcgggaggtttgaacgcgcagccaccacgccggggttttacgagattgtgattaaggtccccagcgaccttgacgggcatctgcccggcatttctgacagctttgtgaactgggtggccgagaaggaatgggagttgccgccagattctgacatggatctgaatctgattgagcaggcacccctgaccgtggccgagaagctgcagcgcgactttctgacggaatggcgccgtgtgagtaaggccccggaggcccttttctttgtgcaatttgagaagggagagagctacttccacatgcacgtgctcgtggaaaccaccggggtgaaatccatggttttgggacgtttcctgagtcagattcgcgaaaaactgattcagagaatttaccgcgggatcgagccgactttgccaaactggttcgcggtcacaaagaccagaaatggcgccggaggcgggaacaaggtggtggatgagtgctacatccccaattacttgctccccaaaacccagcctgagctccagtgggcgtggactaatatggaacagtatttaagcgcctgtttgaatctcacggagcgtaaacggttggtggcgcagcatctgacgcacgtgtcgcagacgcaggagcagaacaaagagaatcagaatcccaattctgatgcgccggtgatcagatcaaaaacttcagccaggtacatggagctggtcgggtggctcgtggacaaggggattacctcggagaagcagtggatccaggaggaccaggcctcatacatctccttcaatgcggcctccaactcgcggtcccaaatcaaggctgccttggacaatgcgggaaagattatgagcctgactaaaaccgcccccgactacctggtgggccagcagcccgtggaggacatttccagcaatcggatttataaaattttggaactaaacgggtacgatccccaatatgcggcttccgtctttctgggatgggccacgaaaaagttcggcaagaggaacaccatctggctgtttgggcctgcaactaccgggaagaccaacatcgcggaggccatagcccacactgtgcccttctacgggtgcgtaaactggaccaatgagaactttcccttcaacgactgtgtcgacaagatggtgatctggtgggaggaggggaagatgaccgccaaggtcgtggagtcggccaaagccattctcggaggaagcaaggtgcgcgtggaccagaaatgcaagtcctcggcccagatagacccgactcccgtgatcgtcacctccaacaccaacatgtgcgccgtgattgacgggaactcaacgaccttcgaacaccagcagccgttgcaagaccggatgttcaaatttgaactcacccgccgtctggatcatgactttgggaaggtcaccaagcaggaagtcaaagactttttccggtgggcaaaggatcacgtggttgaggtggagcatgaattctacgtcaaaaagggtggagccaagaaaagacccgcccccagtgacgcagatataagtgagcccaaacgggtgcgcgagtcagttgcgcagccatcgacgtcagacgcggaagcttcgatcaactacgcagacaggtaccaaaacaaatgttctcgtcacgtgggcatgaatctgatgctgtttccctgcagacaatgcgagagaatgaatcagaattcaaatatctgcttcactcacggacagaaagactgtttagagtgctttcccgtgtcagaatctcaacccgtttctgtcgtcaaaaaggcgtatcagaaactgtgctacattcatcatatcatgggaaaggtgccagacgcttgcactgcctgcgatctggtcaatgtggatttggatgactgcatctttgaacaataaatgatttaaatcaggtatggctgccgatggttatcttccagattggctcgaggacactctctctgaaggaataagacagtggtggaagctcaaacctggcccaccaccaccaaagcccgcagagcggcataaggacgacagcaggggtcttgtgcttcctgggtacaagtacctcggacccttcaacggactcgacaagggagagccggtcaacgaggcagacgccgcggccctcgagcacgacaaagcctacgaccggcagctcgacagcggagacaacccgtacctcaagtacaaccacgccgacgcggagtttcaggagcgccttaaagaagatacgtcttttgggggcaacctcggacgagcagtcttccaggcgaaaaagagggttcttgaacctctgggcctggttgaggaacctgttaagacggctccgggaaaaaagaggccggtagagcactctcctgtggagccagactcctcctcgggaaccggaaaggcgggccagcagcctgcaagaaaaagattgaattttggtcagactggagacgcagactcagtacctgacccccagcctctcggacagccaccagcagccccctctggtctgggaactaatacgatggctacaggcagtggcgcaccaatggcagacaataacgagggcgccgacggagtgggtaattcctcgggaaattggcattgcgattccacatggatgggcgacagagtcatcaccaccagcacccgaacctgggccctgcccacctacaacaaccacctctacaaacaaatttccagccaatcaggagcctcgaacgacaatcactactttggctacagcaccccttgggggtattttgacttcaacagattccactgccacttttcaccacgtgactggcaaagactcatcaacaacaactggggattccgacccaagagactcaacttcaagctctttaacattcaagtcaaagaggtcacgcagaatgacggtacgacgacgattgccaataaccttaccagcacggttcaggtgtttactgactcggagtaccagctcccgtacgtcctcggctcggcgcatcaaggatgcctcccgccgttcccagcagacgtcttcatggtgccacagtatggatacctcaccctgaacaacgggagtcaggcagtaggacgctcttcattttactgcctggagtactttccttctcagatgctgcgtaccggaaacaactttaccttcagctacacttttgaggacgttcctttccacagcagctacgctcacagccagagtctggaccgtctcatgaatcctctcatcgaccagtacctgtattacttgagcagaacaaacactccaagtggaaccaccacgcagtcaaggcttcagttttctcaggccggagcgagtgacattcgggaccagtctaggaactggcttcctggaccctgttaccgccagcagcgagtatcaaagacatctgcggataacaacaacagtgaatactcgtggactggagctaccaagtaccacctcaatggcagagactctctggtgaatccgggcccggccatggcaagccacaaggacgatgaagaaaagttttttcctcagagcggggttctcatctttgggaagcaaggctcagagaaaacaaatgtggacattgaaaaggtcatgattacagacgaagaggaaatcaggacaaccaatcccgtggctacggagcagtatggttctgtatctaccaacctccagagaggcaacagacaagcagctaccgcagatgtcaacacacaaggcgttcttccaggcatggtctggcaggacagagatgtgtaccttcaggggcccatctgggcaaagattccacacacggacggacattttcacccctctcccctcatgggtggattcggacttaaacaccctcctccacagattctcatcaagaacaccccggtacctgcgaatccttcgaccaccttcagtgcggcaaagtttgcttccttcatcacacagtactccacgggacaggtcagcgtggagatcgagtgggagctgcagaaggaaaacagcaaacgctggaatcccgaaattcagtacacttccaactacaacaagtctgttaatgtggactttactgtggacactaatggcgtgtattcagagcctcgccccattggcaccagatacctgactcgtaatctgtaattgcttgttaatcaataaaccgtttaattcgtttcagttgaactttggtctctgcgtatttctttcttatctagtttccatgctctagagtcctgtattagaggtcacgtgagtgttttgcgacattttgcgacaccatgtggtcacgctgggtatttaagcccgagtgagcacgcagggtctccattttgaagcgggaggtttgaacgcgcagccaccacggcggggttttacgagattgtgattaaggtccccagcgaccttgacgggcatctgcccggcatttctgacagctttgtgaactgggtggccgagaaggaatgggagttgccgccagattctgacatggatctgaatctgattgagcaggcacccctgaccgtggccgagaagctgcatcgctggcgtaatagcgaagaggcccgcaccgatcgcccttcccaacagttgcgcagcctgaatggcgaatggaattccagacgattgagcgtcaaaatgtaggtatttccatgagcgtttttcctgttgcaatggctggcggtaatattgttctggatattaccagcaaggccgatagtttgagttcttctactcaggcaagtgatgttattactaatcaaagaagtattgcgacaacggttaatttgcgtgatggacagactcttttactcggtggcctcactgattataaaaacacttctcaggattctggcgtaccgttcctgtctaaaatccctttaatcggcctcctgtttagctcccgctctgattctaacgaggaaagcacgttatacgtgctcgtcaaagcaaccatagtacgcgccctgtagcggcgcattaagcgcggcgggtgtggtggttacgcgcagcgtgaccgctacacttgccagcgccctagcgcccgctcctttcgctttcttcccttcctttctcgccacgttcgccggctttccccgtcaagctctaaatcgggggctccctttagggttccgatttagtgctttacggcacctcgaccccaaaaaacttgattagggtgatggttcacgtagtgggccatcgccctgatagacggtttttcgccctttgacgttggagtccacgttctttaatagtggactcttgttccaaactggaacaacactcaaccctatctcggtctattcttttgatttataagggattttgccgatttcggcctattggttaaaaaatgagctgatttaacaaaaatttaacgcgaattttaacaaaatattaacgtttacaatttaaatatttgcttatacaatcttcctgtttttggggcttttctgattatcaaccggggtacatatgattgacatgctagttttacgattaccgttcatcgattctcttgtttgctccagactctcaggcaatgacctgatagcctttgtagagacctctcaaaaatagctaccctctccggcatgaatttatcagctagaacggttgaatatcatattgatggtgatttgactgtctccggcctttctcacccgtttgaatctttacctacacattactcaggcattgcatttaaaatatatgagggttctaaaaatttttatccttgcgttgaaataaaggcttctcccgcaaaagtattacagggtcataatgtttttggtacaaccgatttagctttatgctctgaggctttattgcttaattttgctaattctttgccttgcctgtatgatttattggatgttggaattcctgatgcggtattttctccttacgcatctgtgcggtatttcacaccgcatatggtgcactctcagtacaatctgctctgatgccgcatagttaagccagccccgacacccgccaacacccgctgacgcgccctgacgggcttgtctgctcccggcatccgcttacagacaagctgtgaccgtctccgggagctgcatgtgtcagaggttttcaccgtcatcaccgaaacgcgcgagacgaaagggcctcgtgatacgcctatttttataggttaatgtcatgataataatggtttcttagacgtcaggtggcacttttcggggaaatgtgcgcggaacccctatttgtttatttttctaaatacattcaaatatgtatccgctcatgagacaataaccctgataaatgcttcaataatattgaaaaaggaagagtatgagtattcaacatttccgtgtcgcccttattcccttttttgcggcattttgccttcctgtttttgctcacccagaaacgctggtgaaagtaaaagatgctgaagatcagttgggtgcacgagtgggttacatcgaactggatctcaacagcggtaagatccttgagagttttcgccccgaagaacgttttccaatgatgagcacttttaaagttctgctatgtggcgcggtattatcccgtattgacgccgggcaagagcaactcggtcgccgcatacactattctcagaatgacttggttgagtactcaccagtcacagaaaagcatcttacggatggcatgacagtaagagaattatgcagtgctgccataaccatgagtgataacactgcggccaacttacttctgacaacgatcggaggaccgaaggagctaaccgcttttttgcacaacatgggggatcatgtaactcgccttgatcgttgggaaccggagctgaatgaagccataccaaacgacgagcgtgacaccacgatgcctgtagcaatggcaacaacgttgcgcaaactattaactggcgaactacttactctagcttcccggcaacaattaatagactggatggaggcggataaagttgcaggaccacttctgcgctcggcccttccggctggctggtttattgctgataaatctggagccggtgagcgtgggtctcgcggtatcattgcagcactggggccagatggtaagccctcccgtatcgtagttatctacacgacggggagtcaggcaactatggatgaacgaaatagacagatcgctgagataggtgcctcactgattaagcattggtaactgtcagaccaagtttactcatatatactttagattgatttaaaacttcatttttaatttaaaaggatctaggtgaagatcctttttgataatctcatgaccaaaatcccttaacgtgagttttcgttccactgagcgtcagaccccgtagaaaagatcaaaggatcttcttgagatcctttttttctgcgcgtaatctgctgcttgcaaacaaaaaaaccaccgctaccagcggtggtttgtttgccggatcaagagctaccaactctttttccgaaggtaactggcttcagcagagcgcagataccaaatactgtccttctagtgtagccgtagttaggccaccacttcaagaactctgtagcaccgcctacatacctcgctctgctaatcctgttaccagtggctgctgccagtggcgataagtcgtgtcttaccgggttggactcaagacgatagttaccggataaggcgcagcggtcgggctgaacggggggttcgtgcacacagcccagcttggagcgaacgacctacaccgaactgagatacctacagcgtgagctatgagaaagcgccacgcttcccgaagggagaaaggcggacaggtatccggtaagcggcagggtcggaacaggagagcgcacgagggagcttccagggggaaacgcctggtatctttatagtcctgtcgggtttcgccacctctgacttgagcgtcgatttttgtgatgctcgtcaggggggcggagcctatggaaaaacgccagcaacgcggcctttttacggttcctggccttttgctggccttttgctcacatgttctttcctgcgttatcccctgattctgtggataaccgtattaccgcctttgagtgagctgataccgctcgccgcagccgaacgaccgagcgcagcgagtcagtgagcgaggaagcggaagagcgcccaatacgcaaaccgcctctccccgcgcgttggccgattcattaatgca

SEQ ID NO: 1879 - DNA, 1085 bp, Artificial Sequence
  Description of Artificial Sequence: Synthetic polynucleotide
  misc_feature (611)..(611): n is a, c, g, or t
  misc_feature (640)..(640): n is a, c, g, or t
  misc_feature (1039)..(1039): n is a, c, g, or t
tgcccacttacaacaaccatctctacaagcaaatctccagcvvmdcaggagctascaacgacaaccactactttggctacagcaccccttgggggtattttgactttaacagattccactgccacttctcaccacgtgactggcagcgactcattaacaacaactggggattccggcccaagaaactcagcttcaagctcttcaacatccaagttagaggggtcacgcagaacgatggcacgacgactattgccaataaccttaccagcacggttcaagtgtttacggactcggagtatcagctcccgtacgtgctcgggtcggcgcaccaaggctgtctcccgccgtttccagcggacgtcttcatggtccctcagtatggatacctcaccctgaacaacggaagtcaagcggtgggacgctcatccttttactgcctggagtacttcccttcgcagatgctaaggactggaaataacttccaattcagctataccttcgaggatgtaccttttcacagcagctacgctcacagccagagtttggatcgcttgatgaatcctcttattgatcagtatctgtactacctgaacagaacgcaargcamcvcnrgcggaacarccrvcmhsmrsvvsctgvngtttagccaggctgggcctcagtctatgtctttgcaggccagaaattggctacctgggccctgctaccggcaacagagactttcaamarycbmcrvcsrsaacaacaacagtrastttccttggmcagcggccagcamatatcatctcaatggccgcgactcgctggtgaatccaggaccagctatggccagtcacrrggacgatrmsgrsaratttttccctatgcacggcaatctaatatttggcaaasaarrcrscrvsrvarvcratrycgmsdwcgrsvrsgtaatgattacggatgaagaagagattcgtaccaccaatcctgtggcaacagagcagtatggaactgtggcaaataacttgcagrvsvvsmrsrvcvvscccacgdhtvvsrnsgtcvmscatcagggggccttacctggcatggtgtggcaagatcgt

SEQ ID NO: 1880 - protein, 620 aa, Artificial Sequence
  Description of Artificial Sequence: Synthetic polypeptide
  misc_feature (263)..(264): Xaa can be any naturally occurring amino acid
  misc_feature (267)..(267): Xaa can be any naturally occurring amino acid
  misc_feature (450)..(453): Xaa can be any naturally occurring amino acid
  misc_feature (456)..(460): Xaa can be any naturally occurring amino acid
  misc_feature (462)..(462): Xaa can be any naturally occurring amino acid
  misc_feature (491)..(495): Xaa can be any naturally occurring amino acid
  misc_feature (500)..(500): Xaa can be any naturally occurring amino acid
  misc_feature (504)..(504): Xaa can be any naturally occurring amino acid
  misc_feature (508)..(508): Xaa can be any naturally occurring amino acid
  misc_feature (528)..(528): Xaa can be any naturally occurring amino acid
  misc_feature (531)..(533): Xaa can be any naturally occurring amino acid
  misc_feature (546)..(557): Xaa can be any naturally occurring amino acid
  misc_feature (586)..(590): Xaa can be any naturally occurring amino acid
  misc_feature (593)..(595): Xaa can be any naturally occurring amino acid
  misc_feature (597)..(597): Xaa can be any naturally occurring amino acid
MAADGYLPDWLEDNLSEGIREWWALKPGVPQPKANQQHQDNRRGLVLPGYKYLGPGNGLDKGEPVNEADAAALEHDKAYDQQLKAGDNPYLKYNHADAEFQERLQEDTSFGGNLGRAVFQAKKRILEPLGLVEEAAKTAPGKKGAVDQSPQEPDSSSGVGKSGKQPARKRLNFGQTGDSESVPDPQPLGEPPAAPTSLGSNTMASGGGAPMADNNEGADGVGNSSGNWHCDSQWLGDRVITTSTRTWALPTYNNHLYKQISSXXGAXNDNHYFGYSTPWGYFDFNRFHCHFSPRDWQRLINNNWGFRPKKLSFKLFNIQVRGVTQNDGTTTIANNLTSTVQVFTDSEYQLPYVLGSAHQGCLPPFPADVFMVPQYGYLTLNNGSQAVGRSSFYCLEYFPSQMLRTGNNFQFSYTFEDVPFHSSYAHSQSLDRLMNPLIDQYLYYLNRTQXXXXGTXXXXXLXFSQAGPQSMSLQARNWLPGPCYRQQRLSXXXXXNNNSXFPWXAASXYHLNGRDSLVNPGPAMASHXDDXXXFFPMHGNLIFGKXXXXXXXXXXXXVMITDEEEIRTTNPVATEQYGTVANNLQXXXXXPTXXXVXHQGALPGMVWQDRDVYLQGPIWA

SEQ ID NO: 1881 - DNA, 1491 bp, Artificial Sequence
  Description of Artificial Sequence: Synthetic polynucleotide
accaccagcaccagaacctgggccctgcccacttacaacaaccatctctacaagcaaatctccagccaatcaggagcttcaaacgacaaccactactttggctacagcaccccttgggggtattttgactttaacagattccactgccacttctcaccacgtgactggcagcgactcattaacaacaactggggattccggcccaagaaactcagcttcaagctcttcaacatccaagttagaggggtcacgcagaacgatggcacgacgactattgccaataaccttaccagcacggttcaagtgtttacggactcggagtatcagctcccgtacgtgctcgggtcggcgcaccaaggctgtctcccgccgtttccagcggacgtcttcatggtccctcagtatggatacctcaccctgaacaacggaagtcaagcggtgggacgctcatccttttactgcctggagtacttcccttcgcagatgctaaggactggaaataacttccaattcagctataccttcgaggatgtaccttttcacagcagctacgctcacagccagagtttggatcgcttgatgaatcctcttattgatcagtatctgtactacctgaacagaacgcaaggaacaacctctggaacaaccaaccaatcacggctgctttttagccaggctgggcctcagtctatgtctttgcaggccagaaattggctacctgggccctgctaccggcaacagagactttcaaagactgctaacgacaacaacaacagtaactttccttggacagcggccagcaaatatcatctcaatggccgcgactcgctggtgaatccaggaccagctatggccagtcacaaggacgatgaagaaaaatttttccctatgcacggcaatctaatatttggcaaagaagggacaacggcaagtaacgcagaattagataatgtaatgattacggatgaagaagagattcgtaccaccaatcctgtggcaacagagcagtatggaactgtggcaaataacttgcagagctcaaatacagctcccacgactggaactgtcaatcatcagggggccttacctggcatggtgtggcaagatcgtgacgtctaccttcaaggacctatctgggcaaagattcctcacacggatggacactttcatccttctcctctgatgggaggctttggactgaaacatccgcctcctcaaatcatgatcaaaaatactccggtaccggcaaatcctccgacgactttcagcccggccaagtttgcttcatttatcactcagtactccactggacaggtcagcgtggaaattgagtgggagctacagaaagaaaacagcaaacgttggaatccagagattcagtacacttccaactacaacaagtctgttaatgtggactttactgtagacactaatggtgtttatagtgaacctcgccctattggaacccggtatctcacacgaaacttgtga

SEQ ID NO: 1882 - protein, 482 aa, Artificial Sequence
  Description of Artificial Sequence: Synthetic polypeptide
TTSTRTWALPTYNNHLYKQISSQSGASNDNHYFGYSTPWYFDFNRFHCHFSPRDWQRLNNNWGFRPKKLSFKLFNIQRGVTQNDGTTTIANNLTSTQVFTDSEYQLPYVLGSAHQCLPPFPADVFMVPQYGYLTNNGSQAVGRSSFYCLEYFPQMLRTGNNFQFSYTFEDVPHSSYAHSQSLDRLMNPLIDYLYYLNRTQGTTSGTTNQSLLFSQAGPQSMSLQARNWLGPCYRQQRLSKTANDNNNSFPWTAASKYHLNGRDSLVNGPAMASHKDDEEKFFPMHGLIFGKEGTTASNAELDNVMITDEEEIRTTNPVATEQYGTVANNLQSSNTAPTTGTVNHQGALPGMVWQDRDVYLQGPIWAKIPHTDGHFHPSPLMGGFGLKHPPPQIMIKNTPVPANPPTTFSPAKFASFITQYSTGQVSVEIEWELQKENSKRWNPEIQYTSNYNKSVNVDFTVDTNGVYSEPRPIGTRYLTRNL

SEQ ID NO: 1883 - DNA, 1140 bp, Artificial Sequence
  Description of Artificial Sequence: Synthetic polynucleotide
  misc_feature (636)..(636): n is a, c, g, or t
  misc_feature (665)..(665): n is a, c, g, or t
  misc_feature (1064)..(1064): n is a, c, g, or t
accaccagcaccagaacctgggccctgcccacttacaacaaccatctctacaagcaaatctccagcvvmdcaggagctascaacgacaaccactactttggctacagcaccccttgggggtattttgactttaacagattccactgccacttctcaccacgtgactggcagcgactcattaacaacaactggggattccggcccaagaaactcagcttcaagctcttcaacatccaagttagaggggtcacgcagaacgatggcacgacgactattgccaataaccttaccagcacggttcaagtgtttacggactcggagtatcagctcccgtacgtgctcgggtcggcgcaccaaggctgtctcccgccgtttccagcggacgtcttcatggtccctcagtatggatacctcaccctgaacaacggaagtcaagcggtgggacgctcatccttttactgcctggagtacttcccttcgcagatgctaaggactggaaataacttccaattcagctataccttcgaggatgtaccttttcacagcagctacgctcacagccagagtttggatcgcttgatgaatcctcttattgatcagtatctgtactacctgaacagaacgcaargcamcvcnrgcggaacarccrvcmhsmrsvvsctgvngtttagccaggctgggcctcagtctatgtctttgcaggccagaaattggctacctgggccctgctaccggcaacagagactttcaamarycbmcrvcsrsaacaacaacagtrastttccttggmcagcggccagcamatatcatctcaatggccgcgactcgctggtgaatccaggaccagctatggccagtcacrrggacgatrmsgrsaratttttccctatgcacggcaatctaatatttggcaaasaarrcrscrvsrvarvcratrycgmsdwcgrsvrsgtaatgattacggatgaagaagagattcgtaccaccaatcctgtggcaacagagcagtatggaactgtggcaaataacttgcagrvsvvsmrsrvcvvscccacgdhtvvsrnsgtcvmscatcagggggccttacctggcatggtgtggcaagatcgtgacgtctaccttcaaggacctatctgggca

SEQ ID NO: 1884 - protein, 620 aa, Artificial Sequence; identical to SEQ ID NO: 1880
  Description of Artificial Sequence: Synthetic polypeptide
  misc_feature (263)..(264): Xaa can be any naturally occurring amino acid
  misc_feature (267)..(267): Xaa can be any naturally occurring amino acid
  misc_feature (450)..(453): Xaa can be any naturally occurring amino acid
  misc_feature (456)..(460): Xaa can be any naturally occurring amino acid
  misc_feature (462)..(462): Xaa can be any naturally occurring amino acid
  misc_feature (491)..(495): Xaa can be any naturally occurring amino acid
  misc_feature (500)..(500): Xaa can be any naturally occurring amino acid
  misc_feature (504)..(504): Xaa can be any naturally occurring amino acid
  misc_feature (508)..(508): Xaa can be any naturally occurring amino acid
  misc_feature (528)..(528): Xaa can be any naturally occurring amino acid
  misc_feature (531)..(533): Xaa can be any naturally occurring amino acid
  misc_feature (546)..(557): Xaa can be any naturally occurring amino acid
  misc_feature (586)..(590): Xaa can be any naturally occurring amino acid
  misc_feature (593)..(595): Xaa can be any naturally occurring amino acid
  misc_feature (597)..(597): Xaa can be any naturally occurring amino acid

SEQ ID NO: 1885 - protein, 738 aa, Artificial Sequence; identical to SEQ ID NO: 7
  Description of Artificial Sequence: Synthetic polypeptide

SEQ ID NO: 1886 - DNA, 2258 bp, Artificial Sequence
  Description of Artificial Sequence: Synthetic polynucleotide
tcgaggacaacctctctgagggcattcgcgagtggtgggacttgaaacctggagccccgaaacccaaagccaaccagcaaaagcaggacgacggccggggtctggtgcttcctggctacaagtacctcggacccttcaacggactcgacaagggggagcccgtcaacgcggcggacgcagcggccctcgagcacgacaaggcctacgaccagcagctcaaagcgggtgacaatccgtacctgcggtataaccacgccgacgccgagtttcaggagcgtctgcaagaagatacgtcttttgggggcaacctcgggcgagcagtcttccaggccaagaagcgggttctcgaacctctcggtctggttgaggaaggcgctaagacggctcctggaaagaagagaccggtagagccatcaccccagcgttctccagactcctctacgggcatcggcaagaaaggccagcagcccgcgaaaaagagactcaactttgggcagactggcgactcagagtcagtgcccgaccctcaaccaatcggagaaccccccgcaggcccctctggtctgggatctggtacaatggctgcaggcggtggcgctccaatggcagacaataacgaaggcgccgacggagtgggtagttcctcaggaaattggcattgcgattccacatggctgggcgacagagtcatcaccaccagcacccgaacctgggccctccccacctacaacaaccacctctacaagcaaatctccaacgggacttcgggaggaagcaccaacgacaacacctacttcggctacagcaccccctgggggtattttgactttaacagattccactgccacttctcaccacgtgactggcagcgactcatcaacaacaactggggattccggcccaagagactcaacttcaagctcttcaacatccaggtcaaggaggtcacgcagaatgaaggcaccaagaccatcgccaataaccttaccagcacgattcaggtctttacggactcggaataccagctcccgtacgtcctcggctctgcgcaccagggctgcctgcctccgttcccggcggacgtcttcatgattcctcagtacgggtacctgactctgaacaatggcagtcaggccgtgggccgttcctccttctactgcctggagtactttccttctcaaatgctgagaacgggcaacaactttgagttcagctaccagtttgaggacgtgccttttcacagcagctacgcgcacagccaaagcctggaccggctgatgaaccccctcatcgaccagtacctgtactacctgtctcggactcagtccacgggaggtaccgcaggaactcagcagttgctattttctcaggccgggcctaataacatgtcggctcaggccaaaaactggctacccgggccctgctaccggcagcaacgcgtctccacgacactgtcgcaaaataacaacagcaactttgcctggaccggtgccaccaagtatcatctgaatggcagagactctctggtaaatcccggtgtcgctatggcaacccacaaggacgacgaagagcgattttttccgtccagcggagtcttaatgtttgggaaacagggagctggaaaagacaacgtggactatagcagcgttatgctaaccagtgaggaagaaattaaaaccaccaacccagtggccacagaacagtacggcgtggtggccgataacctgcaacagcaaaacgccgctcctattgtaggggccgtcaacagtcaaggagccttacctggcatggtctggcagaaccgggacgtgtacctgcagggtcctatctgggccaagattcctcacacggacggaaactttcatccctcgccgctgatgggaggctttggactgaaacacccgcctcctcagatcctgattaagaatacacctgttcccgcggatcctccaactaccttcagtcaagctaagctggcgtcgttcatcacgcagtacagcaccggacaggtcagcgtggaaattgaatgggagctgcagaaagaaaacagcaaacgctggaacccagagattcaatacacttccaactactacaaatctacaaatgtggactttgctgttaacacagatggcacttattctgagcctcgccccatcggcacccgttacctcacccgtaatctgtaattgcttgttaatcaataaaccggttgattcgtttcagttgaactttggtctctgcgaagggcgaattcgttt

SEQ ID NO: 1887 - DNA, 2208 bp, Artificial Sequence
  Description of Artificial Sequence: Synthetic polynucleotide
atggctgccgatggttatcttccagattggctcgaggacactctctctgaaggaataagacagtggtggaagctcaaacctggcccaccaccaccaaagcccgcagagcggcataaggacgacagcaggggtcttgtgcttcctgggtacaagtacctcggacccttcaacggactcgacaagggagagccggtcaacgaggcagacgccgcggccctcgagcacgacaaagcctacgaccggcagctcgacagcggagacaacccgtacctcaagtacaaccacgccgacgcggagtttcaggagcgccttaaagaagatacgtcttttgggggcaacctcggacgagcagtcttccaggcgaaaaagagggttcttgaacctctgggcctggttgaggaacctgttaagacggctccgggaaaaaagaggccggtagagcactctcctgtggagccagactcctcctcgggaaccggaaaggcgggccagcagcctgcaagaaaaagattgaattttggtcagactggagacgcagactcagtacctgacccccagcctctcggacagccaccagcagccccctctggtctgggaactaatacgatggctacaggcagtggcgcaccaatggcagacaataacgagggcgccgacggagtgggtaattcctcgggaaattggcattgcgattccacatggatgggcgacagagtcatcaccaccagcacccgaacctgggccctgcccacctacaacaaccacctctacaaacaaatttccagccaatcaggagcctcgaacgacaatcactactttggctacagcaccccttgggggtattttgacttcaacagattccactgccacttttcaccacgtgactggcaaagactcatcaacaacaactggggattccgacccaagagactcaacttcaagctctttaacattcaagtcaaagaggtcacgcagaatgacggtacgacgacgattgccaataaccttaccagcacggttcaggtgtttactgactcggagtaccagctcccgtacgtcctcggctcggcgcatcaaggatgcctcccgccgttcccagcagacgtcttcatggtgccacagtatggatacctcaccctgaacaacgggagtcaggcagtaggacgctcttcattttactgcctggagtactttccttctcagatgctgcgtaccggaaacaactttaccttcagctacacttttgaggacgttcctttccacagcagctacgctcacagccagagtctggaccgtctcatgaatcctctcatcgaccagtacctgtatttcttaagcagaacaaacactccaagtggaaccaccacgcagtcaaggcttcagttttctcaggccggagcgagtgacattcgggaccagtctaggaactggcttcctggaccctgttaccgccagcagcgagtatcaaagacatctgcggataacaacaacagtgaattctcgtggaccggtgctaccaagtaccacctcaatggcagagactctctggtgaatccgggcccggccatggcaagccacaaggacgatgaagaaaagttttttcctcagagcggggttctcatctttgggaagcaaggctcagagaaaacaaatgtggacattgaaaaggtcatgattacagacgaagaggaaatcaggacaaccaatcccgtggctacggagcagtatggttctgtatctaccaacctccagagaggcaacagacaagcagctaccgcagatgtcaacacacaaggcgttcttccaggcatggtctggcaggacagagatgtgtaccttcaggggcccatctgggcaaagattccacacacggacggacattttcacccctctcccctcatgggtggattcggacttaaacaccctcctccacagattctcatcaagaacaccccggtacctgcgaatccttcgaccaccttcagtgcggcaaagtttgcttccttcatcacacagtactccacgggacaggtcagcgtggagatcgagtgggagctgcagaaggaaaacagcaaacgctggaatcccgaaattcagtacacttccaactacaacaagtctgttaatgtggactttactgtggacactaatggcgtgtattcagagcctcgccccattggtaccagattcctgactcgtaatctgtaa

SEQ ID NO: 1888 - protein, 737 aa, Artificial Sequence
  Description of Artificial Sequence: Synthetic polypeptide
MAADGYLPDWLEDNLSEGIREWWDLKPGAPKPKANQQKQDNGRGLVLPGYKYLGPFNGLDKGEPVNAADAAALEHDKAYDQQLQAGDNPYLRYNHADAEFQERLQEDTSFGGNLGRAVFQAKKRVLEPLGLVESPVKTAPGKKRPVEPSPQRSPDSSTGIGKKGQQPAKKRLNFGQTGDSESVPDPQPIGEPPAAPSGVGPNTMAAGGGAPMADNNEGADGVGSSSGNWHCDSTWLGDRVITTSTRTWALPTYNNHLYKQISNGTSGGSTNDNTYFGYSTPWGYFDFNRFHCHFSPRDWQRLINNNWGFRPKRLNFKLFNIQVKEVTQNEGTKTIANNLTSTIQVFTDSEYQLPYVLGSAHQGCLPPFPADVFMIPQYGYLTLNNGSQAVGRSSFYCLEYFPSQMLRTGNNFEFSYNFEDVPFHSSYAHSQSLDRLMNPLIDQYLYYLSRTQSTGGTAGTQQLLFSQAGPNNMSAQAKNWLPGPCYRQQRVSTTLSQNNNSNFAWTGATKYHLNGRDSLVNPGVAMATHKDDEERFFPSSGVLMFGKQGAGKDNVDYSSVMLTSEEEIKTTNPVATEQYGWADNLQQQNAAPIVGAVNSQGALPGMVWQNRDVYLQGPIWAKIPHTDGNFHPSPLMGGFGLKHPPPQILIKNTPVPADPPTTFNQAKLASFITQYSTGQVSVEIEWELQKENSKRWNPEIQYTSNYYKSTNVDFAVNTEGTYSEPRPIGTRYLTRNL

SEQ ID NO: 1889 - DNA, 2211 bp, Artificial Sequence
  Description of Artificial Sequence: Synthetic polynucleotide
atggctgccgatggttatcttccagattggctcgaggacactctctctgaaggaataagacagtggtggaagctcaaacctggcccaccaccaccaaagcccgcagagcggcataaggacgacagcaggggtcttgtgcttcctgggtacaagtacctcggacccttcaacggactcgacaagggagagccggtcaacgaggcagacgccgcggccctcgagcacgacaaagcctacgaccggcagctcgacagcggagacaacccgtacctcaagtacaaccacgccgacgcggagtttcaggagcgccttaaagaagatacgtcttttgggggcaacctcggacgagcagtcttccaggcgaaaaagagggttcttgaacctctgggcctggttgaggaacctgttaagacggctccgggaaaaaagaggccggtagagcactctcctgtggagccagactcctcctcgggaaccggaaaggcgggccagcagcctgcaagaaaaagattgaattttggtcagactggagacgcagactcagtacctgacccccagcctctcggacagccaccagcagccccctctggtctgggaactaatacgatggctacaggcagtggcgcaccaatggcagacaataacgagggcgccgacggagtgggtaattcctcgggaaattggcattgcgattccacatggatgggcgacagagtcatcaccaccagcacccgaacctgggccctgcccacctacaacaaccacctctacaaacaaatttccagcgcttcaacgggagcctcgaacgacaatcactactttggctacagcaccccttgggggtattttgacttcaacagattccactgccacttttcaccacgtgactggcaaagactcatcaacaacaactggggattccgacccaagagactcaacttcaagctctttaacattcaagtcaaagaggtcacgcagaatgacggtacgacgacgattgccaataaccttaccagcacggttcaggtgtttactgactcggagtaccagctcccgtacgtcctcggctcggcgcatcaaggatgcctcccgccgttcccagcagacgtcttcatggtgccacagtatggatacctcaccctgaacaacgggagtcaggcagtaggacgctcttcattttactgcctggagtactttccttctcagatgctgcgtaccggaaacaactttaccttcagctacacttttgaggacgttcctttccacagcagctacgctcacagccagagtctggaccgtctcatgaatcctctcatcgaccagtacctgtattacttgagcagaacaaacactccaagtggaaccaccacgcagtcaaggcttcagttttctcaggccggagcgagtgacattcgggaccagtctaggaactggcttcctggaccctgttaccgccagcagcgagtatcaaagacatctgcggataacaacaacagtgaatactcgtggactggagctaccaagtaccacctcaatggcagagactctctggtgaatccgggcccggccatggcaagccacaaggacgatgaagaaaagttttttcctcagagcggggttctcatctttgggaagcaaggctcagagaaaacaaatgtggacattgaaaaggtcatgattacagacgaagaggaaatcaggacaaccaatcccgtggctacggagcagtatggttctgtatctaccaacctccagagaggcaacagacaagcagctaccgcagatgtcaacacacaaggcgttcttccaggcatggtctggcaggacagagatgtgtaccttcaggggcccatctgggcaaagattccacacacggacggacattttcacccctctcccctcatgggtggattcggacttaaacaccctcctccacagattctcatcaagaacaccccggtacctgcgaatccttcgaccaccttcagtgcggcaaagtttgcttccttcatcacacagtactccacgggacaggtcagcgtggagatcgagtgggagctgcagaaggaaaacagcaaacgctggaatcccgaaattcagtacacttccaactacgccaagtctgtcaatgtggactttactgtggacaataatggcgtgtattcagagcctcgccccattggcaccagatacctgactcgtaatctgtaa

SEQ ID NO: 1890 - DNA, 2208 bp, Artificial Sequence
  Description of Artificial Sequence: Synthetic polynucleotide
atggctgccgatggttatcttccagattggctcgaggacaacctctctgagggcattcgcgagtggtgggacttgaaacctggagccccgaagcccaaagccaaccagcaaaagcaggacgacggccggggtctggtgcttcctggctacaagtacctcggacccttcaacggactcgacaagggggagcccgtcaacgcggcggacgcagcggccctcgagcacgacaaggcctacgaccagcagctcaaagcgggtgacaatccgtacctgcggtataaccacgccgacgccgagtttcaggagcgtctgcaagaagatacgtcttttgggggcaacctcgggcgagcagtcttccaggccaagaagcgggttctcgaacctctcggtctggttgaggaaggcgctaagacggctcctggaaagaaacgtccggtagagcagtcgccacaagagccagactcctcctcgggcatcggcaagacaggccagcagcccgctaaaaagagactcaattttggtcagactggcgactcagagtcagtccccgatccacaacctctcggagaacctccagcaacccccgctgctgtgggacctactacaatggcttcaggcggtggcgcaccaatggcagacaataacgaaggcgccgacggagtgggtaatgcctcaggaaattggcattgcgattccacatggctgggcgacagagtcatcaccaccagcacccgcacctgggccttgcccacctacaataaccacctctacaagcaaatctccagtgcttcaggggccagcaacgacaaccactacttcggctacagcaccccctgggggtattttgatttcaacagattccactgccacttttcaccacgtgactggcagcgactcatcaacaacaattggggattccggcccaagagactcaacttcaaactcttcaacatccaagtcaaggaggtcacgacgaatgatggcgtcacaaccatcgctaataaccttaccagcacggttcaagtcttctcggactcggagtaccagcttccgtacgtcctcggctctgcgcaccagggctgcctccctccgttcccggcggacgtgttcatgattccgcaatacggctacctgacgctcaacaatggcagccaagccgtgggacgttcatccttttactgcctggaatatttcccttctcagatgctgagaacgggcaacaactttaccttcagctacacctttgaggaagtgcctttccacagcagctacgcgcacagccagagcctggaccggctgatgaatcctctcatcgaccaatacctgtattacctgaacagaactcaaaatcagtccggaagtgcccaaaacaaggacttgctgtttagccgtgggtctccagctggcatgtctgttcagcccaaaaactggctacctggaccctgttatcggcagcagcgcgtttctaaaacaaaaacagacaacaacaacagcaattttacctggactggtgcttcaaaatataacctcaatgggcgtgaatccatcatcaaccctggcactgctatggcctcacacaaagacgacgaagacaagttctttcccatgagcggtgtcatgatttttggaaaagagagcgccggagcttcaaacactgcattggacaatgtcatgattacagacgaagaggaaattaaagccactaaccctgtggccaccgaaagatttgggaccgtggcagtcaatttccagagcagcagcacagaccctgcgaccggagatgtgcatgctatgggagcattacctggcatggtgtggcaagatagagacgtgtacctgcagggtcccatttgggccaaaattcctcacacagatggacactttcacccgtctcctcttatgggcggctttggactcaagaacccgcctcctcagatcctcatcaaaaacacgcctgttcctgcgaatcctccggcggagttttcagctacaaagtttgcttcattcatcacccaatactccacaggacaagtgagtgtggaaattgaatgggagctgcagaaagaaaacagcaagcgctggaatcccgaagtgcagtacacatccaattatgcaaaatctgccaacgttgattttactgtggacaacaatggactttatactgagcctcgccccattggcacccgttaccttacccgtcccctgtaa

SEQ ID NO: 1891 - DNA, 2205 bp, Artificial Sequence
  Description of Artificial Sequence: Synthetic polynucleotide
atggctgccgatggttatcttccagattggctcgaggacaacctctdgagggcattcgcgagtggtgggacttgaaacctggagccccgaaacccaaagccaaccagcaaaagcaggacgacggccggggtdggtgcttcctggctacaagtacctcggacccttcaacggactcgacaagggggagcccgtcaacgcggcggatgcagcggccctcgagcacgacaaggcctacgaccagcagctcaaagcgggtgacaatccgtacctgcggtataaccacgccgacgccgagtttcaggagcgtctgcaagaagatacgtcttttgggggcaacctcgggcgagcagtcttccaggccaagaagagggttctcgaaccttttggtdggttgaggaaggtgctaagacggctcctggaaagaaacgtccggtagagcagtcgccacaagagccagactcctcctcgggcattggcaagacaggccagcagcccgctaaaaagagactcaattttggtcagactggcgactcagagtcagtccccgacccacaacctctcggagaacctccagcaacccccgctgctgtgggacctactacaatggcttcaggcggtggcgcaccaatggcagacaataacgaaggcgccgacggagtgggtaatgcctcaggaaattggcattgcgattccacatggctgggcgacagagtcatcaccaccagcacccgaacatgggccttgcccacctataacaaccacctctacaagcaaatctccagtgcttcaggggccagcaacgacaaccactacttcggctacagcaccccctgggggtattttgatttcaacagattccactgccatttctcaccacgtgactggcagcgactcatcaacaacaattggggattccggcccaagagactcaacttcaagctcttcaacatccaagtcaaggaggtcacgacgaatgatggcgtcacgaccatcgctaataaccttaccagcacggttcaagtcttctcggactcggagtaccagttgccgtacgtcctcggctctgcgcaccagggctgcctccctccgttcccggcggacgtgttcatgattccgcagtacggctacctaacgctcaacaatggcagccaggcagtgggacggtcatccttttactgcctggaatatttcccatcgcagatgctgagaacgggcaataactttaccttcagctacaccttcgaggacgtgcctttccacagcagctacgcgcacagccagagcctggaccggctgatgaatcctctcatcgaccagtacctgtattacctgaacagaactcagaatcagtccggaagtgcccaaaacaaggacttgctgtttagccgggggtctccagctggcatgtctgttcagcccaaaaactggctacctggaccctgttaccggcagcagcgcgtttctaaaacaaaaacagacaacaacaacagcaactttacctggactggtgcttcaaaatataaccttaatgggcgtgaatctataatcaaccctggcactgctatggcctcacacaaagacgacaaagacaagttctttcccatgagcggtgtcatgatttttggaaaggagagcgccggagcttcaaacactgcattggacaatgtcatgatcacagacgaagaggaaatcaaagccactaaccccgtggccaccgaaagatttgggactgtggcagtcaatctccagagcagcagcacagaccctgcgaccggagatgtgcatgttatgggagccttacctggaatggtgtggcaagacagagacgtatacctgcagggtcctatttgggccaaaattcctcacacggatggacactttcacccgtctcctctcatgggcggctttggacttaagcacccgcctcctcagatcctcatcaaaaacacgcctgttcctgcgaatcctccggcagagttttcggctacaaagtttgcttcattcatcacccagtattccacaggacaagtgagcgtggagattgaatgggagctgcagaaagaaaacagcaaacgctggaatcccgaagtgcagtatacatctaactatgcaaaatctgccaacgttgatttcactgtggacaacaatggactttatactgagcctcgccccattggcacccgttacctcacccgtcccctgtaa

SEQ ID NO: 1892 - DNA, 2208 bp, Artificial Sequence
  Description of Artificial Sequence: Synthetic polynucleotide
atggctgccgatggttatcttccagattggctcgaggacaacctctctgagggcattcgcgagtggtgggacttgaaacctggagccccgaaacccaaagccaaccagcaaaagcaggacgacggccggggtctggtgcttcctggctacaagtacctcggacccttcaacggactcgacaagggggagcccgtcaacgcggcggatgcagcggccctcgagcacgacaaggcctacgaccagcagctcaaagcgggtgacaatccgtacctgcggtataaccacgccgacgccgagtttcaggagcgtctgcaagaagatacgtcttttgggggcaacctcgggcgagcagtcttccaggccaagaagagggttctcgaaccttttggtctggttgaggaaggtgctaagacggctcctggaaagaaacgtccggtagagcagtcgccacaagagccagactcctcctcgggcattggcaagacaggccagcagcccgctaaaaagagactcaattttggtcagactggcgactcagagtcagtccccgacccacaacctctcggagaacctccagcaacccccgctgctgtgggacctactacaatggcttcaggcggtggcgcaccaatggcagacaataacgaaggcgccgacggagtgggtaatgcctcaggaaattggcattgcgattccacatggctgggcgacagagtcatcaccaccagcacccgaacatgggccttgcccacctataacaaccacctctacaagcaaatctccagtgcttcaggggccagcaacgacaaccactacttcggctacagcaccccctgggggtattttgatttcaacagattccactgccatttctcaccacgtgactggcagcgactcatcaacaacaattggggattccggcccaagagactcaacttcaagctcttcaacatccaagtcaaggaggtcacgacgaatgatggcgtcacgaccatcgctaataaccttaccagcacggttcaagtcttctcggactcggagtaccagttgccgtacgtcctcggctctgcgcaccagggctgcctccctccgttcccggcggacgtgttcatgattccgcagtacggctacctaacgctcaacaatggcagccaggcagtgggacggtcatccttttactgcctggaatatttcccatcgcagatgctgagaacgggcaataactttaccttcagctacaccttcgaggacgtgcctttccacagcagctacgcgcacagccagagcctggaccggctgatgaatcctctcatcgaccagtacctgtattacctgaacagaactcagaatcagtccggaagtgcccaaaacaaggacttgctgtttagccgggggtctccagctggcatgtctgttcagcccaaaaactggctacctggaccctgttaccggcagcagcgcgtttctaaaacaaaaacagacaacaacaacagcaactttacctggactggtgcttcaaaatataaccttaatgggcgtgaatctataatcaaccctggcactgctatggcctcacacaaagacgacgaagacaagttctttcccatgagcggtgtcatgatttttggaaaggagagcgccggagcttcaaacactgcattggacaatgtcatgatcacagacgaagaggaaatcaaagccactaaccccgtggccaccgaaagatttgggactgtggcagtcaatctccagagcagcagcacagaccctgcgaccggagatgtgcatgttatgggagccttacctggaatggtgtggcaagacagagacgtatacctgcagggtcctatttgggccaaaattcctcacacggatggacactttcacccgtctcctctcatgggcggctttggacttaagcacccgcctcctcagatcctcatcaaaaacacgcctgttcctgcgaatcctccggcagagttttcggctacaaagtttgcttcattcatcacccagtattccacaggacaagtgagcgtggagattgaatgggagctgcagaaagaaaacagcaaacgctggaatcccgaagtgcagtatacatctaactatgcaaaatctgccaacgttgatttcactgtggacaacaatggactttatactgagcctcgccccattggcacccgttacctcacccgtcccctgtaa

SEQ ID NO: 1893 - DNA, 2208 bp, Artificial Sequence
  Description of Artificial Sequence: Synthetic polynucleotide
atggctgccgatggttatcttccagattggctcgaggacactctctctgaaggaataagacagtggtggaagctcaaacctggcccaccaccaccaaagcccgcagagcggcataaggacgacagcaggggtcttgtgcttcctgggtacaagtacctcggacccttcaacggactcgacaagggagagccggtcaacgaggcagacgccgcggccctcgagcacgacaaagcctacgaccggcagctcgacagcggagacaacccgtacctcaagtacaaccacgccgacgcggagtttcaggagcgccttaaagaagatacgtcttttgggggcaacctcggacgagcagtcttccaggcgaaaaagagggttcttgaacctctgggcctggttgaggaacctgttaagacggctccgggaaaaaagaggccggtagagcactctcctgtggagccagactcctcctcgggaaccggaaaggcgggccagcagcctgcaagaaaaagattgaattttggtcagactggagacgcagactcagtacctgacccccagcctctcggacagccaccagcagccccctctggtctgggaactaatacgatggctacaggcagtggcgcaccaatggcagacaataacgagggcgccgacggagtgggtaattcctcgggaaattggcattgcgattccacatggatgggcgacagagtcatcaccaccagcacccgaacctgggccctgcccacctacaacaaccacctctacaaacaaatttccagccaatcaggagcctcgaacgacaatcactactttggctacagcaccccttgggggtattttgacttcaacagattccactgccacttttcaccacgtgactggcaaagactcatcaacaacaactggggattccgacccaagagactcaacttcaagctctttaacattcaagtcaaagaggtcacgcagaatgacggtacgacgacgattgccaataaccttaccagcacggttcaggtgtttactgactcggagtaccagctcccgtacgtcctcggctcggcgcatcaaggatgcctcccgccgttcccagcagacgtcttcatggtgccacagtatggatacctcaccctgaacaacgggagtcaggcagtaggacgctcttcattttactgcctggagtactttccttctcagatgctgcgtaccggaaacaactttaccttcagctacacttttgaggacgttcctttccacagcagctacgctcacagccagagtctggaccgtctcatgaatcctctcatcgaccagtacctgtattacttgagcagaacaaacactccaagtggaaccaccacgcagtcaaggcttcagttttctgtggccggacccagtaacatggctgtccagggaaggaactggcttcctggaccctgttaccgccagcagcgagtatcaaagacatctgcggataacaacaacagtgaatttgcttggactggagctaccaagtaccacctcaatggcagagactctctggtgaatccgggcccggccatggcaagccacaaggacgatgaagaaaagttttttcctcagagcggggttctcatctttgggaagcaaggctcagagaaaacaaatgtggacattgaaaaggtcatgattacagacgaagaggaaatcaggacaaccaatcccgtggctacggagcagtatggttctgtatctaccaacctccagcaacagaacacagcaccagctaccgcagatgtcaacacacaaggcgttcttccaggcatggtctggcaggacagagatgtgtaccttcaggggcccatctgggcaaagattccacacacggacggacattttcacccctctcccctcatgggtggattcggacttaaacaccctcctccacagattctcatcaagaacaccccggtacctgcgaatccttcgaccaccttcagtgcggcaaagtttgcttccttcatcacacagtactccacgggacaggtcagcgtggagatcgagtgggagctgcagaaggaaaacagcaaacgctggaatcccgaaattcagtacacttccaactacaacaagtctgttaatgtggactttactgtggacactaatggcgtgtattcagagcctcgccccattggcaccagatacctgactcgtaatctgtaa

SEQ ID NO: 1894 - protein, 735 aa, Artificial Sequence
  Description of Artificial Sequence: Synthetic polypeptide
MAADGYLPDWLEDTLSEGIRQWWKLKPGPPPPKPAERHKDDSRGLVLPGYKYLGPFNGLDKGEPVNEADAAALEHDKAYDRQLDSGDNPYLKYNHADAEFQERLKEDTSFGGNLGRAVFQAKKRVLEPLGLVEEPVKTAPGKKRPVEHSPVEPDSSSGTGKAGQQPARKRLNFGQTGDADSVPDPQPLGQPPAAPSGLGTNTMATGSGAPMADNNEGADGVGNSSGNWHCDSTWMGDRVITTSTRTWALPTYNNHLYKQISSQSGASNDNHYFGYSTPWGYFDFNRFHCHFSPRDWQRLINNNWGFRPKRLNFKLFNIQVKEVTQNDGTTTIANNLTSTVQVFTDSEYQLPYVLGSAHQGCLPPFPADVFMVPQYGYLTLNNGSQAVGRSSFYCLEYFPSQMLRTGNNFTFSYTFEDVPFHSSYAHSQSLDRLMNPLIDQYLYYLSRTNTPSGTTTQSRLQFSVAGPSNMAVQGRNWLPGPCYRQQRVSKTSADNNNSEFAWTGATKYHLNGRDSLVNPGPAMASHKDDEEKFFPQSGVLIFGKQGSEKTNVDIEKVMITDEEEIRTTNPVATEQYGSVSTNLQQQNTAPATADVNTQGVLPGMVWQDRDVYLQGPIWAKIPHTDGHFHPSPLMGGFGLKHPPPQILIKNTPVPANPSTTFSAAKFASFITQYSTGQVSVEIEWELQKENSKRWNPEIQYTSNYNKSVNVDFTVDTNGVYSEPRPIGTRYLTRNL

SEQ ID NO: 1895 - DNA, 2208 bp, Artificial Sequence
  Description of Artificial Sequence: Synthetic polynucleotide
atggctgccgatggttatcttccagattggctcgaggacactctctctgaaggaataagacagtggtggaagctcaaacctggcccaccaccaccaaagcccgcagagcggcataaggacgacagcaggggtcttgtgcttcctgggtacaagtacctcggacccttcaacggactcgacaagggagagccggtcaacgaggcagacgccgcggccctcgagcacgacaaagcctacgaccggcagctcgacagcggagacaacccgtacctcaagtacaaccacgccgacgcggagtttcaggagcgccttaaagaagatacgtcttttgggggcaacctcggacgagcagtcttccaggcgaaaaagaggattcttgaacctctgggcctggttgaggaacctgttaagacggctccgggaaaaaagaggccggtagagcactctcctgcggagccagactcctcctcgggaaccggaaagtcgggccagcagcctgcaagaaaaagattgaattttggtcagactggagacgcagactcagtacctgacccccagcctctcggacagccaccagcagccccctctggtctgggaactaatacgatggcttcaggcagtggcgcaccaatggcagacaataacgagggcgccgacggagtgggtaattcctcgggaaattggcattgcgattccacatggatgggcgacagagtcatcaccaccagcacccgaacctgggccctgcccacctacaacaaccacctctacaaacaaatttccagccaatcaggagcctcgaacgacaatcactactttggctacagcaccccttgggggtattttgacttcaacagattccactgccacttttcaccacgtgactggcaaagactcatcaacaacaactggggattccgacccaagagactcagcttcaagctctttaacattcaagtcaaagaggtcacgcagaatgacggtacgacgacgattgccaataaccttaccagcacggttcaggtgtttactgactcggagtaccagctcccgtacgtcctcggctcggcgcatcaaggatgcctcccgccgttcccagcagacgtcttcatggtgccacagtatggatacctcaccctgaacaacgggagtcaggcagtaggacgctcttcattttactgcctggagtactttccttctcagatgctgcgtaccggaaacaactttaccttcagctacacttttgaggacgttcctttccacagcagctacgctcacagccagagtctggaccgtctcatgaatcctctcatcgaccagtacctgtattacttgagcagaacaaacactccaagtggaaccaccacgatgtcaaggcttcagttttctcaggccggagcgagtgacattcgggaccagtctaggaactggcttcctggaccctgttaccgccagcagcgagtatcaaagacagctgcggataacaacaacagtgattactcgtggactggagctaccaagtaccacctcaatggcagagactctctggtgaatccgggcccggccatggcaagccacaaggacgatgaagaaaagtattttcctcagagcggggttctcatctttgggaagcaagactcaggaaaaacaaatgtggacattgaaaaggtcatgattacagacgaagaggaaatcaggacaaccaatcccgtggctacggagcagtatggttctgtatctaccaacctccagagcggcaacacacaagcagctacctcagatgtcaacacacaaggcgttcttccaggcatggtctggcaggacagagatgtgtaccttcaggggcccatctgggcaaagattccacacacggacggacattttcacccctctcccctcatgggtggattcggacttaaacaccctcctccacagattctcatcaagaacaccccggtacctgcgaatccttcgaccaccttcagtgcggcaaagtttgcttccttcatcacacagtactccacgggacaggtcagcgtggagatcgagtgggagctgcagaaggaaaacagcaaacgctggaatcccgaaattcagtacacttccaactacaacaagtctgttaatgtggactttactgtggacactaatggcgtgtattcagagcctcgccccattggcaccagatacctgactcgtaatctgtaa

SEQ ID NO: 1896 - DNA, 2208 bp, Artificial Sequence
  Description of Artificial Sequence: Synthetic polynucleotide
atggctgccgatggttatcttccagattggctcgaggacactctctctgaaggaataagacagtggtggaagctcaaacctggcccaccaccaccaaagcccgcagagcggcataaggacgacagcaggggtcttgtgcttcctgggtacaagtacctcggacccttcaacggactcgacaagggagagccggtcaacgaggcagacgccgcggccctcgagcacgacaaagcctacgaccggcagctcgacagcggagacaacccgtacctcaagtacaaccacgccgacgcggagtttcaggagcgccttaaagaagatacgtcttttgggggcaacctcggacgagcagtcttccaggcgaaaaagaggattcttgaacctctgggcctggttgaggaacctgttaagacggctccgggaaaaaagaggccggtagagcactctcctgcggagccagactcctcctcgggaaccggaaagtcgggccagcagcctgcaagaaaaagattgaattttggtcagactggagacgcagactcagtacctgacccccagcctctcggacagccaccagcagccccctctggtctgggaactaatacgatggcttcaggcagtggcgcaccaatggcagacaataacgagggcgccgacggagtgggtaattcctcgggaaattggcattgcgattccacatggatgggcgacagagtcatcaccaccagcacccgaacctgggccctgcccacctacaacaaccacctctacaaacaaatttccagccaatcaggagcctcgaacgacaatcactactttggctacagcaccccttgggggtattttgacttcaacagattccactgccacttttcaccacgtgactggcaaagactcatcaacaacaactggggattccgacccaagagactcaacttcaagctctttaacattcaagtcaaagaggtcacgcagaatgacggtacgacgacgattgccaataaccttaccagcacggttcaggtgtttactgactcggagtaccagctcccgtacgtcctcggctcggcgcatcaaggatgcctcccgccgttcccagcagacgtcttcatggtgccacagtatggatacctcaccctgaacaacgggagtcaggcagtaggacgctcttcattttactgcctggagtactttccttctcagatgctgcgtaccggaaacaactttaccttcagctacacttttgaggacgttcctttccacagcagctacgctcacagccagagtctggaccgtctcatgaatcctctcatcgaccagtacctgtattacttgagcagaacaaacactccaagtggaaccaccacgatgtcaaggcttcagttttctcaggccggagcgagtgacattcgggaccagtctaggaactggcttcctggaccctgttaccgccagcagcgagtatcaaagacagctgcggataacaacaacagtgattactcgtggactggagctaccaagtaccacctcaatggcagagactctctggtgaatccgggcccggccatggcaagccacaaggacgatgaagaaaagtattttcctcagagcggggttctcatctttgggaagcaagactcaggaaaaacaaatgtggacattgaaaaggtcatgattacagacgaagaggaaatcaggacaaccaatcccgtggctacggagcagtatggttctgtatctaccaacctccagagcggcaacacacaagcagctacctcagatgtcaacacacaaggcgttcttccaggcatggtctggcaggacagagatgtgtaccttcaggggcccatctgggcaaagattccacacacggacggacattttcacccctctcccctcatgggtggattcggacttaaacaccctcctccacagattctcatcaagaacaccccggtacctgcgaatccttcgaccaccttcagtgcggcaaagtttgcttccttcatcacacagtactccacgggacaggtcagcgtggagatcgagtgggagctgcagaaggaaaacagcaaacgctggaatcccgaaattcagtacacttccaactacaacaagtctgttaatgtggactttactgtggacactaatggcgtgtattcagagcctcgccccattggcaccagatacctgactcgtaatctgtaa

SEQ ID NO: 1897 - protein, 735 aa, Artificial Sequence
  Description of Artificial Sequence: Synthetic polypeptide
MAADGYLPDWLEDTLSEGIRQWWKLKPGPPPPKPAERHKDDSRGLVLPGYKYLGPFNGLDKGEPVNEADAAALEHDKAYDRQLDSGDNPYLKYNHADAEFQERLKEDTSFGGNLGRAVFQAKKRILEPLGLVEEPVKTAPGKKRPVEHSPAEPDSSSGTGKSGQQPARKRLNFGQTGDADSVPDPQPLGQPPAAPSGLGTNTMASGSGAPMADNNEGADGVGNSSGNWHCDSTWMGDRVITTSTRTWALPTYNNHLYKQISSQSGASNDNHYFGYSTPWGYFDFNRFHCHFSPRDWQRLINNNWGFRPKRLNFKLFNIQVKEVTQNDGTTTIANNLTSTVQVFTDSEYQLPYVLGSAHQGCLPPFPADVFMVPQYGYLTLNNGSQAVGRSSFYCLEYFPSQMLRTGNNFTFSYTFEDVPFHSSYAHSQSLDRLMNPLIDQYLYYLSRTNTPSGTTTMSRLQFSQAGASDIRDQSRNWLPGPCYRQQRVSKTAADNNNSDYSWTGATKYHLNGRDSLVNPGPAMASHKDDEEKYFPQSGVLIFGKQDSGKTNVDIEKVMITDEEEIRTTNPVATEQYGSVSTNLQSGNTQAATSDVNTQGVLPGMVWQDRDVYLQGPIWAKIPHTDGHFHPSPLMGGFGLKHPPPQILIKNTPVPANPSTTFSAAKFASFITQYSTGQVSVEIEWELQKENSKRWNPEIQYTSNYNKSVNVDFTVDTNGVYSEPRPIGTRYLTRNL

SEQ ID NO: 1898 - protein, 736 aa, Artificial Sequence
  Description of Artificial Sequence: Synthetic polypeptide
MAADGYLPDWLEDNLSEGIREWWDLKPGAPKPKANQQKQDDGRGLVLPGYKYLGPFNGLDKGEPVNAADAAALEHDKAYDQQLKAGDNPYLRYNHADAEFQERLQEDTSFGGNLGRAVFQAKKRVLEPFGLVEEGAKTAPGKKRPVEQSPQEPDSSSGIGKTGQQPAKKRLNFGQTGDSESVPDPQPLGEPPATPAAVGPTTMASGGGAPMADNNEGADGVGNASGNWHCDSTWLGDRVITTSTRTWALPTYNNHLYKQISSASTGASNDNHYFGYSTPWGYFDFNRFHCHFSPRDWQRLINNNWGFRPKRLNFKLFNIQVKEVTTNDGVTTIANNLTSTVQVFSDSEYQLPYVLGSAHQGCLPPFPADVFMIPQYGYLTLNNGSQAVGRSSFYCLEYFPSQMLRTGNNFTFSYTFEDVPFHSSYAHSQSLDRLMNPLIDQYLYFLNRTQNQSGSAQNKDLLFSRGSPAGMSVQPKNWLPGPCYRQQRVSKTKTDNNNSNFTWTGASKYNLNGRESIINPGTAMASHKDDKDKFFPMSGVMIFGKESAGASNTALDNVMITDEEEIKATNPVATERFGTVAVNLQSSSTDPATGDVHVMGALPGMVWQDRDVYLQGPIWAKIPHTDGHFHPSPLMGGFGLKHPPPQILIKNTPVPANPPAEFSATKFASFITQYSTGQVSVEIEWELQKENSKRWNPEVQYTSNYAKSANVDFTVDNNGLYTEPRPIGTRYLTRPL

SEQ ID NO: 1899 - protein, 747 aa, Artificial Sequence
  Description of Artificial Sequence: Synthetic polypeptide
MAADGYLPDWLEDTLSEGIRQWWKLKPGPPPPKPAERHKDDSRGLVLPGYKYLGPFNGLDKGEPVNEADAAALEHDKAYDRQLDSGDNPYLKYNHADAEFQERLKEDTSFGGNLGRAVFQAKKRVLEPLGLVEEPVKTAPGKKRPVEHSPVEPDSSSGTGKAGQQPARKRLNFGQTGDADSVPDPQPLGQPPAAPSGLGTNTMATGSGAPMADNNEGADGVGNSSGNWHCDSTWMGDRVITTSTRTWALPTYNNHLYKQISSQSGASNDNHYFGYSTPWGYFDFNRFHCHFSPRDWQRLINNNWGFRPKRLNFKLFNIQVKEVTQNDGTTTIANNLTSTVQVFTDSEYQLPYVLGSAHQGCLPPFPADVFMVPQYGYLTLNNGSQAVGRSSFYCLEYFPSQMLRTGNNFTFSYTFEDVPFHSSYAHSQSLDRLMNPLIDQYLYYLSRTNTPSGTTTQSRLQFSQAGASDIRDQSRNWLPGPCYRQQRVSKTSADNNNSEYSWTGATKYHLNGRDSLVNPGPAMASHKDDEEKFFPQSGVLIFGKQGSEKTNVDIEKVMITDEEEIRTTNPVATEQYGSVSTNLQRGNAAAGSTPPPMAARQAATADVNTQGVLPGMVWQDRDVYLQGPIWAKIPHTDGHFHPSPLMGGFGLKHPPPQILIKNTPVPANPSTTFSAAKFASFITQYSTGQVSVEIEWELQKENSKRWNPEIQYTSNYNKSVNVDFTVDTNGVYSEPRPIGTRYLTRNL

SEQ ID NO: 1900 - protein, 747 aa, Artificial Sequence
  Description of Artificial Sequence: Synthetic polypeptide
MAADGYLPDWLEDTLSEGIRQWWKLKPGPPPPKPAERHKDDSRGLVLPGYKYLGPFNGLDKGEPVNEADAAALEHDKAYDRQLDSGDNPYLKYNHADAEFQERLKEDTSFGGNLGRAVFQAKKRVLEPLGLVEEPVKTAPGKKRPVEHSPVEPDSSSGTGKAGQQPARKRLNFGQTGDADSVPDPQPLGQPPAAPSGLGTNTMATGSGAPMADNNEGADGVGNSSGNWHCDSTWMGDRVITTSTRTWALPTYNNHLYKQISSQSGASNDNHYFGYSTPWGYFDFNRFHCHFSPRDWQRLINNNWGFRPKRLNFKLFNIQVKEVTQNDGTTTIANNLTSTVQVFTDSEYQLPYVLGSAHQGCLPPFPADVFMVPQYGYLTLNNGSQAVGRSSFYCLEYFPSQMLRTGNNFTFSYTFEDVPFHSSYAHSQSLDRLMNPLIDQYLYYLSRTNTPSGTTTQSRLQFSQAGASDIRDQSRNWLPGPCYRQQRVSKTSADNNNSEYSWTGATKYHLNGRDSLVNPGPAMASHKDDEEKFFPQSGVLIFGKQGSEKTNVDIEKVMITDEEEIRTTNPVATEQYGSVSTNLQRGNAAAGETRAPLAARQAATADVNTQGVLPGMVWQDRDVYLQGPIWAKIPHTDGHFHPSPLMGGFGLKHPPPQILIKNTPVPANPSTTFSAAKFASFITQYSTGQVSVEIEWELQKENSKRWNPEIQYTSNYNKSVNVDFTVDTNGVYSEPRPIGTRYLTRNL

SEQ ID NO: 1901 - protein, 10 aa, Artificial Sequence
  Description of Artificial Sequence: Synthetic polypeptide
VNLTWSRASG

SEQ ID NO: 1902 - protein, 14 aa, Artificial Sequence
  Description of Artificial Sequence: Synthetic polypeptide
EFCINHRGYWVCGD

SEQ ID NO: 1903 - protein, 11 aa, Artificial Sequence
  Description of Artificial Sequence: Synthetic polypeptide
EDGQVMDVDLS

SEQ ID NO: 1904 - protein, 9 aa, Artificial Sequence
  Description of Artificial Sequence: Synthetic polypeptide
EKQRNGTLT

SEQ ID NO: 1905 - protein, 17 aa, Artificial Sequence
  Description of Artificial Sequence: Synthetic polypeptide
TYQCRVTHPHLPRALMR

SEQ ID NO: 1906 - protein, 14 aa, Artificial Sequence
  Description of Artificial Sequence: Synthetic polypeptide
RHSTTQPRKTKGSG

SEQ ID NO: 1907 - protein, 13 aa, Artificial Sequence
  Description of Artificial Sequence: Synthetic polypeptide
DSNPRGVSAYLSR

SEQ ID NO: 1908 - protein, 12 aa, Artificial Sequence
  Description of Artificial Sequence: Synthetic polypeptide
TITCLWDLAPSK

SEQ ID NO: 1909 - protein, 10 aa, Artificial Sequence
  Description of Artificial Sequence: Synthetic polypeptide
KTKGSGFFVF

SEQ ID NO: 1910 - protein, 12 aa, Artificial Sequence
  Description of Artificial Sequence: Synthetic polypeptide
THPHLPRALMRS

SEQ ID NO: 1911 - protein, 23 aa, Artificial Sequence
  Description of Artificial Sequence: Synthetic polypeptide
GETYQCRVTHPHLPRALMRSTTK

SEQ ID NO: 1912 - protein, 8 aa, Artificial Sequence
  Description of Artificial Sequence: Synthetic polypeptide
LPRALMRS

SEQ ID NO: 1913 - protein, 8 aa, Artificial Sequence
  Description of Artificial Sequence: Synthetic polypeptide
INHRGYWV

SEQ ID NO: 1914 - protein, 12 aa, Artificial Sequence
  Description of Artificial Sequence: Synthetic polypeptide
CDAGSVRTNAPD

SEQ ID NO: 1915 - protein, 17 aa, Artificial Sequence
  Description of Artificial Sequence: Synthetic polypeptide
AKAVSNLTESRSESLQS

SEQ ID NO: 1916 - protein, 13 aa, Artificial Sequence
  Description of Artificial Sequence: Synthetic polypeptide
SLTGDEFKKVLET

SEQ ID NO: 1917 - protein, 11 aa, Artificial Sequence
  Description of Artificial Sequence: Synthetic polypeptide
REAVAYRFEED

SEQ ID NO: 1918 - protein, 10 aa, Artificial Sequence
  Description of Artificial Sequence: Synthetic polypeptide
INPEIITLDG

SEQ ID NO: 1919 - protein, 15 aa, Artificial Sequence
  Description of Artificial Sequence: Synthetic polypeptide
DISVTGAPVITATYL

SEQ ID NO: 1920 - protein, 12 aa, Artificial Sequence
  Description of Artificial Sequence: Synthetic polypeptide
DISVTGAPVITA

SEQ ID NO: 1921 - protein, 17 aa, Artificial Sequence
  Description of Artificial Sequence: Synthetic polypeptide
PKTVSNLTESSSESVQS

SEQ ID NO: 1922 - protein, 13 aa, Artificial Sequence
  Description of Artificial Sequence: Synthetic polypeptide
SLMGDEFKAVLET

SEQ ID NO: 1923 - protein, 11 aa, Artificial Sequence
  Description of Artificial Sequence: Synthetic polypeptide
QHSVAYTFEED

SEQ ID NO: 1924 - protein, 10 aa, Artificial Sequence
  Description of Artificial Sequence: Synthetic polypeptide
INPEIITRDG

SEQ ID NO: 1925 - protein, 15 aa, Artificial Sequence
  Description of Artificial Sequence: Synthetic polypeptide
DISLTGDPVITASYL

SEQ ID NO: 1926 - protein, 12 aa, Artificial Sequence
  Description of Artificial Sequence: Synthetic polypeptide
DISLTGDPVITA

SEQ ID NO: 1927 - protein, 11 aa, Artificial Sequence
  Description of Artificial Sequence: Synthetic polypeptide
DQSIDFEIDSA

SEQ ID NO: 1928 - protein, 20 aa, Artificial Sequence
  Description of Artificial Sequence: Synthetic polypeptide
KNVSEDLPLPTFSPTLLGDS

SEQ ID NO: 1929 - protein, 11 aa, Artificial Sequence
  Description of Artificial Sequence: Synthetic polypeptide
KNVSEDLPLPT

SEQ ID NO: 1930 - protein, 12 aa, Artificial Sequence
  Description of Artificial Sequence: Synthetic polypeptide
CDSGRVRTDAPD

SEQ ID NO: 1931 - protein, 14 aa, Artificial Sequence
  Description of Artificial Sequence: Synthetic polypeptide
FPEHLLVDFLQSLS

SEQ ID NO: 1932 - protein, 9 aa, Artificial Sequence
  Description of Artificial Sequence: Synthetic polypeptide
DAEFRHDSG

SEQ ID NO: 1933 - protein, 16 aa, Artificial Sequence
  Description of Artificial Sequence: Synthetic polypeptide
HYAAAQWDFGNTMCQL

SEQ ID NO: 1934 - protein, 13 aa, Artificial Sequence
  Description of Artificial Sequence: Synthetic polypeptide
YAAQWDFGNTMCQ

SEQ ID NO: 1935 - protein, 10 aa, Artificial Sequence
  Description of Artificial Sequence: Synthetic polypeptide
RSQKEGLHYT

SEQ ID NO: 1936 - protein, 19 aa, Artificial Sequence
  Description of Artificial Sequence: Synthetic polypeptide
SSRTPSDKPVAHWANPQAE

SEQ ID NO: 1937 - protein, 15 aa, Artificial Sequence
  Description of Artificial Sequence: Synthetic polypeptide
SRTPSDKPVAHWANP

SEQ ID NO: 1938 - protein, 9 aa, Artificial Sequence
  Description of Artificial Sequence: Synthetic polypeptide
SSRTPSDKP

SEQ ID NO: 1939 - protein, 14 aa, Artificial Sequence
  Description of Artificial Sequence: Synthetic polypeptide
NADGNVDYHMNSVP

SEQ ID NO: 1940 - protein, 11 aa, Artificial Sequence
  Description of Artificial Sequence: Synthetic polypeptide
DGNVDYHMNSV

SEQ ID NO: 1941 - protein, 16 aa, Artificial Sequence
  Description of Artificial Sequence: Synthetic polypeptide
RSFKEFLQSSLRALRQ

SEQ ID NO: 1942 - protein, 11 aa, Artificial Sequence
  Description of Artificial Sequence: Synthetic polypeptide
FKEFLQSSLRA

SEQ ID NO: 1943 - protein, 10 aa, Artificial Sequence
  Description of Artificial Sequence: Synthetic polypeptide
QMWAPQWGPD

SEQ ID NO: 1944 - protein, 6 aa, Artificial Sequence
  Description of Artificial Sequence: Synthetic polypeptide
RGNRQA

SEQ ID NO: 1945 - protein, 6 aa, Artificial Sequence
  Description of Artificial Sequence: Synthetic polypeptide
SSSTDP

SEQ ID NO: 1946 - protein, 6 aa, Artificial Sequence
  Description of Artificial Sequence: Synthetic polypeptide
SSNTAP

SEQ ID NO: 1947 - protein, 6 aa, Artificial Sequence
  Description of Artificial Sequence: Synthetic polypeptide
SNSNLP

SEQ ID NO: 1948 - protein, 6 aa, Artificial Sequence
  Description of Artificial Sequence: Synthetic polypeptide
SSTTAP

SEQ ID NO: 1949 - protein, 6 aa, Artificial Sequence
  Description of Artificial Sequence: Synthetic polypeptide
AANTAA

SEQ ID NO: 1950 - protein, 6 aa, Artificial Sequence
  Description of Artificial Sequence: Synthetic polypeptide
QQNTAP

SEQ ID NO: 1951 - protein, 6 aa, Artificial Sequence
  Description of Artificial Sequence: Synthetic polypeptide
SAQAQA

SEQ ID NO: 1952 - protein, 6 aa, Artificial Sequence
  Description of Artificial Sequence: Synthetic polypeptide
QANTGP

SEQ ID NO: 1953 - protein, 6 aa, Artificial Sequence
  Description of Artificial Sequence: Synthetic polypeptide
NATTAP

SEQ ID NO: 1954 - protein, 6 aa, Artificial Sequence
  Description of Artificial Sequence: Synthetic polypeptide
SSTAGP

SEQ ID NO: 1955 - protein, 6 aa, Artificial Sequence
  Description of Artificial Sequence: Synthetic polypeptide
QQNTAA

SEQ ID NO: 1956 - protein, 6 aa, Artificial Sequence
  Description of Artificial Sequence: Synthetic polypeptide
PSTAGP

SEQ ID NO: 1957 - protein, 6 aa, Artificial Sequence
  Description of Artificial Sequence: Synthetic polypeptide
NQNTAP

SEQ ID NO: 1958 - protein, 6 aa, Artificial Sequence
  Description of Artificial Sequence: Synthetic polypeptide
QAANAP

SEQ ID NO: 1959 - protein, 6 aa, Artificial Sequence
  Description of Artificial Sequence: Synthetic polypeptide
SIVGLP

SEQ ID NO: 1960 - protein, 6 aa, Artificial Sequence
  Description of Artificial Sequence: Synthetic polypeptide
AASTAA

SEQ ID NO: 1961 - protein, 6 aa, Artificial Sequence
  Description of Artificial Sequence: Synthetic polypeptide
SQNTTA

SEQ ID NO: 1962 - protein, 6 aa, Artificial Sequence
  Description of Artificial Sequence: Synthetic polypeptide
QQDTAP

SEQ ID NO: 1963 - protein, 6 aa, Artificial Sequence
  Description of Artificial Sequence: Synthetic polypeptide
QTNTGP

SEQ ID NO: 1964 - protein, 6 aa, Artificial Sequence
  Description of Artificial Sequence: Synthetic polypeptide
QTNGAP

SEQ ID NO: 1965 - protein, 6 aa, Artificial Sequence
  Description of Artificial Sequence: Synthetic polypeptide
QQNAAP

SEQ ID NO: 1966 - protein, 6 aa, Artificial Sequence
  Description of Artificial Sequence: Synthetic polypeptide
AANTQA

SEQ ID NO: 1967 - protein, 6 aa, Artificial Sequence
  Description of Artificial Sequence: Synthetic polypeptide
NGRAHA

SEQ ID NO: 1968 - protein, 7 aa, Artificial Sequence
  Description of Artificial Sequence: Synthetic polypeptide
QPEHSST

SEQ ID NO: 1969 - protein, 7 aa, Artificial Sequence
  Description of Artificial Sequence: Synthetic polypeptide
VNTANST

SEQ ID NO: 1970 - protein, 7 aa, Artificial Sequence
  Description of Artificial Sequence: Synthetic polypeptide
HGPMQKS

SEQ ID NO: 1971 - protein, 7 aa, Artificial Sequence
  Description of Artificial Sequence: Synthetic polypeptide
PHKPPLA

SEQ ID NO: 1972 - protein, 7 aa, Artificial Sequence
  Description of Artificial Sequence: Synthetic polypeptide
IKNNEMW

SEQ ID NO: 1973 - protein, 7 aa, Artificial Sequence
  Description of Artificial Sequence: Synthetic polypeptide
RNLDTPM

SEQ ID NO: 1974 - protein, 7 aa, Artificial Sequence
  Description of Artificial Sequence: Synthetic polypeptide
VDSHRQS

SEQ ID NO: 1975 - protein, 7 aa, Artificial Sequence
  Description of Artificial Sequence: Synthetic polypeptide
YDSKTKT

SEQ ID NO: 1976 - protein, 7 aa, Artificial Sequence
  Description of Artificial Sequence: Synthetic polypeptide
SQLPHQK

SEQ ID NO: 1977 - protein, 7 aa, Artificial Sequence
  Description of Artificial Sequence: Synthetic polypeptide
STMQQNT

SEQ ID NO: 1978 - protein, 7 aa, Artificial Sequence
  Description of Artificial Sequence: Synthetic polypeptide
TERYMTQ

SEQ ID NO: 1979 - protein, 7 aa, Artificial Sequence
  Description of Artificial Sequence: Synthetic polypeptide
DASLSTS

SEQ ID NO: 1980 - protein, 7 aa, Artificial Sequence
  Description of Artificial Sequence: Synthetic polypeptide
DLPNKKT

SEQ ID NO: 1981 - protein, 7 aa, Artificial Sequence
  Description of Artificial Sequence: Synthetic polypeptide
DLTAARL

SEQ ID NO: 1982 - protein, 7 aa, Artificial Sequence
  Description of Artificial Sequence: Synthetic polypeptide
EPHQFNY

SEQ ID NO: 1983 - protein, 7 aa, Artificial Sequence
  Description of Artificial Sequence: Synthetic polypeptide
EPQSNHT

SEQ ID NO: 1984 - protein, 7 aa, Artificial Sequence
  Description of Artificial Sequence: Synthetic polypeptide
MSSWPSQ

SEQ ID NO: 1985 - protein, 7 aa, Artificial Sequence
  Description of Artificial Sequence: Synthetic polypeptide
NPKHNAT

SEQ ID NO: 1986 - protein, 7 aa, Artificial Sequence
  Description of Artificial Sequence: Synthetic polypeptide
PDGMRTT

SEQ ID NO: 1987 - protein, 7 aa, Artificial Sequence
  Description of Artificial Sequence: Synthetic polypeptide
PNNNKTT

SEQ ID NO: 1988 - protein, 7 aa, Artificial Sequence
  Description of Artificial Sequence: Synthetic polypeptide
QSTTHDS

SEQ ID NO: 1989 - protein, 7 aa, Artificial Sequence
  Description of Artificial Sequence: Synthetic polypeptide
TGSKQKQ

SEQ ID NO: 1990 - protein, 7 aa, Artificial Sequence
  Description of Artificial Sequence: Synthetic polypeptide
SLKHQAL

SEQ ID NO: 1991 - protein, 7 aa, Artificial Sequence
  Description of Artificial Sequence: Synthetic polypeptide
SPIDGEQ

SEQ ID NO: 1992 - protein, 8 aa, Artificial Sequence
  Description of Artificial Sequence: Synthetic polypeptide
WIFPWIQL

SEQ ID NO: 1993 - protein, 9 aa, Artificial Sequence
  Description of Artificial Sequence: Synthetic polypeptide
CDCRGDCFC

SEQ ID NO: 1994 - protein, 5 aa, Artificial Sequence
  Description of Artificial Sequence: Synthetic polypeptide
CNGRC

SEQ ID NO: 1995 - protein, 7 aa, Artificial Sequence
  Description of Artificial Sequence: Synthetic polypeptide
CPRECES

SEQ ID NO: 1996 - protein, 10 aa, Artificial Sequence
  Description of Artificial Sequence: Synthetic polypeptide
CTTHWGFTLC

SEQ ID NO: 1997 - protein, 9 aa, Artificial Sequence
  Description of Artificial Sequence: Synthetic polypeptide
CGRRAGGSC

SEQ ID NO: 1998 - protein, 9 aa, Artificial Sequence
  Description of Artificial Sequence: Synthetic polypeptide
CKGGRAKDC

SEQ ID NO: 1999 - protein, 9 aa, Artificial Sequence
  Description of Artificial Sequence: Synthetic polypeptide
CVPELGHEC

SEQ ID NO: 2000 - protein, 9 aa, Artificial Sequence
  Description of Artificial Sequence: Synthetic polypeptide
CRRETAWAK

SEQ ID NO: 2001 - protein, 14 aa, Artificial Sequence
  Description of Artificial Sequence: Synthetic polypeptide
VSWFSHRYSPFAVS

SEQ ID NO: 2002 - protein, 13 aa, Artificial Sequence
  Description of Artificial Sequence: Synthetic polypeptide
GYRDGYAGPILYN

SEQ ID NO: 2003 - protein, 7 aa, Artificial Sequence
  Description of Artificial Sequence: Synthetic polypeptide
  misc_feature (1)..(3): Xaa can be any naturally occurring amino acid
  misc_feature (5)..(7): Xaa can be any naturally occurring amino acid
XXXYXXX

SEQ ID NO: 2004 - protein, 4 aa, Artificial Sequence
  Description of Artificial Sequence: Synthetic polypeptide
  misc_feature (2)..(2): Xaa is Gly or Leu
YXNW

SEQ ID NO: 2005 - protein, 7 aa, Artificial Sequence
  Description of Artificial Sequence: Synthetic polypeptide
RPLPPLP

SEQ ID NO: 2006 - protein, 7 aa, Artificial Sequence
  Description of Artificial Sequence: Synthetic polypeptide
APPLPPR

SEQ ID NO: 2007 - protein, 12 aa, Artificial Sequence
  Description of Artificial Sequence: Synthetic polypeptide
DVFYPYPYASGS

SEQ ID NO: 2008 - protein, 6 aa, Artificial Sequence
  Description of Artificial Sequence: Synthetic polypeptide
MYWYPY

SEQ ID NO: 2009 - protein, 12 aa, Artificial Sequence
  Description of Artificial Sequence: Synthetic polypeptide
DITWDQLWDLMK

SEQ ID NO: 2010 - protein, 8 aa, Artificial Sequence
  Description of Artificial Sequence: Synthetic polypeptide
  misc_feature (5)..(5): Xaa is Gly or Leu
CWDDXWLC

SEQ ID NO: 2011 - protein, 14 aa, Artificial Sequence
  Description of Artificial Sequence: Synthetic polypeptide
EWCEYLGGYLRCYA

SEQ ID NO: 2012 - protein, 14 aa, Artificial Sequence
  Description of Artificial Sequence: Synthetic polypeptide
  misc_feature (2)..(2): Xaa can be any naturally occurring amino acid
  misc_feature (4)..(5): Xaa can be any naturally occurring amino acid
  misc_feature (8)..(8): Xaa can be any naturally occurring amino acid
  misc_feature (11)..(11): Xaa can be any naturally occurring amino acid
  misc_feature (13)..(13): Xaa can be any naturally occurring amino acid
YXCXXGPXTWXCXP

SEQ ID NO: 2013 - protein, 14 aa, Artificial Sequence
  Description of Artificial Sequence: Synthetic polypeptide
IEGPTLRQWLAARA

SEQ ID NO: 2014 - protein, 5 aa, Artificial Sequence
  Description of Artificial Sequence: Synthetic polypeptide
  misc_feature (3)..(5): Xaa can be any naturally occurring amino acid
LWXXX

SEQ ID NO: 2015 - protein, 7 aa, Artificial Sequence
  Description of Artificial Sequence: Synthetic polypeptide
  misc_feature (1)..(1): Xaa can be any naturally occurring amino acid
  misc_feature (3)..(4): Xaa can be any naturally occurring amino acid
XFXXYLW

SEQ ID NO: 2016 - protein, 13 aa, Artificial Sequence
  Description of Artificial Sequence: Synthetic polypeptide
SSIISHFRWGLCD

SEQ ID NO: 2017 - protein, 13 aa, Artificial Sequence
  Description of Artificial Sequence: Synthetic polypeptide
MSRPACPPNDKYE

SEQ ID NO: 2018 - protein, 8 aa, Artificial Sequence
  Description of Artificial Sequence: Synthetic polypeptide
CLRSGRGC

SEQ ID NO: 2019 - protein, 9 aa, Artificial Sequence
  Description of Artificial Sequence: Synthetic polypeptide
CHWMFSPWC

SEQ ID NO: 2020 - protein, 4 aa, Artificial Sequence
  Description of Artificial Sequence: Synthetic polypeptide
  misc_feature (2)..(3): Xaa can be any naturally occurring amino acid
WXXF

SEQ ID NO: 2021 - protein, 8 aa, Artificial Sequence
  Description of Artificial Sequence: Synthetic polypeptide
CSSRLDAC

SEQ ID NO: 2022 - protein, 7 aa, Artificial Sequence
  Description of Artificial Sequence: Synthetic polypeptide
CLPVASC

SEQ ID NO: 2023 - protein, 13 aa, Artificial Sequence
  Description of Artificial Sequence: Synthetic polypeptide
CGFECVRQCPERC

SEQ ID NO: 2024 - protein, 13 aa, Artificial Sequence
  Description of Artificial Sequence: Synthetic polypeptide
CVALCREACGEGC

SEQ ID NO: 2025 - protein, 9 aa, Artificial Sequence
  Description of Artificial Sequence: Synthetic polypeptide
SWCEPGWCR

SEQ ID NO: 2026 - protein, 7 aa, Artificial Sequence
  Description of Artificial Sequence: Synthetic polypeptide
YSGKWGW

SEQ ID NO: 2027 - protein, 7 aa, Artificial Sequence
  Description of Artificial Sequence: Synthetic polypeptide
GLSGGRS

SEQ ID NO: 2028 - protein, 7 aa, Artificial Sequence
  Description of Artificial Sequence: Synthetic polypeptide
LMLPRAD

SEQ ID NO: 2029 - protein, 9 aa, Artificial Sequence
  Description of Artificial Sequence: Synthetic polypeptide
CSCFRDVCC

SEQ ID NO: 2030 - protein, 9 aa, Artificial Sequence
  Description of Artificial Sequence: Synthetic polypeptide
CRDVVSVIC

SEQ ID NO: 2031 - protein, 6 aa, Artificial Sequence
  Description of Artificial Sequence: Synthetic polypeptide
MARSGL

SEQ ID NO: 2032 - protein, 6 aa, Artificial Sequence
  Description of Artificial Sequence: Synthetic polypeptide
MARAKE

SEQ ID NO: 2033 - protein, 6 aa, Artificial Sequence
  Description of Artificial Sequence: Synthetic polypeptide
MSRTMS

SEQ ID NO: 2034 - protein, 6 aa, Artificial Sequence
  Description of Artificial Sequence: Synthetic polypeptide
KCCYSL

SEQ ID NO: 2035 - protein, 14 aa, Artificial Sequence
  Description of Artificial Sequence: Synthetic polypeptide
MYWGDSHWLQYWYE

SEQ ID NO: 2036 - protein, 7 aa, Artificial Sequence
  Description of Artificial Sequence: Synthetic polypeptide
MQLPLAT

SEQ ID NO: 2037 - protein, 4 aa, Artificial Sequence
  Description of Artificial Sequence: Synthetic polypeptide
EWLS

SEQ ID NO: 2038 - protein, 4 aa, Artificial Sequence
  Description of Artificial Sequence: Synthetic polypeptide
SNEW

SEQ ID NO: 2039 - protein, 4 aa, Artificial Sequence
  Description of Artificial Sequence: Synthetic polypeptide
TNYL

SEQ ID NO: 2040 - protein, 12 aa, Artificial Sequence
  Description of Artificial Sequence: Synthetic polypeptide
WDLAWMFRLPVG

SEQ ID NO: 2041 - protein, 13 aa, Artificial Sequence
  Description of Artificial Sequence: Synthetic polypeptide
CTVALPGGYVRVC

SEQ ID NO: 2042 - protein, 13 aa, Artificial Sequence
  Description of Artificial Sequence: Synthetic polypeptide
CVAYCIEHHCWTC

SEQ ID NO: 2043 - protein, 12 aa, Artificial Sequence
  Description of Artificial Sequence: Synthetic polypeptide
CVFAHNYDYLVC

SEQ ID NO: 2044 - protein, 10 aa, Artificial Sequence
  Description of Artificial Sequence: Synthetic polypeptide
CVFTSNYAFC

SEQ ID NO: 2045 - protein, 7 aa, Artificial Sequence
  Description of Artificial Sequence: Synthetic polypeptide
VHSPNKK

SEQ ID NO: 2046 - protein, 7 aa, Artificial Sequence
  Description of Artificial Sequence: Synthetic polypeptide
CRGDGWC

SEQ ID NO: 2047 - protein, 6 aa, Artificial Sequence
  Description of Artificial Sequence: Synthetic polypeptide
  misc_feature (1)..(1): Xaa can be any naturally occurring amino acid
  misc_feature (6)..(6): Xaa can be any naturally occurring amino acid
XRGCDX

SEQ ID NO: 2048 - protein, 4 aa, Artificial Sequence
  Description of Artificial Sequence: Synthetic polypeptide
  misc_feature (2)..(4): Xaa can be any naturally occurring amino acid
PXXX

SEQ ID NO: 2049 - protein, 11 aa, Artificial Sequence
  Description of Artificial Sequence: Synthetic polypeptide
SGKGPRQITAL

SEQ ID NO: 2050 - protein, 14 aa, Artificial Sequence
  Description of Artificial Sequence: Synthetic polypeptide
  misc_feature (10)..(10): Xaa is Ala or Gln
  misc_feature (11)..(11): Xaa is Asn or Ala
  misc_feature (12)..(14): Xaa can be any naturally occurring amino acid
AAAAAAAAAXXXXX

SEQ ID NO: 2051 - protein, 6 aa, Artificial Sequence
  Description of Artificial Sequence: Synthetic polypeptide
VYMSPF

SEQ ID NO: 2052 - protein, 7 aa, Artificial Sequence
  Description of Artificial Sequence: Synthetic polypeptide
ATWLPPR

SEQ ID NO: 2053 - protein, 12 aa, Artificial Sequence
  Description of Artificial Sequence: Synthetic polypeptide
HTMYYHHYQHHL

SEQ ID NO: 2054 - protein, 19 aa, Artificial Sequence
  Description of Artificial Sequence: Synthetic polypeptide
SEVGCRAGPLQWLCEKYFG

SEQ ID NO: 2055 - protein, 18 aa, Artificial Sequence
  Description of Artificial Sequence: Synthetic polypeptide
CGLLPVGRPDRNVWRWLC

SEQ ID NO: 2056 - protein, 15 aa, Artificial Sequence
  Description of Artificial Sequence: Synthetic polypeptide
CKGQCDRFKGLPWEC

SEQ ID NO: 2057 - protein, 5 aa, Artificial Sequence
  Description of Artificial Sequence: Synthetic polypeptide
SGRSA

SEQ ID NO: 2058 - protein, 4 aa, Artificial Sequence
  Description of Artificial Sequence: Synthetic polypeptide
WGFP

SEQ ID NO: 2059 - protein, 17 aa, Artificial Sequence
  Description of Artificial Sequence: Synthetic polypeptide
AEPMPHSLNFSQYLWYT

SEQ ID NO: 2060 - protein, 6 aa, Artificial Sequence
  Description of Artificial Sequence: Synthetic polypeptide
  misc_feature (4)..(4): Xaa is Trp or Phe
WAYXSP

SEQ ID NO: 2061 - protein, 7 aa, Artificial Sequence
  Description of Artificial Sequence: Synthetic polypeptide
IELLQAR

SEQ ID NO: 2062 - protein, 16 aa, Artificial Sequence
  Description of Artificial Sequence: Synthetic polypeptide
AYTKCSRQWRTCMTTH

SEQ ID NO: 2063 - protein, 15 aa, Artificial Sequence
  Description of Artificial Sequence: Synthetic polypeptide
PQNSKIPGPTFLDPH

SEQ ID NO: 2064 - protein, 15 aa, Artificial Sequence
  Description of Artificial Sequence: Synthetic polypeptide
SMEPALPDWWWKMFK

SEQ ID NO: 2065 - protein, 16 aa, Artificial Sequence
  Description of Artificial Sequence: Synthetic polypeptide
ANTPCGPYTHDCPVKR

SEQ ID NO: 2066 - protein, 12 aa, Artificial Sequence
  Description of Artificial Sequence: Synthetic polypeptide
TACHQHVRMVRP

SEQ ID NO: 2067 - protein, 12 aa, Artificial Sequence
  Description of Artificial Sequence: Synthetic polypeptide
VPWMEPAYQRFL

SEQ ID NO: 2068 - protein, 8 aa, Artificial Sequence
  Description of Artificial Sequence: Synthetic polypeptide
DPRATPGS

SEQ ID NO: 2069 - protein, 12 aa, Artificial Sequence
  Description of Artificial Sequence: Synthetic polypeptide
FRPNRAQDYNTN

SEQ ID NO: 2070 - protein, 9 aa, Artificial Sequence
  Description of Artificial Sequence: Synthetic polypeptide
CTKNSYLMC

SEQ ID NO: 2071 - protein, 11 aa, Artificial Sequence
  Description of Artificial Sequence: Synthetic polypeptide
  misc_feature (2)..(2): Xaa is Gln or Arg
  misc_feature (3)..(3): Xaa is Leu or Arg
  misc_feature (5)..(5): Xaa is Gly or Asn
  misc_feature (6)..(7): Xaa is any amino acid residue
  misc_feature (9)..(9): Xaa iis Ala or Val
CXXTXXXGXGC

SEQ ID NO: 2072 - protein, 9 aa, Artificial Sequence
  Description of Artificial Sequence: Synthetic polypeptide
CPIEDRPMC

SEQ ID NO: 2073 - protein, 12 aa, Artificial Sequence
  Description of Artificial Sequence: Synthetic polypeptide
HEWSYLAPYPWF

SEQ ID NO: 2074 - protein, 9 aa, Artificial Sequence
  Description of Artificial Sequence: Synthetic polypeptide
MCPKHPLGC

SEQ ID NO: 2075 - protein, 15 aa, Artificial Sequence
  Description of Artificial Sequence: Synthetic polypeptide
RMWPSSTVNLSAGRR

SEQ ID NO: 2076 - protein, 20 aa, Artificial Sequence
  Description of Artificial Sequence: Synthetic polypeptide
SAKTAVSQRVWLPSHRGGEP

SEQ ID NO: 2077 - protein, 20 aa, Artificial Sequence
  Description of Artificial Sequence: Synthetic polypeptide
KSREHVNNSACPSKRITAAL

SEQ ID NO: 2078 - protein, 4 aa, Artificial Sequence
  Description of Artificial Sequence: Synthetic polypeptide
EGFR

SEQ ID NO: 2079 - protein, 6 aa, Artificial Sequence
  Description of Artificial Sequence: Synthetic polypeptide
AGLGVR

SEQ ID NO: 2080 - protein, 15 aa, Artificial Sequence
  Description of Artificial Sequence: Synthetic polypeptide
GTRQGHTMRLGVSDG

SEQ ID NO: 2081 - protein, 15 aa, Artificial Sequence
  Description of Artificial Sequence: Synthetic polypeptide
IAGLATPGWSHWLAL

SEQ ID NO: 2082 - protein, 7 aa, Artificial Sequence
  Description of Artificial Sequence: Synthetic polypeptide
SMSIARL

SEQ ID NO: 2083 - protein, 7 aa, Artificial Sequence
  Description of Artificial Sequence: Synthetic polypeptide
HTFEPGV

SEQ ID NO: 2084 - protein, 15 aa, Artificial Sequence
  Description of Artificial Sequence: Synthetic polypeptide
NTSLKRISNKRIRRK

SEQ ID NO: 2085 - protein, 15 aa, Artificial Sequence
  Description of Artificial Sequence: Synthetic polypeptide
LRIKRKRRKRKKTRK

SEQ ID NO: 2086 - DNA, 21 bp, adeno-associated virus 2
  misc_feature (3)..(3): n is a, c, g, or t
  misc_feature (4)..(5): n is a, c or g
  misc_feature (6)..(6): n is a or c
  misc_feature (7)..(7): n is a, g, or t
  misc_feature (13)..(13): n is a or g
  misc_feature (14)..(14): n is g or c
  misc_feature (17)..(17): n is g or c
agnnnnncagganncancaac

SEQ ID NO: 2087 - protein, 7 aa, Artificial Sequence
  Description of Artificial Sequence: Synthetic polypeptide
SDSGASN

SEQ ID NO: 2088 - protein, 7 aa, Artificial Sequence
  Description of Artificial Sequence: Synthetic polypeptide
SPSGASN

SEQ ID NO: 2089 - protein, 7 aa, Artificial Sequence
  Description of Artificial Sequence: Synthetic polypeptide
SHSGASN

SEQ ID NO: 2090 - protein, 7 aa, Artificial Sequence
  Description of Artificial Sequence: Synthetic polypeptide
SRSGASN

SEQ ID NO: 2091 - protein, 7 aa, Artificial Sequence
  Description of Artificial Sequence: Synthetic polypeptide
SKSGASN

SEQ ID NO: 2092 - protein, 7 aa, Artificial Sequence
  Description of Artificial Sequence: Synthetic polypeptide
SNSGASN

SEQ ID NO: 2093 - protein, 7 aa, Artificial Sequence
  Description of Artificial Sequence: Synthetic polypeptide
SGSGASN

SEQ ID NO: 2094 - protein, 7 aa, Artificial Sequence
  Description of Artificial Sequence: Synthetic polypeptide
SASGASN

SEQ ID NO: 2095 - protein, 7 aa, Artificial Sequence
  Description of Artificial Sequence: Synthetic polypeptide
SESGTSN

SEQ ID NO: 2096 - protein, 7 aa, Artificial Sequence
  Description of Artificial Sequence: Synthetic polypeptide
STTGGSN

SEQ ID NO: 2097 - protein, 7 aa, Artificial Sequence
  Description of Artificial Sequence: Synthetic polypeptide
SSAGSTN

SEQ ID NO: 2098 - protein, 6 aa, Artificial Sequence
  Description of Artificial Sequence: Synthetic polypeptide
NNDSQA

SEQ ID NO: 2099 - protein, 6 aa, Artificial Sequence
  Description of Artificial Sequence: Synthetic polypeptide
NNRNQA

SEQ ID NO: 2100 - protein, 6 aa, Artificial Sequence
  Description of Artificial Sequence: Synthetic polypeptide
NNNKQA

SEQ ID NO: 2101 - protein, 6 aa, Artificial Sequence
  Description of Artificial Sequence: Synthetic polypeptide
NAKRQA

SEQ ID NO: 2102 - protein, 6 aa, Artificial Sequence
  Description of Artificial Sequence: Synthetic polypeptide
NDEHQA

SEQ ID NO: 2103 - protein, 6 aa, Artificial Sequence
  Description of Artificial Sequence: Synthetic polypeptide
NTSQKA

SEQ ID NO: 2104 - protein, 25 aa, Artificial Sequence
  Description of Artificial Sequence: Synthetic polypeptide
YYLSRTNTPSGTDTQSRLVFSQAGA

SEQ ID NO: 2105 - protein, 25 aa, Artificial Sequence
  Description of Artificial Sequence: Synthetic polypeptide
YYLSRTNTDSGTETQSGLDFSQAGA

SEQ ID NO: 2106 - protein, 25 aa, Artificial Sequence
  Description of Artificial Sequence: Synthetic polypeptide
YYLSRTNTESGTPTQSALEFSQAGA

SEQ ID NO: 2107 - protein, 25 aa, Artificial Sequence
  Description of Artificial Sequence: Synthetic polypeptide
YYLSRTNTHSGTHTQSPLHFSQAGA

SEQ ID NO: 2108 - protein, 25 aa, Artificial Sequence
  Description of Artificial Sequence: Synthetic polypeptide
YYLSRTNTSSGTITISHLIFSQAGA

SEQ ID NO: 2109 - protein, 25 aa, Artificial Sequence
  Description of Artificial Sequence: Synthetic polypeptide
YYLSRTNTRSGIMTKSSLMFSQAGA

SEQ ID NO: 2110 - protein, 25 aa, Artificial Sequence
  Description of Artificial Sequence: Synthetic polypeptide
YYLSRTNTKSGRKTLSNLSFSQAGA

SEQ ID NO: 2111 - protein, 25 aa, Artificial Sequence
  Description of Artificial Sequence: Synthetic polypeptide
YYLSRTNDGSGPVTPSKLRFSQRGA

SEQ ID NO: 2112 - protein, 25 aa, Artificial Sequence
  Description of Artificial Sequence: Synthetic polypeptide
YYLSRTNAASGHATHSDLKFSQPGA

SEQ ID NO: 2113 - protein, 25 aa, Artificial Sequence
  Description of Artificial Sequence: Synthetic polypeptide
YYLSRTNGQAGSLTMSELGFSQVGA

SEQ ID NO: 2114 - protein, 25 aa, Artificial Sequence
  Description of Artificial Sequence: Synthetic polypeptide
YYLSRTNSTGGNQTTSQLLFSQLSA

SEQ ID NO: 2115 - protein, 25 aa, Artificial Sequence
  Description of Artificial Sequence: Synthetic polypeptide
YFLSRTNNNTGLNTNSTLNFSQGRA

SEQ ID NO: 2116 - protein, 16 aa, Artificial Sequence
  Description of Artificial Sequence: Synthetic polypeptide
SKTGADNNNSEYSWTG

SEQ ID NO: 2117 - protein, 16 aa, Artificial Sequence
  Description of Artificial Sequence: Synthetic polypeptide
SKTDADNNNSEYSWTG

SEQ ID NO: 2118 - protein, 16 aa, Artificial Sequence
  Description of Artificial Sequence: Synthetic polypeptide
SKTEADNNNSEYSWTG

SEQ ID NO: 2119 - protein, 16 aa, Artificial Sequence
  Description of Artificial Sequence: Synthetic polypeptide
SKTPADNNNSEYSWTG

SEQ ID NO: 2120 - protein, 16 aa, Artificial Sequence
  Description of Artificial Sequence: Synthetic polypeptide
SKTHADNNNSEYSWTG

SEQ ID NO: 2121 - protein, 16 aa, Artificial Sequence
  Description of Artificial Sequence: Synthetic polypeptide
SKTQADNNNSEYSWTG

SEQ ID NO: 2122 - protein, 16 aa, Artificial Sequence
  Description of Artificial Sequence: Synthetic polypeptide
SKTIADNNNSEYSWTG

SEQ ID NO: 2123 - protein, 16 aa, Artificial Sequence
  Description of Artificial Sequence: Synthetic polypeptide
SKTMADNNNSEYSWTG

SEQ ID NO: 2124 - protein, 16 aa, Artificial Sequence
  Description of Artificial Sequence: Synthetic polypeptide
SKTRADNNNSEYSWTG

SEQ ID NO: 2125 - protein, 16 aa, Artificial Sequence
  Description of Artificial Sequence: Synthetic polypeptide
SKTNADNNNSEYSWTG

SEQ ID NO: 2126 - protein, 16 aa, Artificial Sequence
  Description of Artificial Sequence: Synthetic polypeptide
SKTVGRNNNSEYSWTG

SEQ ID NO: 2127 - protein, 16 aa, Artificial Sequence
  Description of Artificial Sequence: Synthetic polypeptide
SKTADRNNNSEYSWTG

SEQ ID NO: 2128 - protein, 16 aa, Artificial Sequence
  Description of Artificial Sequence: Synthetic polypeptide
SKKLSQNNNSKYSWQG

SEQ ID NO: 2129 - protein, 16 aa, Artificial Sequence
  Description of Artificial Sequence: Synthetic polypeptide
SKPTTGNNNSDYSWPG

SEQ ID NO: 2130 - protein, 16 aa, Artificial Sequence
  Description of Artificial Sequence: Synthetic polypeptide
STQKNENNNSNYSWPG

SEQ ID NO: 2131 - protein, 8 aa, Artificial Sequence
  Description of Artificial Sequence: Synthetic polypeptide
HKDDEGKF

SEQ ID NO: 2132 - protein, 8 aa, Artificial Sequence
  Description of Artificial Sequence: Synthetic polypeptide
HKDDNRKF

SEQ ID NO: 2133 - protein, 8 aa, Artificial Sequence
  Description of Artificial Sequence: Synthetic polypeptide
HKDDTNKF

SEQ ID NO: 2134 - protein, 8 aa, Artificial Sequence
  Description of Artificial Sequence: Synthetic polypeptide
HEDSDKNF

SEQ ID NO: 2135 - protein, 8 aa, Artificial Sequence
  Description of Artificial Sequence: Synthetic polypeptide
HRDGADSF

SEQ ID NO: 2136 - protein, 8 aa, Artificial Sequence
  Description of Artificial Sequence: Synthetic polypeptide
HGDNKSRF

SEQ ID NO: 2137 - protein, 14 aa, Artificial Sequence
  Description of Artificial Sequence: Synthetic polypeptide
KQGSEKTNVDFEEV

SEQ ID NO: 2138 - protein, 14 aa, Artificial Sequence
  Description of Artificial Sequence: Synthetic polypeptide
KQGSEKTNVDSEEV

SEQ ID NO: 2139 - protein, 14 aa, Artificial Sequence
  Description of Artificial Sequence: Synthetic polypeptide
KQGSEKTNVDVEEV

SEQ ID NO: 2140 - protein, 14 aa, Artificial Sequence
  Description of Artificial Sequence: Synthetic polypeptide
KQGSDKTNVDDAGV

SEQ ID NO: 2141 - protein, 14 aa, Artificial Sequence
  Description of Artificial Sequence: Synthetic polypeptide
KQGSSKTNVDPREV

SEQ ID NO: 2142 - protein, 14 aa, Artificial Sequence
  Description of Artificial Sequence: Synthetic polypeptide
KQGSRKTNVDHKQV

SEQ ID NO: 2143 - protein, 14 aa, Artificial Sequence
  Description of Artificial Sequence: Synthetic polypeptide
KQGSKGGNVDTNRV

SEQ ID NO: 2144 - protein, 14 aa, Artificial Sequence
  Description of Artificial Sequence: Synthetic polypeptide
KQGSGEANVDNGDV

SEQ ID NO: 2145 - protein, 14 aa, Artificial Sequence
  Description of Artificial Sequence: Synthetic polypeptide
KQDAAADNIDYDHV

SEQ ID NO: 2146 - protein, 14 aa, Artificial Sequence
  Description of Artificial Sequence: Synthetic polypeptide
KQSGTRSNAAASSV

SEQ ID NO: 2147 - protein, 14 aa, Artificial Sequence
  Description of Artificial Sequence: Synthetic polypeptide
KENTNTNDTELTNV

SEQ ID NO: 2148 - protein, 14 aa, Artificial Sequence
  Description of Artificial Sequence: Synthetic polypeptide
QRGNNVAATADVNT

SEQ ID NO: 2149 - protein, 14 aa, Artificial Sequence
  Description of Artificial Sequence: Synthetic polypeptide
QRGNNEAATADVNT

SEQ ID NO: 2150 - protein, 14 aa, Artificial Sequence
  Description of Artificial Sequence: Synthetic polypeptide
QRGNNPAATADVNT

SEQ ID NO: 2151 - protein, 14 aa, Artificial Sequence
  Description of Artificial Sequence: Synthetic polypeptide
QRGNNHAATADVNT

SEQ ID NO: 2152 - protein, 14 aa, Artificial Sequence
  Description of Artificial Sequence: Synthetic polypeptide
QEENNIAATPGVNT

SEQ ID NO: 2153 - protein, 14 aa, Artificial Sequence
  Description of Artificial Sequence: Synthetic polypeptide
QPPNNMAATHEVNT

SEQ ID NO: 2154 - protein, 14 aa, Artificial Sequence
  Description of Artificial Sequence: Synthetic polypeptide
QHHNNSAATTIVNT

SEQ ID NO: 2155 - protein, 14 aa, Artificial Sequence
  Description of Artificial Sequence: Synthetic polypeptide
QTTNNRAAFNMVET

SEQ ID NO: 2156 - protein, 14 aa, Artificial Sequence
  Description of Artificial Sequence: Synthetic polypeptide
QKKNNNAASKKVAT

SEQ ID NO: 2157 - protein, 14 aa, Artificial Sequence
  Description of Artificial Sequence: Synthetic polypeptide
QGGNNKAADDAVKT

SEQ ID NO: 2158 - protein, 14 aa, Artificial Sequence
  Description of Artificial Sequence: Synthetic polypeptide
QAAKGGAADDAVKT

SEQ ID NO: 2159 - protein, 14 aa, Artificial Sequence
  Description of Artificial Sequence: Synthetic polypeptide
QDDRAAAANESVDT

SEQ ID NO: 2160 - protein, 14 aa, Artificial Sequence
  Description of Artificial Sequence: Synthetic polypeptide
QQQHDDAAYQRVHT

SEQ ID NO: 2161 - protein, 14 aa, Artificial Sequence
  Description of Artificial Sequence: Synthetic polypeptide
QSSSSLAAVSTVQT

SEQ ID NO: 2162 - protein, 14 aa, Artificial Sequence
  Description of Artificial Sequence: Synthetic polypeptide
QNNQTTAAIRNVTT

SEQ ID NO: 2163 - protein, 12 aa, Artificial Sequence
  Description of Artificial Sequence: Synthetic polypeptide
NYNKKSDNVDFT

SEQ ID NO: 2164 - protein, 12 aa, Artificial Sequence
  Description of Artificial Sequence: Synthetic polypeptide
NYNKKSENVDFT

SEQ ID NO: 2165 - protein, 12 aa, Artificial Sequence
  Description of Artificial Sequence: Synthetic polypeptide
NYNKKSLNVDFT

SEQ ID NO: 2166 - protein, 12 aa, Artificial Sequence
  Description of Artificial Sequence: Synthetic polypeptide
NYNKKSPNVDFT

SEQ ID NO: 2167 - protein, 12 aa, Artificial Sequence
  Description of Artificial Sequence: Synthetic polypeptide
NYSKKSHCVDFT

SEQ ID NO: 2168 - protein, 11 aa, Artificial Sequence
  Description of Artificial Sequence: Synthetic polypeptide
NYRKTIYVDFT

SEQ ID NO: 2169 - protein, 11 aa, Artificial Sequence
  Description of Artificial Sequence: Synthetic polypeptide
NYKEKKDVHFT

SEQ ID NO: 2170 - protein, 11 aa, Artificial Sequence
  Description of Artificial Sequence: Synthetic polypeptide
NYGHRAIVQFT

SEQ ID NO: 2171 - protein, 11 aa, Artificial Sequence
  Description of Artificial Sequence: Synthetic polypeptide
NYANHQFVVCT

SEQ ID NO: 2172 - protein, 12 aa, Artificial Sequence
  Description of Artificial Sequence: Synthetic polypeptide
NYDDDPTGVLLT

SEQ ID NO: 2173 - protein, 11 aa, Artificial Sequence
  Description of Artificial Sequence: Synthetic polypeptide
NYDDPTGVLLT

SEQ ID NO: 2174 - protein, 11 aa, Artificial Sequence
  Description of Artificial Sequence: Synthetic polypeptide
NFEQQNSVEWT

SEQ ID NO: 2175 - protein, 7 aa, Artificial Sequence
  Description of Artificial Sequence: Synthetic polypeptide
SQSGASN

SEQ ID NO: 2176 - protein, 6 aa, Artificial Sequence
  Description of Artificial Sequence: Synthetic polypeptide
NNGSQA

SEQ ID NO: 2177 - protein, 25 aa, Artificial Sequence
  Description of Artificial Sequence: Synthetic polypeptide
YYLSRTNTPSGTTTWSRLQFSQAGA

SEQ ID NO: 2178 - protein, 16 aa, Artificial Sequence
  Description of Artificial Sequence: Synthetic polypeptide
SKTSADNNNSEYSWTG

SEQ ID NO: 2179 - protein, 8 aa, Artificial Sequence
  Description of Artificial Sequence: Synthetic polypeptide
HKDDEEKF

SEQ ID NO: 2180 - protein, 14 aa, Artificial Sequence
  Description of Artificial Sequence: Synthetic polypeptide
KQGSEKTNVDIEEV

SEQ ID NO: 2181 - protein, 14 aa, Artificial Sequence
  Description of Artificial Sequence: Synthetic polypeptide
QRGNNQAATADVNT

SEQ ID NO: 2182 - protein, 12 aa, Artificial Sequence
  Description of Artificial Sequence: Synthetic polypeptide
NYNKKSVNVDFT

SEQ ID NO: 2183 - protein, 42 aa, Artificial Sequence
  Description of Artificial Sequence: Synthetic polypeptide
SQSGASNYNTPSGTTTQSRLQFSTSADNNNSEYSWTGATKYH

SEQ ID NO: 2184 - protein, 42 aa, Artificial Sequence
  Description of Artificial Sequence: Synthetic polypeptide
SASGASNFNSEGGSLTQSSLGFSTDGENNNSDFSWTGATKYH

SEQ ID NO: 2185 - protein, 42 aa, Artificial Sequence
  Description of Artificial Sequence: Synthetic polypeptide
SQSGASNYNTPSGTTTQSRLQFSTDGENNNSDFSWTGATKYH

SEQ ID NO: 2186 - protein, 42 aa, Artificial Sequence
  Description of Artificial Sequence: Synthetic polypeptide
SASGASNYNTPSGTTTQSRLQFSTSADNNNSEFSWPGATTYH

SEQ ID NO: 2187 - protein, 42 aa, Artificial Sequence
  Description of Artificial Sequence: Synthetic polypeptide
SQSGASNFNSEGGSLTQSSLGFSTDGENNNSDFSWTGATKYH

SEQ ID NO: 2188 - protein, 42 aa, Artificial Sequence
  Description of Artificial Sequence: Synthetic polypeptide
SASGASNYNTPSGSLTQSSLGFSTDGENNNSDFSWTGATKYH

SEQ ID NO: 2189 - protein, 42 aa, Artificial Sequence
  Description of Artificial Sequence: Synthetic polypeptide
SQSGASNYNTPSGTTTQSRLQFSTSADNNNSDFSWTGATKYH

SEQ ID NO: 2190 - protein, 42 aa, Artificial Sequence
  Description of Artificial Sequence: Synthetic polypeptide
SGAGASNFNSEGGSLTQSSLGFSTDGENNNSDFSWTGATKYH

SEQ ID NO: 2191 - protein, 7 aa, Artificial Sequence
  Description of Artificial Sequence: Synthetic polypeptide
SGAGASN

SEQ ID NO: 2192 - protein, 15 aa, Artificial Sequence
  Description of Artificial Sequence: Synthetic polypeptide
NSEGGSLTQSSLGFS

SEQ ID NO: 2193 - protein, 11 aa, Artificial Sequence
  Description of Artificial Sequence: Synthetic polypeptide
TDGENNNSDFS

SEQ ID NO: 2194 - protein, 10 aa, Artificial Sequence
  Description of Artificial Sequence: Synthetic polypeptide
SEFSWPGATT

SEQ ID NO: 2195 - protein, 13 aa, Artificial Sequence
  Description of Artificial Sequence: Synthetic polypeptide
TSADNNNSDFSWT

SEQ ID NO: 2196 - protein, 8 aa, Artificial Sequence
  Description of Artificial Sequence: Synthetic polypeptide
SQSGASNY

SEQ ID NO: 2197 - protein, 15 aa, Artificial Sequence
  Description of Artificial Sequence: Synthetic polypeptide
NTPSGTTTQSRLQFS

SEQ ID NO: 2198 - protein, 19 aa, Artificial Sequence
  Description of Artificial Sequence: Synthetic polypeptide
TSADNNNSEYSWTGATKYH

SEQ ID NO: 2199 - protein, 8 aa, Artificial Sequence
  Description of Artificial Sequence: Synthetic polypeptide
SASGASNF

SEQ ID NO: 2200 - protein, 19 aa, Artificial Sequence
  Description of Artificial Sequence: Synthetic polypeptide
TDGENNNSDFSWTGATKYH

SEQ ID NO: 2201 - protein, 8 aa, Artificial Sequence
  Description of Artificial Sequence: Synthetic polypeptide
SASGASNY

SEQ ID NO: 2202 - protein, 19 aa, Artificial Sequence
  Description of Artificial Sequence: Synthetic polypeptide
TSADNNNSEFSWPGATTYH

SEQ ID NO: 2203 - protein, 15 aa, Artificial Sequence
  Description of Artificial Sequence: Synthetic polypeptide
NTPSGSLTQSSLGFS

SEQ ID NO: 2204 - protein, 19 aa, Artificial Sequence
  Description of Artificial Sequence: Synthetic polypeptide
TSADNNNSDFSWTGATKYH

SEQ ID NO: 2205 - protein, 8 aa, Artificial Sequence
  Description of Artificial Sequence: Synthetic polypeptide
SGAGASNF

SEQ ID NO: 2206 - protein, 48 aa, Artificial Sequence
  Description of Artificial Sequence: Synthetic polypeptide
CTCCAGVVSVVSMRSRVCVNSGCAGCTDHCVVSRNSGTCVMSACACAA

SEQ ID NO: 2207 - protein, 48 aa, Artificial Sequence
  Description of Artificial Sequence: Synthetic polypeptide
CTCCAGAGAGGCAACAGACAAGCAGCTACCGCAGATGTCAACACACAA

SEQ ID NO: 2208 - protein, 7 aa, Artificial Sequence
  Description of Artificial Sequence: Synthetic polypeptide
SAAGASN

SEQ ID NO: 2209 - protein, 24 aa, Artificial Sequence
  Description of Artificial Sequence: Synthetic polypeptide
YFLSRTNTESGSTTQSTLRFSQAG

SEQ ID NO: 2210 - protein, 13 aa, Artificial Sequence
  Description of Artificial Sequence: Synthetic polypeptide
SKTSADNNNSDFS

SEQ ID NO: 2211 - protein, 14 aa, Artificial Sequence
  Description of Artificial Sequence: Synthetic polypeptide
KQGSEKTDVDIDKV

SEQ ID NO: 2212 - protein, 7 aa, Artificial Sequence
  Description of Artificial Sequence: Synthetic polypeptide
STAGASN

SEQ ID NO: 2213 - protein, 24 aa, Artificial Sequence
  Description of Artificial Sequence: Synthetic polypeptide
YFLSRTNTTSGIETQSTLRFSQAG

SEQ ID NO: 2214 - protein, 13 aa, Artificial Sequence
  Description of Artificial Sequence: Synthetic polypeptide
SKTDGENNNSDFS

SEQ ID NO: 2215 - protein, 14 aa, Artificial Sequence
  Description of Artificial Sequence: Synthetic polypeptide
KQGAAADDVEIDGV

SEQ ID NO: 2216 - protein, 7 aa, Artificial Sequence
  Description of Artificial Sequence: Synthetic polypeptide
SEAGASN

SEQ ID NO: 2217 - protein, 24 aa, Artificial Sequence
  Description of Artificial Sequence: Synthetic polypeptide
YYLSRTNTPSGTTTQSRLQFSQAG

SEQ ID NO: 2218 - protein, 13 aa, Artificial Sequence
  Description of Artificial Sequence: Synthetic polypeptide
SKTSADNNNSEYS

SEQ ID NO: 2219 - protein, 14 aa, Artificial Sequence
  Description of Artificial Sequence: Synthetic polypeptide
KQGSEKTNVDIEKV

SEQ ID NO: 2220 - protein, 24 aa, Artificial Sequence
  Description of Artificial Sequence: Synthetic polypeptide
YFLSRTNDASGSDTKSTLLFSQAG

SEQ ID NO: 2221 - protein, 13 aa, Artificial Sequence
  Description of Artificial Sequence: Synthetic polypeptide
STTPSENNNSEYS

SEQ ID NO: 2222 - protein, 7 aa, Artificial Sequence
  Description of Artificial Sequence: Synthetic polypeptide
SAAGATN

SEQ ID NO: 2223 - protein, 24 aa, Artificial Sequence
  Description of Artificial Sequence: Synthetic polypeptide
YFLSRTNGEAGSATLSELRFSQAG

SEQ ID NO: 2224 - protein, 8 aa, Artificial Sequence
  Description of Artificial Sequence: Synthetic polypeptide
HGDDADRF

SEQ ID NO: 2225 - protein, 14 aa, Artificial Sequence
  Description of Artificial Sequence: Synthetic polypeptide
KQGAEKSDVEVDRV

SEQ ID NO: 2226 - protein, 14 aa, Artificial Sequence
  Description of Artificial Sequence: Synthetic polypeptide
KQDSGGDNIDIDQV

SEQ ID NO: 2227 - protein, 7 aa, Artificial Sequence
  Description of Artificial Sequence: Synthetic polypeptide
SDAGASN

SEQ ID NO: 2228 - protein, 24 aa, Artificial Sequence
  Description of Artificial Sequence: Synthetic polypeptide
YFLSRTNTEGGHDTQSTLRFSQAG

SEQ ID NO: 2229 - protein, 14 aa, Artificial Sequence
  Description of Artificial Sequence: Synthetic polypeptide
KEDGGGSDVAIDEV

SEQ ID NO: 2230 - protein, 7 aa, Artificial Sequence
  Description of Artificial Sequence: Synthetic polypeptide
SNAGASN

SEQ ID NO: 2231 - protein, 24 aa, Artificial Sequence
  Description of Artificial Sequence: Synthetic polypeptide
YFLSRTNGEAGSATLSELRFSQPG

SEQ ID NO: 2232 - DNA, 21 bp, Artificial Sequence
  Description of Artificial Sequence: Synthetic polynucleotide
  misc_feature (4)..(5): n is a, c, or g
  misc_feature (6)..(6): n is a or c
  misc_feature (7)..(7): n is a, g, or t
  misc_feature (13)..(13): n is a or g
  misc_feature (14)..(14): n is g or c
  misc_feature (17)..(17): n is g or c
agcnnnncagganncancaac

SEQ ID NO: 2233 - DNA, 18 bp, Artificial Sequence
  Description of Artificial Sequence: Synthetic polynucleotide
  misc_feature (4)..(4): n is a or g
  misc_feature (7)..(8): n is a or g
  misc_feature (9)..(9): n is g or c
  misc_feature (10)..(10): n is a or c
  misc_feature (11)..(11): n is a or g
  misc_feature (12)..(12): n is g or c
  misc_feature (13)..(13): n is a or c
aacnacnnnnnnnaggca

SEQ ID NO: 2234 - DNA, 24 bp, Artificial Sequence
  Description of Artificial Sequence: Synthetic polynucleotide
  misc_feature (4)..(5): n is a or g
  misc_feature (10)..(11): n is a or g
  misc_feature (13)..(13): n is a or g
  misc_feature (14)..(14): n is a or c
  misc_feature (15)..(15): n is g or c
  misc_feature (16)..(17): n is a or g
  misc_feature (18)..(18): n is g or c
  misc_feature (20)..(20): n is a or g
  misc_feature (21)..(21): n is g or c
cacnnggacnncnnnnnnannttt

SEQ ID NO: 2235 - DNA, 75 bp, Artificial Sequence
  Description of Artificial Sequence: Synthetic polynucleotide
  misc_feature (22)..(22): n is a or g
  misc_feature (23)..(23): n is a, c, or g
  misc_feature (25)..(26): n is a, c, or g
  misc_feature (27)..(27): n is g or c
  misc_feature (28)..(28): n is a or g
  misc_feature (29)..(29): n is g or c
  misc_feature (34)..(34): n is a or c
  misc_feature (35)..(35): n is a, c, t, or g
  misc_feature (37)..(37): n is a, c, or g
  misc_feature (38)..(38): n is a, c, or t
  misc_feature (39)..(39): n is g or c
  misc_feature (43)..(43): n is a or c
  misc_feature (44)..(44): n is a, c, or t
  misc_feature (45)..(45): n is g or c
  misc_feature (49)..(50): n is a, c, or g
  misc_feature (51)..(51): n is g or c
  misc_feature (55)..(55): n is a, c, or g
  misc_feature (56)..(56): n is a, g, or t
  misc_feature (57)..(57): n is g or c
  misc_feature (67)..(67): n is g or c
  misc_feature (68)..(68): n is c, g, or t
  misc_feature (70)..(70): n is a or g
  misc_feature (72)..(72): n is g or c
tatttcttgagcagaacaaacnncnnnnncgganncnnnacgnnntcannncttnnnttttctcagnncngngcg

SEQ ID NO: 2236 - DNA, 48 bp, Artificial Sequence
  Description of Artificial Sequence: Synthetic polynucleotide
  misc_feature (5)..(5): n is a or c
  misc_feature (7)..(8): n is a or c
  misc_feature (10)..(10): n is a, c, or g
  misc_feature (11)..(11): n is a, c, or g
  misc_feature (12)..(12): n is g or c
  misc_feature (13)..(13): n is a or g
  misc_feature (14)..(14): n is a, c or g
  misc_feature (16)..(16): n is g or c
  misc_feature (17)..(17): n is a or g
  misc_feature (18)..(18): n is g or c
  misc_feature (31)..(31): n is a or g
  misc_feature (33)..(33): n is g or c
  misc_feature (43)..(44): n is a or c
tcaanannannnnncnnnaacaacaacagtnanttctcgtggnnagga

SEQ ID NO: 2237 - DNA, 42 bp, Artificial Sequence
  Description of Artificial Sequence: Synthetic polynucleotide
  misc_feature (4)..(4): n is g or c
  misc_feature (7)..(8): n is a or g
  misc_feature (10)..(10): n is a or g
  misc_feature (11)..(11): n is g or c
  misc_feature (13)..(13): n is a or g
  misc_feature (14)..(14): n is a, c or g
  misc_feature (15)..(15): n is g or c
  misc_feature (16)..(16): n is a or g
  misc_feature (17)..(17): n is a, c, or g
  misc_feature (19)..(19): n is a or g
  misc_feature (20)..(20): n is a, c, or g
  misc_feature (22)..(22): n is a or g
  misc_feature (25)..(25): n is a or g
  misc_feature (26)..(26): n is c or t
  misc_feature (29)..(29): n is a or c
  misc_feature (30)..(30): n is g or c
  misc_feature (31)..(31): n is a, c, t or g
  misc_feature (32)..(32): n is a, c, or t
  misc_feature (34)..(34): n is a or g
  misc_feature (35)..(35): n is a, c, or g
  misc_feature (36)..(36): n is a or c
  misc_feature (37)..(37): n is a, c or g
  misc_feature (38)..(38): n is a or g
  misc_feature (39)..(39): n is g or c
aagnaanncnncnnnnnanncnatnncgnnnncnnnnnngtc

SEQ ID NO: 2238 - DNA, 42 bp, Artificial Sequence
  Description of Artificial Sequence: Synthetic polynucleotide
  misc_feature (4)..(5): n is a, c or g
  misc_feature (5)..(5): n is g or c
  misc_feature (6)..(7): n is a, c or g
  misc_feature (8)..(8): n is g or c
  misc_feature (9)..(9): n is a or c
  misc_feature (10)..(10): n is a or g
  misc_feature (11)..(11): n is g or c
  misc_feature (12)..(12): n is g or c
  misc_feature (13)..(13): n is a or g
  misc_feature (14)..(14): n is a, c, or g
  misc_feature (16)..(16): n is a, c, or g
  misc_feature (17)..(17): n is a, c, or g
  misc_feature (18)..(18): n is g or c
  misc_feature (25)..(25): n is a, g, or t
  misc_feature (26)..(26): n is a, c, or t
  misc_feature (28)..(33): n is a, c, g, or t
  misc_feature (28)..(29): n is a, c, or g
  misc_feature (30)..(30): n is g or c
  misc_feature (31)..(31): n is a or g
  misc_feature (32)..(32): n is a, c, g, or t
  misc_feature (33)..(33): n is g or c
  misc_feature (37)..(37): n is a, c, or g
  misc_feature (38)..(38): n is a or c
  misc_feature (39)..(39): n is g or c
cagnnnnnnnnnnncnnngcagctnncnnnnnngtcnnnaca

SEQ ID NO: 2239 - DNA, 33 bp, Artificial Sequence
  Description of Artificial Sequence: Synthetic polynucleotide
  misc_feature (5)..(5): n is a or t
  misc_feature (7)..(10): n is a, c, g, or t
  misc_feature (7)..(7): n is a or g
  misc_feature (8)..(8): n is a, c or g
  misc_feature (9)..(9): n is g or c
  misc_feature (10)..(10): n is a, c or g
  misc_feature (12)..(12): n is g or c
  misc_feature (13)..(13): n is a or c
  misc_feature (14)..(14): n is a, c or g
  misc_feature (15)..(15): n is g or c
  misc_feature (16)..(16): n is a, c or g
  misc_feature (17)..(17): n is a, c, or t
  misc_feature (18)..(18): n is g or c
  misc_feature (19)..(20): n is a, g, or t
  misc_feature (25)..(25): n is g or c
  misc_feature (26)..(26): n is a or t
  misc_feature (27)..(27): n is g or c
  misc_feature (29)..(29): n is t or g
  misc_feature (30)..(30): n is g or c
aactncnnnnannnnnnnnntgtgnnntnnact

SEQ ID NO: 2240 - DNA, 30 bp, Artificial Sequence
  Description of Artificial Sequence: Synthetic polynucleotide
ttgttgaacatcaccacgtgacgcacgttc

SEQ ID NO: 2241 - DNA, 30 bp, Artificial Sequence
  Description of Artificial Sequence: Synthetic polynucleotide
tccccgtggttctactacataatgtggccg

SEQ ID NO: 2242 - DNA, 30 bp, Artificial Sequence
  Description of Artificial Sequence: Synthetic polynucleotide
ttccacactccgttttggataatgttgaac

SEQ ID NO: 2243 - DNA, 30 bp, Artificial Sequence
  Description of Artificial Sequence: Synthetic polynucleotide
agggacatccccagctccatgctgtggtcg

SEQ ID NO: 2244 - DNA, 30 bp, Artificial Sequence
  Description of Artificial Sequence: Synthetic polynucleotide
agggacaacccctccgactcgccctaatcc

SEQ ID NO: 2245 - DNA, 30 bp, Artificial Sequence
  Description of Artificial Sequence: Synthetic polynucleotide
tcctagtagaagacaccctctcactgcccg

SEQ ID NO: 2246 - DNA, 30 bp, Artificial Sequence
  Description of Artificial Sequence: Synthetic polynucleotide
agtaccatgtacacccactctcccagtgcc

SEQ ID NO: 2247 - DNA, 30 bp, Artificial Sequence
  Description of Artificial Sequence: Synthetic polynucleotide
atatggacgttcatgctgatcaccataccg

SEQ ID NO: 2248 - DNA, 30 bp, Artificial Sequence
  Description of Artificial Sequence: Synthetic polynucleotide
agcaggagctccttggcctcagcgtgcgag

SEQ ID NO: 2249 - DNA, 30 bp, Artificial Sequence
  Description of Artificial Sequence: Synthetic polynucleotide
acaagcagcttcactatgacaaccactgac

SEQ ID NO: 2250 - DNA, 284 bp, Artificial Sequence
  Description of Artificial Sequence: Synthetic polynucleotide
  misc_feature (59)..(59): n is a, c, g, or t
  misc_feature (244)..(244): n is a, c, g, or t
cagcctaggaactggcttcctggaccctgttaccgccagcagagagtctcaamammavnsrvcsrsaacaacaacagtrasttctcctggmmaggagctaccaagtaccacctcaatggcagagactctctggtgaatcccggaccagctatggcaagccacrrggacrrcrmsrrsarsttttttcctcagagcggggttctcatctttgggaagsaarrcrscrvsrvarvcratrycgmsnhcrvmvrsgtcatgattacagacgaagaggagatctggac

SEQ ID NO: 2251 - DNA, 34 bp, Artificial Sequence
  Description of Artificial Sequence: Synthetic polynucleotide
tgggacaatggcggtcgtctctcagagttktkkt

SEQ ID NO: 2252 - DNA, 35 bp, Artificial Sequence
  Description of Artificial Sequence: Synthetic polynucleotide
agaggacckktcctcgatggttcatggtggagtta

SEQ ID NO: 2253 - DNA, 31 bp, Artificial Sequence
  Description of Artificial Sequence: Synthetic polynucleotide
ccacttagggcctggtcgataccgttcggtg

SEQ ID NO: 2254 - DNA, 32 bp, Artificial Sequence
  Description of Artificial Sequence: Synthetic polynucleotide
tctcgccccaagagtagaaacccttcsttyyg

SEQ ID NO: 2255 - protein, 735 aa, Adeno-associated virus 2 [sequence omitted]

SEQ ID NO: 2256 - protein, 736 aa, Adeno-associated virus 9; identical to SEQ ID NO: 123

SEQ ID NO: 2257 - protein, 7 aa, Artificial Sequence
  Description of Artificial Sequence: Synthetic polypeptide
GSTPPPM

SEQ ID NO: 2258 - protein, 7 aa, Artificial Sequence
  Description of Artificial Sequence: Synthetic polypeptide
GETRAPL

SEQ ID NO: 2259 - protein, 6 aa, Artificial Sequence
  Description of Artificial Sequence: Synthetic polypeptide
SPAKFA

SEQ ID NO: 2260 - protein, 6 aa, Artificial Sequence
  Description of Artificial Sequence: Synthetic polypeptide
NKDKLN
